United States Patent Application Publication US 2020/0377945 A1 - sequence listing, part 50

SEQ ID NO: 11092 - DNA, 38619 bp, Unknown
  gut microbiota DNA sequence
cagcgctccatcgatactccgccaacaaacaacaaaaacagggacgcaccggtctcggtgcgtccctgttttttcagctgcttattccgcctccggcatgggcttgccgaggcgcttatacatggtcttcttcacggcgcggaggatgttctcatagccggtgcagcggcacaggtggccggagagcagcttgcgcagctcgtcgtccgtgtactcccggccggtctcaagcagctcgacggccgtcatgatgaagcccggcgtgcagaagccgcactgaatagcggcctcgtcgatgaaggcctgctggatgtcggacagctcaccgttcgggccgagcaggctctcgagcgtgcggatgtgcttgccctctgcccatacggcaaggtagatgcacgaattgaagcactcgccgtcgatgatgacgttgcacgcgccgcactcgccgacctcgcagcccttcttcacggacgtcaggcggaaatcattgcgcagcatgtccgtcagcgaggcgcggacgtccacgatctgctcgacgtccttgccgttgatgttgcagcgcacgagcttatactgcttgttcattttaccgcacctcctgcaagctcgatcgagcggatgaggcagcgccgcgccagctcgacggcgatgtgctcgcggaaggccttcgaggcgcgccacgagtcacgcggatggatgtcctgcagcacggcctgcgcgaaggcgtcgaccgtctcgcggcagaccgggcggccgttggcctgcgcctcggcgctcggggcgcgcatgggcacggggcccgccacgccataggcgatgcgcgcgcgggcgatggtctttttgtcctcgctcagcacgacgtttacggagcagcctgtcgtggcgatgtccatggcgttgcgcatggcgtatttgatatagtggccgaagcagttttcatagctggccttcgggatgaggatggccgtctggatctcgccctcctcggcgcggatgtccaccttgcctgcacggaggtagaagtccttgatgggcaggcggcgcacgccgtttttgccggtcagctccacgatggcctcccacgcgtgcagcgtggaggcggagtcggcggacgtcacgccgttgcaggtgttgccgccgatggtgccgatattgcggatctgcgggccgccgaccatgtcgaccgcctcgccgagcacgttgatgtatttccggatgatggggtcgcgcgtgatgtgggaaaagctcgtcagcgagccgatgcggatgtttccgtccgcgtcgatgcagatgccgcgcatggcgtcgatgccgtagatggagatgagctccgccccggcacgcttgccctcgcgcatctgcacgagcacgtccgagccgcctgcgatgatctgcgcctccggatgctccagacgcagggcgacggcctcttccacggaatgcgcctcatagagcgctttcatatcatacatgggcggtttcctccttttcgaacaggcccgccttctcgaatgcggcgaagagaacgtgcggggtgatgggcgcgacgtcgatgccgatgcccgtggcgttcaggatggcgttgcggatggccggcgcgccggagcaggcgggcggctcgccgagggccttcgtgccgtaggggttcgtcggctcggcgttctccacgaactgggcctcgagatgcgggtgatccatcatggtcgagagcttgtagtccagcaggttgttgttgagcgggcggccggtcttcgggtcgaacttcagctcctcggacatgccgtagccgatggccatggacatgccgccgtgcacctgcgcctcagcaagctgcgggttgatgagcttgccgcagtcgtgcacgttgatgagcttcagcagcttcaccttgcacagggggatgtcgacctcgacctccgcgaacgagcagccgaaggaataggcgttgttcttgatctggtaagtagattccgccgtcagatgctcggagtgcgacaggctgtagagcgcctccgtggcaagctcgccgagcgtcatcagcacacggccgtccgtcctgcggatgatcctgccgtcgacgatgtcgagcagggcaggcatctggcgcgtcagctcgcaggcgtatttcagaatgcgctccttgagcagcgcacccgtctgggcgatggcgaagccgccgacgtaggtctggcgcgaggcataggcgcccgtgccgaacggcgtgacgtccgtgtcctgcgccgtgacgacgtgcacgtccgaaacggggatgcccacggcatccgccgccatctgggcgaaggcggtgtcgcagccctggccgatctccgtctcgccggtctgcagctggatggagccgtcctgattcaggaccatgcggcacgagcagctctcaaggctgatgggccagacagccgtgttgtaccagaacagggcgcagccgacgccgcggcgcacgggaccggtctggttttcgtattcgcggtgcttgcggctgtagtccatccacgcctcgcccttgtccagcacctgattgagcgtgtcggaatggttctcgttcttcgagaagccgtcgacgaagccgacgggcatcatgtgcttgcggcggaactccagcgagtcgacgccgagcacgcggcagacgtcctcaatgtgcgattcgcccgcgaacatggcctgcgggatgccgtagccgcgcatcgcgcccgcggcggggcggttcgtgaacacagtgtaggcgtcgccgtcgacgttcgggcagggatacagctgcgggaatgcgcccatgcccttggcgacgatgccgtggccgtgggaggcgtaagcgccctggttcgagaagcactcgatcttgcgcgcggcgaacgtgccgtccggccgtacccacgagatgatgtgcgtgcggatggcgtggcgcacgcggttgcagacgaacgtctcctcgcgcgtgcagtcgagcttgacgaggcggccgcccacgacggtggagaggtaggcgcacagcggctcatacagcgcgtcctgcttgttgccgaagccgccgccgatatacggcttgacgacgcgtaccttgccccaggggatgccgagagcctgcccgacgacgcggcggacgatgtgcgggatctgtgtggaggagtagatgacgatgcgcccggcctccatggaggcgaagcacatgtggttttcgatgtggcagtgctgcacggtcggcgtgtcgtaccagccctcgaccctgatgaggcccggctcgcggctggcctcctcatagttgccgttgcggatggtcgtgtgggcgaggatgttgttcgggaattcctcgtgcagcagcggggcatcgggcttcatggcctcctgcacgtccagcacgaagggatattcctcatattccacgcgcagcgcgcgcagggcctgcgcggcggcgacctcattctccgcgacgacggcggcgacgtcatcgccgtagaagcgcacgcgggacgtcagcagcaggcggtcggcgacgtcctgatggtgcgggtccgtcgaccacggatggcctgccgtggggaatttgatctgcggcacgtcaaagcaggtgacgatcttcacgacgccctcgatctgctcggcggcgctcgtgtcgatggacttgaccacgccgtttgcaatggtcgaatgcagcacgcgcgcgacgagcgcgctgcggtcacagaggtcatcgcagtactttgcgcgcccggttgccttgtcgaatgcgtccacacggcggacgctcttgccaacctccatggggaaccctccttttggatcgcagcagaataccggcaatgtgcacagattctgcgaaaaatttctttgtaatttgaagtatagcataaattccgcagcgtggaaagcgaaaacgttattctatgttatagataacggataattcggcaatggcgaacgctccgactggaaaaccccgccgattgcggatatactatagataaaaacggaaaatgcaggggagcggacagccgggcccggcgctgcacgaacgattcgcacgggctatcgctaaaacggtgatggctcccggatttgtcattgcgaggccccgaaggggccgtggcaatctcgcagtaccatgtcggatatcaggaaagcccaggcgaaaacgtgatcggttgcgtgagattgccacgtcggccgttggcctcctcgcaatgacaaacttgggggccattgcctttttaatattagcccgcacttcccgccggtgcagtgccgggtccggctgtcccctcccctacaatactgcatgcggtcggcgatggcttgtacgggctgcaactgccttcccgagattgccacgtcgctttgctcctcgcaatgacacatcaaggggcgtgcgcagggaacggtgcacggcatcgatttggctgtccttatgccgcttcgcggacgggcctggctgtccccgcccctacaacgcacgaccggtgcccctgcgaaattttccatattccattatcccttttactggaggtatcaccatgctcggttgtgtcatcatggcggcggggaacgccgtgcgcttcggtgcgaacaagctcgaggcggagctggacggcaagccgctcattcgccgggcattcgaggccgttccggccggggtgttcgaccgcgtcgccgtcgtcacgcagtatcctgccgttgcagccctcgcgcgggaattcggcttcacgccggtgcgcaacgaccggcccggcgacgggctgagccgcacggtccgcttcggcacgcaggcgctggcggattgcgacggcatagccttcctcgtggccgaccagccgctgctgtcggcatcggccgtgcgcgcggtcgtgcggcagtggcgggagcatccgtcgtgcatcgtgggcgcggcctgcggcacgcggcggggcaatccgaacgtgttcccgcgggaatttttcccggccctgtgcgcgctcgagggcgaccgcggcggcagcgccgtcatccggcagtatccggagcgctaccttgccgtcgacgtcccgccggaggcgctggcggatgtcgatactcccgaggctctgcgcgccatccgggatactctgtagggaacggcatacagcaaattgaaaatggaaaaataaaaaagctgtgcgcagcttccggtcgtgcgttgtagggaagtggcatgccatgcccctgcgaattacatatcataaaacaacgaacggcacgctttgcgtgccgttcctgttatttctcattccacgcggaggcgggcggggagggctgcgtccggggtgacgagcaccgtgcggtagcggtcatacacgaccatgccgggcttggccccgttcggcttgcgcaggcagcgcacgggcgtcacatcgacggggacgttctgcccctcgcgcgcctcggagtagtaggccgcaagctcggccgcttccgtgatcgtcccgtccggcggctgcacgcctgcgcacgcgatgatgacgtgcgtgccgtgaaatttctgcacatgcagccacaggtcgtcgcgccgcgccgtcttgagcgacagctggtcgttctggcggttgttgcggccgacaaaaatgtcgaagccgtccgacgagcggaagtgcattggctttgacggctgctgccgggcctgcttgcggcggtctgccgggcggacatagcctccggcctccaattccgctcgaatctcgctcaggtcgcgctcattttcggcgcgggccagctcctcgagcacgccgcccagataggcctcctcgatctcgccctgtgcgatctgctgcgtgagcacctgctcggcatgcttagcgcgggcgtagtccttgtagaaccgcgcggcgttctgctgcggggagaggttcggcttgagcggaatttcaatttcgcgcagatcctcgtcataaaaatcctcggcgcgcagcagcgtctgcccgcgcgtgatggcgtgcaggttcgccgtgacgatgtcgccctgacggcgcagctgctcgcggtcgtgcgtggcctccagctcctgccgctgcagctccagcttgcggcgcgtgcgctcgtgcaggttcgaaatggccttgcgcagcgtctgcgaccgctgccgcatgcgctcggcgtggtccgtctcggtgtaaaagcggtcgagcagggcggaaaagctctcgcacggctcggcgcgcagatagccgccgtattgccggatgtcgcgataggtgaaatccgtcggtgcgccgtccttccacagcagcatgggctgcatctgtacgggcggcagggcggcgaactccgccgtcagaaatgctgccagccgcgcggcgtccagcgtggggatgggcgcgtccgtctcgcccgcaaagcggaacgacagctcgcgcgcgatgagcggcgacaggcccgcaaaatgcgccagcagccatttgtccagccgcatggccgcgtcgggccgggcgagcagggcaagaagcccggcctccgtcgtctcctgcgggatgcggcggtcctgccgcggcggctcgtggtaaaacaggccgggcagcagctggcgcagctcggacatttcaaagtccacgcgccgcaggcagtcgagaatgcggccgtccggccccgtgaggatcaggttggaattgcgcccgaccagctcgaggatcaggtgcttgcggcagggcacacccagctcgtccgtgcagtcgaacgtcaggtcgagcatgcgctcggccgcgggctggcggatatcggcaagcctgccgcctgccagatgcttgcgcagcagcatacagaacatcggcggctgcgcggggttttccagctgcgcctgcgtcaggtggacgcgcggccggttgccgttggcggacagcagcagtcttccgccgccgtcgcgcccgcgcagctggagcacgacggtgtcgcgcgcgggctgctggaccttatccacgcgggccccgacaagggtggggcgcagctctgcggcgacggccgtgagaaacatggcgtcaaatggcatggtcttcctccatcatggcggcaaacagcgcctcgatgcgcgcggtctgcccggagagatacagtgcgccaaacagggcctccagccctgttgcgcgggcatattcgcccggcgtggcgtgcttcggaataccgtgaggatgggcgttgcggccgcggcgatagacggcggcctcctccggcgtgagcaggggctggatgcgcagggcaaagcgcgcctgcgccggggcctgcacgagtgcgacggtctgctgatgcaggcggccgttcgttgtgccgccctcgacgcacagctttgtgcgcacgagcagctcaaacacggcgtcgccgatgtgcgccagcgccagagacgacatggccagcagctcctgttgggtcatttgcggatgaaaatagtcctgcatggcgcagtcgcctccagaatgatcgaattttggatgattttgagtgatattgccgggctgcttttgcgtgctgtaggggaggggcatgcccctcccggcacagcgccgccgacccgtacaggctttcgttaaaatgaaaccggcctccgatttgtcattgcgaggccccaacggggccgtggcaatctcggggaggcacttccgactcgtaccggccgtcgataaaacggtatgcaccaattgcgtctgtagcggcgctcactgagcgccttgtacagagacattcaacggcaggagggcactggtgcaccacggcactcccctgatgtgtcattgcgaggagcgaagcgacgtggcaatctcacagtacaatgccggataacagggaacttccggcgaaaacgtgaccggtcgcaggagattgccacggcccctttggggcctcgcaaggacaaatctgggagcgcggcgctgacaatgatgccctgcaccgaatgggccgtccttatgccgcttcgcggacgggcgaggcatgcctcgcccctacatttggcctttaatgcttccgccatgttgcggggctgagcagcagcagcacggggaacagctccagccgcccgaggagcatgtcgagcgtcagcacgaccttcgacagggcggagaagctcgcatagctgccgaacgggccgacctcgaggctcaggcccgggccgatgttgttcagcgtggcgaacacggatgtcacgctcgtctcggccccgaagttatcgagcgagaccagcaggatggacacgacggcaatggcggcgtagcagatgaagaacgccatcgtgccgcggatgacctcgctgctcacgcgtttgccgtccatcgtcatgacctccacggagtgggggtgcagcaggtggcgcgtctcggcgcgggccgtcttggacaggatgagcacgcggctgaccttcatgccgccgcccgtggagccggcgcacgcgccgatggccatcaggatgagcagcacggtcttggaaaattccggccatttcgcaaaatccgccgtgccgaagcccgtcgtcgtgatgacggagccgacggagaaggccacatggtggatcgtctggaacacggtggggaagaacccgcccgtgagcagcaggttggcactgatgaggacgatggccccgaaaatgatgataaagtaccagcgcacttcgctgttgtgccacgcgagcctgaagcggcggcgcagcaggaagaaatacaccgagaaattcacgccgaacaggatcatgaacaccgtcgtcacggcctgcaggtaggccgagtagtccgcaaggccgctgttgcgcacggaaaagccgcccgtaccggccgtgccgaaggaaaggcacaggctgtcgaaccacgttatctcgccccagccgaacagcacgcccagccggtagaacaggatctgcagcagcgtcatggcgcagtagatggcatagaggatcgcggcggacgtgcgcatcttcggcaccatcttgctgacggaagggccgggggactcggcccgcagcagatagatgctctcgccggacagcggcacgatggccagcatgaatacgagcacgcccatgccgccgagccagtgggtgaagctgcgccagaacagcaggcacttcggcagatcctccacggcgcggaggatgcttgcaccggtcgtcgtaaagccggacatggtctcgaacacggcgtcgagatacgacgggatcgccccggagaccgtaaacgggatcgcgccgacgagcgagatgaggatccagctcagtgcgaccatcacgaagccgtcgcgcgcgtgcagctcgcggcggcgcttcggccgcagcaggataaaaagaccgccgagcaggccgctgcctgcggccgtggcaagcaggacccacagctccggctcgccgtagatcacggcgacaatgcacggcagcagcaggaaggccccgatgaccagcagcacgtcgcccagcagggagaggatcatgcggtaattcatgctttcactctccgcttgtccagaatgtcgtccagatcgtccaggcccgtcgccgccgtcacgacgacgacggtgtcgcccggctcgatggtgtcgcggccgccgggggtgatgatccggccctcgcggttgatggctccgataagcaggttcggccgcgtgggcagctccatgagcggcctgccgcagacggcggatttctccgtggcgcggaactccagtgcctcggccttgttgccgacgatcttatagagcgtctcgacgttcgagccgagcgagttctgcatggcgcggacgtagcggacgatgtggtcggccgcgatatagcggggatggaacacgcttccgaggtccatgcccttgatgatgtgagagaatgtcgtgcggttgattttcgtgacgatcttcgcgctcgagacgctgcgggcatagaggctcatcagcacgttttcctcatcgatgcccgtcagcgaggccacggcgtccatctttgcaatgccctcctcggcgagcagctgctcgctcgtgccgtctccatggatgatcgtggcctcgggcagacgctctgccagcgagtcgcacacggcggcgctggactcgatgatcttcacgctcgcgccgaagtccagcatctgccgcgcgaggtagtaggagatgcgcccgccgccaagcagcatcacgcgcttgacggggttcgtctgcacaccgatcttgtggaagaactttgcggcgagcttcggacttgccaccacgctgatgcggtcgcctgccagcagggtgaagctgccgtcggggatgtacacctcgtgctgcccgcgctccacaacgcacacaagcgcgccggactgcaggcggccgaggtcggagagcttcatgccgtcgagcatggagccggggtcgatgcgcatcttgtgcagctccacgcggcccttcgagaacgtgtcgatcttgatggaggccggggcgcgcaggatgcgcgcgatctccgtggcgctggccagctccgggttgagcgccatgctcagcccgaggtcgtcctgaatgagatgcagcccgctcgtatattccgggttgcgcacgcgggcgatcgtgttgcccacaccgaggcgcttggcaatgaggcacgagagcaggttctgttcgtccgtggacatcacggcgatgacaagatcggcagagggcacgccggcctccacctgcgtgtccatgctgatgccgttgccctcgacggtcatgacgtcgagcgtgttgccgatggcgtcgagcgcagccgtgcgcgtgtcgacgacggtgatctcgtgaccctcgcggagcagctgctccgtcagcgtcgcgccgatcttgccggctccgatgataacaatgttcattcccgaaaagactcctgtatggtgaatttcaaaatgatccaattgatttgattacaactttgtagcggcgctcactgcgcagccgttggcggctttgccgccttacggatgcggcgtgccctttacgggcggtgagcgccatgcaggctggcattatttgaggcacaaattcattggcgcaaggcccccaagtttgtcattccgaggagcgaagcgacgtgggaatctcctgcagccggttacgttttcgccgaggcctacctgctattcaacatggtactgcgagattgccacgtcggctgcgcctcctcgcaatgacacatcaggcagtgcagaggtgcacaagagcacttctgcggttaaattttccccgtacagggcgctcgctgagcgccgctacagacgcaattggtttgtacgttttatcgttctctgtacgaactgacagtgccttcccgagattgccacgtcggcctgcgtcctcctcgcaatgacaaatccgggagcttccgcattccattccaaatttctgtatactacgtcctccgtgcggtatactagcataaaacacgcggagggatgcacatgacaaacgaggaatacggccgctatgtggacgcgctggcgccccggtcgaaaacggggaaaaatctgctgaacgccttctgggtcggcgggctgatctgcgcgatcgggcaggcgctcctgaacggctatcaggcgctcgggctggacgaaacgacggcgggcgcggccgtgagcatctcgctcgtgctgctctcggccatcctgacgggctttgcggtctatgacgacatcgcaaaattcgccggagcgggcacgctcgtgcccatcacgggcttcgccaacgccgtcgtggccccggccatcgagttccagacggagggcttcgtactgggaacggcggcgaagatgttcaccatcgccgggccggtcatcgtctatggcctgtcggcaagcgtgctctacggcgtgatctattggatttgctctgtaatataaggagaaaagcttcctgaatgggaagcttttcttatattctcaacatatttcgacgatttttttcgcacgcaaagtgtagaataaaatggacaaaacaagtaaagaggtgtatattatgacagagcaaaactatcaatataggacaagccaaaatttattgcgcaatcagtttgatggagacggcccattccaaattccgattatcccaaaagcatcgttttcagagaaggaattccaggagttaatgctaatcggctttgacaaagctagagctgacgatgaaaagaatagagatcgcatggtgcatttttttctgtatgactataagtttgagcgagtatggaaagatgctgcacgagatttagaaaggctgaaaaactaccgggcggttttgtccccagatttcagtatgtatattgaaatgaacccaaccatacagttatataatacatttcgaaatcgctggtgtggtgcatattggtctaatgaggggttgcgagttgtaccgactataagttggggaaacgagaaaacttttgaattctgtttcttgggtgttcctaaaggaagcacggtcgcagtttcaacctatatggtatcagaacatgataaccacaacgatcaaaaggatttttttatggcgggttaccgtgaaatgctaagacaaattgaaccagaacgtatcatatgttataatacaccatttcctgaaatggaagggaatattgtatttgttgactacgaactctcctcttggaagtaccaagggaaggaatataaattatcaccatatgttaagtatattagcggtgaattgccgctgcctgaaaacactgggattgttttaaaacagggttatgtagtgtcggaagaaaaagggatgggtagtgtctacggaggaacttggagaccaaatcccaataagccaacggatcaaagatttttgggaaagccaggtgaaatcaaaacgacaattaccacaaagggagatacctacagaactaaaataggtagtgatggacgtgctgaacgggaaagacatgagacagttcataatagaggcgacaaacataccaacccacacgaccatgagattaactgggataatccgggtggacatccagttctaggccccccgattaattatcctgatggcgcaccagaatttaaagaatataggagcttattagcaatggatgatagtaacattatctttgcggggaacgacaattttgtgtcgatcggcgatttcgagcgcagcctgagctggggcgcggagatcgaatttgaatggaagggcgtgctgtatggtgtgatccgatatggaacggatcacaagatcacgatctaccagtgcggccaccccgaaacggaaaaagtgtgcgaaacggcggaagaagcactggaatacatggtcggcgaggaccgtctgcgcgatgtgatcacgcaggtgcgcgttgtggagcgcacgatctgatccgacaggctatttgcagcatcctttgcggcggacggcagcgtccgccgcatttttctggcgtttcgcctgtcccccatgcatatagtgttctgaacgcacagcgaagggggtcaggcacatgagggagaacattgagcagagagcctgtgagttggctgtgtacatcatcgagacccacgccaccgtccgcgccgcggcgaggcatttcggcgtcagcaaatcgacggtccacaaggacctctccgagcggctgccgcactggaaccgcgcgctctatctgcaggtcaaggcggtgatggagcagaacaaggcggagcgccacatccgcggcggcatggccacgcgccggaaatatcgcggggagtgaggcgttttcttgcaaagcgggcatatttatggtatgatgatacaaaaaagaataagccgcagcgcggctgcggagaaggagcggcccggtgaagatctctacaaaggggcgctatgcgctgagaatgatggtcgatctggcggagcaccagaacggcgagtatatttcgctcaaggatattgcccagcggcaggaggtctccaagaaatatctggagcagatcgtgccgatcctgaacaaatccggctttctgaagacaaatcgcggctatcagggcggctatatgctggcgaagccgccccggcagtacaccgtcggcgacatcctgcgcctgacggagggggaccttgcgcccgttccgtgcgcggcgcaggacccggccgactgcccccgcagcgaggactgcgccacgctgccggtctggcgcgggctgaaccgcgtcatcaacgaatacctcgatggtatcacgctgcaggacctgctcgaccagcagcgggcgcactatgccaatgattacatgatctgagggagcgccgtgcggcagctgcgcaaaaattgaatatttttacaggaaattccttgacaaatggaatcctgcctgttaatatggaactatgatccgactgcggaggaagagagacggacgcgatgtttgacgatcaggagacccattatcccgttccgggcgaaacgccgtgggagcggctgcgctatctggccaccagcacggagacgatctacccggtcccgccctatgtctgcatgaagtgccgccgcgtcatcgtcccgcggaaatgggcgctcattctgcacgatctggcggaattcctcggctatttctggctgtttggcatctggttctggccgtctgtcggggtcgccccggcgaaatcgatcgcgttcccgtccattgcgctgttcctgctgtgcatgcgcggggcagcgccgctggcctatgccgccattccgtgggtgctggatataccggacgatccggacgcgcagttctatgcctgggcgacgcagaagagcgtggcctatctgcgctttttcctgcgtatgcttcccgtgatcgcgatctttattctgccataatgctgccgccgtgcccctcgctggacacggcgatttttgcatagaaagatcgagagaggagctatccatgaagcaccctgataaaaagaacgagatgccgcttcgcgactacagctggatcatctttctgccatttgtggcgttgggatggatggcgtttaaggcagcattggagaatgcggcggcgctgatcgtgtggcttgtctacagtctgtttctcctgtttcccatcctcctgattctccgctatcctgttctgacggaaaccggcatccgccgcacgttcgcgggcatcggctaccgctttgtcccgtggccggaggtccgggacgtcatgcgcgtctataatcaggcatttacgcacggcatgatgacactgatgatcacgacaacgcagggccatgtataccgcccggatgagaagggctacatcccgcctgcgcagcggcgggcattcttccgggaatggatcgccggaaagagctttatgatcgactgctccggcaagaagtccggcccgaaaattgtggcctatgtcgaaaaatactacggcccgctggactatgactttgtggccgagcgagaaaaacaacaccccacaccgaagaagtggtggtagcggaggtgtgctaatatggacaacaacgcttggttccccgatttcgacattcccataccgcttccaccgagcatcaccgcggagatttgcctgtgctttgattcgtatttatccgttgaagggctggatgagatgatcggtctgccggcaaagtgcgctgagccacgcggtgccatgcggatcaatccgcttaccgggaggcagaatccgggatactggcactatgtgcttccgtcatgtgcggattttggcagtgagtccctgacggagcagctgtgcggcctgctgacggaacatgcaaccgggttccgggctgctatggagaaatatgcccctgcggagctgatcctgcgcttcttcgtcgaggcgcaggaggcacggcagttcccaacggtctcgctgtcgaccgaagtgatgcagatcgcggcatcgctgggggccagagtggatgtggacgtggaatgccattgctgcgaagaagacgatatgctcctgcttgatccaatattagaagaaaggagaaacgagacttgaaacggatcctgatcatgctcgctgccgtcggtattctgctgctgatggcatcatgcggccgggacagtgcgcgtgtggaaatatgttccgatggctcatggctgggggactatacgatcaccggggatcaggtggactttttctgcaccgtaaagatcaaaaacaccggctcggaggagcagaagatcaatctgtacggcgatttttccgaggatatggcgggtggcctactgaagacgggacgtctgatagcccatccggccgacgatcccgccgggacggtgctttccgtcctgccgggagagcatgcctatgaagttgtctttaccggagaatatgccggaacgccggtcaagcaggaccgcctgctcccgccgctggagatcgttccccttacagaggcggaaaccaattagccctacccacataaaaacagttcccgcagcagggttttgcccctgctgcgggaattttatgtttggcttactttacgatattctgcgcatagcgggagaggatggcggcgacctgcgcgcgggtggcgctgccctgcgggtcaaggtagatcgtggagccttccttcgtgcccttgacgagctccgcggcgacggcccaggagagggcgtcgtgcgcataggcgctggtcttctctgcgtccggaaaggccgtgagatcggcgcgcgcggccgtgtcgacgcccttgaacgccgcatagcggaagaggatggcggcgatctgctcgcgggtcacattgccctccgggtcgaacttgttgccgccgatgccgttgacaacgccggactctgcagcccatgcgactgcgtcggcatagtaggcgttggcgtccacatcggtgaaagtcgtcgcggtcttcggggccgtctcgccgtcaagacgccacaggaccgtgacgagcatgccgcgggtcatgggctcctccggagcgaacaggtccttctccacgccgttgaagagaccgctctgatttgcaaagcggacatcgtcatagaaccagtcggactccgtgacatcgcggaacgggttgacccacggctcctcggccttcgtgccgtgcacgacggtgatcgtggcgatattggaggcgaggcgcttgccctgcgcggactgatcggcgtactgctgctcgctgatgccgtagcagaagcggaggctgccggtgttcttcgcggcggcggcgacctcttccagcgtgccggagccggaggcccacgtcagcgcgaggatcgcggggacctcggtcttgccgtcttcggtgatgtagtagcgataggtctcattgccggcataggtcagctcggagctgaagccgtcggccgcggcggccttcagggtgtcgagatcggagaacgtgaccccggcgtcggtcagcaggtcgttcacggtgacatattccgtcgcggcaacaagctgggcgttggtacccttccagaactgataaccggcgacgccttccgtggccagcgtggccagctcggacggcttgtaggacttgacttccttcgcttcgccgccttcggcctgctcatagacggtcaggacgacgcgctcgggatgggtgacggtcagcgtgaccacgttggaggcaaggcgcttgccctgcgcagactggtcggcgtactgctgctcggtgatgccgtaggcaaagcggaggctgccggagatataggcggtcttcgcaatgtcctcgggcgtgccggagccggtgttccacgagatcaggatggcagcggggacctcagtcgcgccgtcttcgttgacataatacttgtagacgccgctgtcctcataggtgagcgtcgaggtgaagtccgtggggtcggccgccgtgacggcatcgcccgcgccgaactcgaccccggcgtctgccagcaggctgccgacggtcgcatagaggttcgaggcgatgaccttttcactgccgttcttccagtgctggtagccgacgacctcggtctgagccagcgccttcagctcggagagggtataggtcttcgccacaacggcggcttcgccctcgtagcgctcaaagacggtcagaacgacaggctcggtgggcttttcggtgccgaagcggaattccggcgtcgcaccggcgtagatcaggtcgacgacatagccgtcctcggtgtcaccgcagccgccgctcacgccgtcatccgtcagccagaccttatagatcgggtcgtggtttttgccctgattgtcggtgcagaccaagttgtgggcaggcgtttccgtcgcggggtcagtggtcgctgcaaaggccgggatcagcatgccggtcagcatggagaggcacagcagcagaactgccgcacgccgcgcggcctgtcggaagaatctcatgttatctcgctccttttcctgaaatcgttatcttttcgtgagaataaccgtattcattctagcacgcgaagctcaaaatgtctaatactttgcttgaaaaactaaaaaaatttgtcgatttgaatagagaagaaaaatcgcgcccgggggaacgcaatttgacgagatatcctattgcagcagcggtcggtgaccgccttgttagggtaattcaaccgcgcaagagcactgatgcaccgcagcaccaccctgatgtgtcattgcgaggagcgaagcgacgtgacagtcttgcaggacccggtccgataacagggcagcctcggcgaatccgtaggctgttgcgtgagattgccacgtcggcctacggcctcctcgcaatgacagatctgggagcattgcacggtcggcgatggtgcacggaaatttgcgggtccgcatggcgctcacgcatatcaatgcctctgcgggagcgggcggaagtccggcttgcgcggcatgaggccgggtgcgctgcggtcggggcgcggcggcaccgggaacagctcggggtattcctcgctgtagtatttccggttgttttcgaccagctcgtcgagcggaacagggcggtaaaagttgatgtccacgcccgcgttcagaacgcgcggcagggtcttcagaatttcataggcatggttgcgctgattgtggatgtggccgtggatcatatagccgcccttttcgtggaggatcgggtaatggcacaggaggatgtgcgtgccgccgtcgtcgatctccagaaagtctgtcacgctgtcgcagtagtccagcagacgctcggcatggttcaggccggtgtcgtggttgccgcggatgagatgcaggtggccattcaggcgggagagatactgcgtcggggcctcgccgccgttgtaggagaagtcgccgacgatgtatacgctgtcgtctgcgccgacgcgggcgttccagttggaaatgagggcctcgtccatctccggcacgccggaaaacggccgcgcggtgtcgtgcaggatggggaaatagccgagatgcaggtcagcggtgtagaagatcatggagatcgctcctttcggcggatgctgttacaaccataacaggagcatccggaaaatgcaagcggaaaataaccggacgggattcgtgggccgcaccggccaatgttggggaacggcatgccgctcccggcgcaacgcttgcgattcgtatcgggtatcgataaaatggtgcgcaccgattgcgtctgtagcggcgctcagtgagcgccttgtacagagcgattcaaccgcgtaagagcactgatgcaccgccgcaccgccttgacgtgtcattccgaggaacgaagcgacatgggaatctcgcagtacccggccggataattgggtacttccggcaaaaacgtaactgccttcccgagattgccacgggcgcagcgcgccctcgcaatgacaaacctttggttttcaccgttttaacgccagcctgcaccagtcggcagcactgcgccgggagcggcatgccgctcccctacaatggcgtgtgcggtcagcgggagtgccaccaaacctacagcctgcaaggcgctcaatgagcgccgctacagacgtaattggtgcatgccattctaacggcagctggcagtggacgaacgcccgcctcccatacaatgcgcggccggaagccttgtgccccggaatctgcccgcgttcgcctttgtcgaacccgcaaaatatcgcttgcaatttcccggcgcacattgtatcataatacccaaagaagcgatttccggaaaggcacgatcttctgcatggtcaaaaggaagtctgtgatatggtgtattcacggatgacttgcctgcaagtgatccgcttttttgtccttttggtaattctcggaaaagtatcacggggaggtcccaatgaaaaagatcctgacgctgacgctctgcctcgccctgctgctgggcctgttctccggctgcggcgggaagcggtatgacccgctggcaggtgtggagacgacggtgtttaccgacgatgccgggcgcgatgtgacggtcccggccgacattacgcgcatcgcagccagcggctcgacggcacagatgatcctgatgacgctcgtgccggagctgctcgtcggccttgccagctcgcccagcacggcgcagcggccgtattttccggaggagatgtggacgctgccgacgttcggccagttctacggcagcaaggccaacctcaacatggaggcactgatcgacgccgagccgcagctcatcgtcgaccttggcgatgccaaggagaacgtccgcagcgatatggacggcatccagaagcagaccggcatcccgacggtcttcctcgaagcgacgctcgaagaaatgccgcaggcctaccgcaagctcggccggcttcttcaccgggaggccgaggccgaggtgctggcggtctatctggagcagacgcttgccatggcggcggagaattcggcaaagctgccgcaggacgcgcgcaagaccgtgctgttcggcacgggtgcgacgggccttgcctgcaatgccgagggctcggtacaggcggacgtgctgtcgctcgtcggcgccggaaacgccatccattccgaggagatcagcaaccgcaacggcggcacgaccgtgaacctcgaggaggtctacgcctgcgatccggatgtgatccttctggcggcgggcgggccgtatgacacgctggcggagagcgaatggtccggcctgacggccgtgaaaaacgggacatattatgaaattccaaacctgccgtatgactggatgtcctccccgccgtccatcaaccgcgtgctgggtatctactggctggggaatctgctgtacccagagctttatgactatgacatggtcgaaaaggcgcaggagttctatcgcctgttctggcactacgagctttctgcggaggaggcggagcagctgctcgcgcgctccacgcgcaagccggggagggagggccaatgaagcgaaagatgtccttcctggtcgcgggtcttttgtgcctgtccctttgcctcggggccgaggcggccgggaccgtgacggatacgctgacggtcagggtcggctactacggcatggagcaggaccgctatgtggaggtcgcgacctaccactggagcgagctctatgacgccctgccgctgcactacgaggcctattccttcttccgcagcacggacgacgggacctacaacacggtcatcgactcggcctatggcttctaccttgcggaccttctggactacgccgggatctacagcggcgatattgcggtcgtcgcgttttacacccgcgaccagagcgtcggctttttcacctcgttcacctatgccgacctgttcggcacgcagcgatactattataatgatctctctgcgcacatcagcccggtctatgacgaaaatggtgcgctgaccggctatgacggcgacgaggcatggaacgactgctggacggtccagccgatgctggcgctggaggacagctgggtgagctatgagatcggcacggagcacaccgcgccaaactactcctcgctcggaacgggcaaccgcttccgcctgctgttcggccagtcctatccgctcgagtgccgcacgaaccagagtgcaaaatatacgcacacgctgttcatcaccctgcagggcgcgccgaagatcacggaggagccgccggagctggacggcacgctcggctcgcattcggcgacatttcagatttccgtcgggcagcaggccctgcgcgatgcgctggcgcagtatctggacatcgcctcgtccgacagctccgttctggagatcaccggcatcaccgtcacgccggacgcgcagtattccgaccttgcgaccgtgacggtgcactacaccgtgcacgccgagggagaggtcgagctgtcgttcggcttcggcgggacgtccatcgccgaaaaccggcaggtcacgacaaagcagcccgaggaaaagccgacggaaccgacgaagccggcggagacaacgccgtccacggagccgtccgagggaccgggcggcgggccctccgccccgaccggcggagccgaaccgcgggagacgacgccgtccgcgtccatgccatccgaggcagcaccgtccgaaccggtcgagccgacggcggccgtggacccggagaccatccgcatgtacgccctgcccgatgcgctggctttgcagctgcagggcggcgggcaggcggaagcgccgggcgcagccgatcccattcctgtcaccgttgttacggtgcagccggaggatgaccggaagctcctgctgctgacgggcgcgggagcacttgcacttgccgtgctcggcgcgctgtgcgcgctgcgctactataccagaggggggagatcatcatgacttctgtattccacaaaattctgcgcgccgtcgccggtgcgatggaaattccggacgttgtgtttcttgtgctggcgctcggctttgccgtgttttccgttggctggctgatctgcgagtattttacggagcaccgccacatgcgcgaggacctgccgcgcctgctcgacgcgctgcgggagcggggagccgatacggctttgctcatccgaaaaagccaactcaaccggcggcaaaaggctgcgctgctcgagctgacggagcatcccgatttcagcagcgggctgcgcgaaagtctggctgcgaacctgctcgagcgggagcagagccattatgaccatattttgaaatgcacggagcttgtcagcaagctggctccgatgctcggcctgcttggcacactcatcccgctcggccccggcatcatcgcgctggggcagggcgacacgcagacgctgtccacgtccctgctgacggcgttcgacacgacgatcgcgggcctgtgcgccgcggccgtgtgccttgttgtgaccacgctgcgcaagcgctggtacggcggctacatggcggaccttgagacgctgatggactgcgtgtgcgaagaggaagcggcatgaagagaagaagacgccgcggggaacgcttctcggacgagagcgtcgacccgatgaactatgtttccaacctgtccgatgcgatgctcgtcctcgcagtcggcatgatgctggccctcatcgtccactggaacgtggacatctccaccggcggcagaagctccgagaacgtcggcgagaccgtcgcggccgaggggcagggcggccagagcgccattgaccgcgacgacgccctgtcgttcacgccggaggagctggagcaaatggactctaccgagggcgagaccgacgagggcatggaaaagctcggcgaggtctactacgacgccgggacgggaaaatactacattatagaaaacggaaagtaagcccatgaaactgcagaaccacgcctatccccgccgctttgccgtgctgggggccgtctttgcggcggcactgttcggctccgtgctgctcgggcgcttttccgtcacgccgaaggagctgttccgcctgctgctctcccgcttgaccgagacggagccgggctggcgggacggcgcggagaacgttgtgttccagatccgcctcccgcgcgttgcggcggcggccctcatcggcgcggcgctggcagtcgcgggcgtgtcctatcagggcatgttccggaaccccatggtctcgccggacattctcggcgcgtcgaccggcgcgggcttcggcgcggcgctggctatcctgctcggcgctggctatttcggcatttcgatgtcggccttcgtgttcggccttctggcagttgcggcggcctatcttgtcagctgcatgagccgcacgaaccagaccattgccctcatcttggccggcatgatggtctcgtcgctcttttcggcgggcacgtcctatctcaagctcgtcgccgacacgcagcagcagctcccggccattacctactggctgatgggcagcctttcctccatcaagccgcgggatgtgctgtttcttgtgatcccggtcacgctcgggctcgtgccgctgctgatcctgagctggcgcatgaacctgctgacgctcggcgaggaggaggcgcgctctatgggcgtgaatacccgcctgctgcgattcaccgtcatcctctgcgcaacgctgctgacggcggcgtccgtcgcggtctccggcatgatcggctgggtcggccttgtcatcccgcatttctgccggatgctgttcggctatgactaccggcggctgatcccggctgcggccctgttcggtgcctcgttcctgatcgtcgtggacgacattgcgcggctcgccacggccggagaaattccgctcggcattctgacggccttcgtcggtgcgccgatcttcctctatctgatcctgacgggaggtgcgcggcgtggaaattgaggtccagaacctgacgttttcctacggaaagcagcccgctttgcgggaagtgagcttttccgtgcagaagggcacgctcacggcggtgctcggtgcaaacggcgctgggaaaagcacgctgtttcgctgcctgctgggctttctgacaccgcaggcgggggagatccgactctccggcagaccgctttccgcctattcccggcgggagactgcggagaagatcgcctatatcccgcagtcgtcggagccgatcttcaactataccgtgctcgacactgtgctcatgggcacgaccggcacgatgaatgtcctgcagcgccccggccggcggcagcaggaggcagccatgcaggccctgcagcggcttggcatcgaggcgcttgcgcagcggggcatcggcaccatttccggcggtgagcggcagctggcgctcattgcccgtgcactcgtacagaatgcggaaattctcatcatggacgagccgacggccaatctggattttggcaatcagcagcgcgtgctggcgcagatccgggcgctggctgcgcgcggctacaccgtcctgctctccacgcacaatccggagcatgccctgcactatgcccaccggatccttgcgctgcagggcggtcatattgcggcggacggtccgacggagacggccctgacgccgcagcttctgcagacgctttacggaattcaagccattcttgcggaggtgccgacggatcgcggcacggtccgcagcctgattgtaacggaggacatggaatgaaacgacttctctgctggatcctttccctttgtctgctgctgtgcctcgtgcccggcgcagctgccgcggagcgggtgaccggaacgctggagcgccgcgcgggctatgaccttgcgtcggtgcgctgtgagttggccgacgggagctacttctttgcttcgatcgaggagacggcggccggctatgcctatgcctttgactgtcccgccgggacctgcaccgtaaagccggaatatttttctaccacggtctgggacggcgcggtcgatatctcatggtatgacgcatcgcagacggcgttttatctcgacacgcctgcaaagctcgcgggccttgcggccctcgtcaacggacaggtcgacgcgggcacgccggactaccgcatcaagggcgaccgcagcgagcttgtctccacgcggatcgacgactacctgctcgtcggcgcgggcggcgacaatcagtatggcacggtccatgtcggcgatgccgcacatgatttctcggacaagaccgtctgcctgacggccgacctcgacatgggcggctcgagtaactggacgccgatcggcggcctgtatccgatggaccgtgacaacacggagcgtgtgatcgcggcatatttcaacggcacgctcgacgggcagggccaccgcatcacgaacctgttctgcgaccgctatgccgaaaagggctatgcctattcgcagggcgtcggcctcatcggccacatgggcgacctctatgacggcgaggccgcgccggaaacggccccggccgtgcggaacctctccgtcagcggcagcatctacggccgccgcatggtcggcggcatcgtcggccgcaccggcagcatccccacgggcatctatctggagaactgcgcgaatcacgcctccgtcaaaaatacggactccaagggcgtcggcggcatcgtcggcgcgggctggagcaagggcgcaatcgtcaactgctacaacaccggctcggtcacgacggtctatgcctgtccggcgggcggcatctgcggcagcaacggcgggctggacatttataactgttataacgccggcgtgatcgattcgaacggcagccagcgcggccgcgccatcggcggccacaacaacggcagctacaccgtctcggactgctattatctcgagggctgcgacgacgatccggcctcgaacggctggtataccggaacggcgctctcgtgcgccgtctccgtcacggccatgccgaaggcggatatgcgcgctcagaagctcgttgacgcgctgaactgcaacggcgcagcctatgccgccgtgcaggggagctatcccgttctggcgtgggaggccgagcgcagcccggcggcccacaccgttcgcatcacgcagccggagggcggtacgatcgccgccgatgcaggcgagactgtggccttcggcacggtgctccatctttccaatacgccggatatcggctgggccttccgaacctatacgctgaacggcgagaccctgaccggtccctatgcgaccgtgacggcggacgcggccgtcagcggcgtgttctcccgcatgacggcgggcgcgctgtacatcgagaacgccccggccttctccatcacggtaaagaaggacggcacggtgatggaaaacgggaccgcgcggcgcgtgacggactatcccgtggcggacggcgacccgctctatgagggcgacgtgctgacggctacggccacgctggcggaaggcgcagagccggaggatctgagctatgtctacaacgggaaattccgttactatttcaccttccaggatgcggcccagacggagaaaagcacggacaccgggaaattcaccgtcacgagccggatcacgagcgcctcactgcgcctgcgcgccacggcctacacgacgcacaaggtctggacgcagctggccgagacggactggtatacgccgtctgccgaccgcttcaccctgacgtccgcgcggcagctggcgggcctggcccatctggtcaagcagggcaattcctttgcgggcaagaccgtcctgctcggcgcggatatctcgctggcaaacgatgacaagaccttcaaccgcggtgtccgctggttcgacggcatcggcagcacgcaggccccgtttgcgggtacatttgatggcaacggctaccgcatcacggagatgacggcggagacgaccggcagcggcgctgccctgttccttgcggcggacggtgcggtgctcaaaaacatccgcgtctccggcacggcgaaggccaacggcagcgcggccgggatcgcggcgcaggcgaagaacacgcagttccttggctgcgtgaatgaagcggccgtgacttcgaccggcgaaaaggcgggcggcatcgccgcactcctcgacggggcaaccagcctgacgggctgcaccaacctcggggccgtcacgggcacggacggcgtcggcggcctcgccggtgtggtcaacgacaaggaaagcacactgaccggctgcgtgaaccgcggcgccgtgaccggaaacggtgcggccacgggcatcggcggcgtggccgggcgcatcggcggcgtggccgggcgcatcggcggaagcctgctccgctgcgcgaattacggagccgtcaccggcagcggatggtatctgggcggcgtggccggtgcgtgcatgacggagggcgcgtcgtcactcaccgactgctacagcgtcggcgaggtgcgcaatgcccatacctatgcctcctccggcacgggcggcctgatcggctacggaaacgattaccgcgcagaaaattgcttcagctacggcgcggtcagcgcggcggccggaacggcgggcggcctgatcggccgggacagcagccgttcgacaaacgtgcgcgaaaatctctattaccgcgcggattcctgcggtaccgccgtcggcggcaaggcggaggcatccggcacggcggcgcgcacggcggcagaattcgctgcgctgtccttcctgcggcagctggacaaaaacggctgcttcatgctggaaaacggagcctatccggagctttccgcctctgcgcgctgcgcccatctggagacggagctgcgcgacgcccgcgcggccacctgcacggaggcgggttacaccggcaacacggtctgtaaggcctgcggcacggagatcacgcacggcgaggccgtcccggctgcgggacatcagtaccgcaacggcgcgtgcacagtgtgcggcgcgaaggacccgcgctggtccggaacggaacggccgtggaacgacccgttccgcgacgtccgcgcgagcgactggttctatttcggtgtgaaattcgcctatcagcacggcctgttccagggcacggcggccgatatgttcagcccggatgcgccgatgacgcgggccatgctcgttacggtgctctggcgcatggacggtaagcccgacacggcgggcggcagtagttttacggatgtgccgcgcggccagtggtatacggaggccgtcgcgtgggcggccgaaaacggcgtcgtcaacggcgtcggcggcgggaaattcgagccggacggcaatgtcacgcgtgagcagatcgccacgatcctgtatcgctatgcaggcctgcgcggcgttccgaccggcgggcgcgcggacctcggcagcttcccggacggcggagccgtcagcagttgggcctatgacgccctgtcgtgggccaacgcggcgggactgatcgccggaacgcgcgagggcggggtggactaccttgcgccgcagcagaacgccacgcgcgcgcaggtcgccgtcatcctgatgcgctacctcggcgcggcataagcagaaaaacgccgggcggtggaccgaaaaagtccgccgcccggctgatttgcagagatagacaaaaaaagtcccgctgactgctgtcagcgggatttgtatggtggacgatataggactcgaacctatgaccttccgcacgtcaagcggatgctctagccagctgagctaatcgtccgtcagcaaggcatagtataccagaaggctgcccttttgtcaagcacttttttctttttcccgaaaaaaagacgcggaccgcaaggatacgacatgggccttgcgtatcggcgggaattatgctaaaatatatagaatcaagtgccctgggcacaactctgttttctgagaaagaggcgtgatcttatgacagaacagactacggaaagaactgcgccgcgcaagcgtatgctctccggcatcaagccgtcgggcgacctgacgctcggctcctacctcggcgcgatccggaactggcgcgaccgtgcagaggaattcgattgctattactttatggcggaccttcacgccattaccgtccggcagaacccggcagacctgcgtcgccgcacgatggagcagctggcgcagtatatcgcctgcggtctggacccggagaagaacgtgctgttcatccagagccatgtgcatcagcacgcagagctcggctgggtgctcaactgctattccatgttcggcgagctgagccgcatgacgcagttcaaggataaaagcgcgaaaaatgccgacaatatcaacggcggcctgtttacctatcccgcgctgatggcggcggatatcctgctgtatcaggcggatcttgttccggtgggcgaggaccagaagcagcacgtcgagctgacgcgcaacatcgccaagcggttcaacggcatctacggcgacgtgttcaagctgccggagccgtatatccccaaggtcggcgcgcgcatcatgagtctggccaaccccgaggccaaaatgtcgaagtccgagaacgacgatcccggccgcgtctgcctgatggataagccggaggatatcatgcgcctgttcaagcgcgccatcacggactgcgagtccgaggtccgctatgaccccgagcacaagaagggcgtttcgaacctgatgaccatctactccgccgcgaccggacggacgttcgccgagatcgaggcggaatttgcagggcgcggctacggcgacttcaagaagacggtcggcgaggccgtcgtggagctgctgcggcccatccgcgaggagagccagcgcctgctggccgacaaggcctatctgcagagcgtctgcgagagcggcgcgcagaaggcggcctatgttgcggaaaaaacgctgcgcaaggtttataagaaggtcggcttcgtggcgcgctgaccggggagcagaacatgattatggatccgaatttcattgtcaaggtcctgctgtcgctcattgtggcggcggcgctggcctttgcggtcacgccgctcgtcaagcggctggcgcagcgcgtcggcgcgatggatgtgccgaaggacgagcgccgcatgcacaagatccccatcccgcgcatgggcggcctcgccatcttcttcgcgttccttatcgcggtgctgtgctttgccgggatcgaccgtgagctgcgcggcatcttgctcggtgcgacgatcatcgtcgtgctcggcattctggacgatatcctgacgctcaatgccctgccgaaatttgccgtgcagatcgttgcggccgttatcgccgttctgcacggctgccggatcgagcattttatgggcttccgtctggcaacgtggctttcctatcccgtcagcgtgatctggatcgtggccatcacgaacgccgtgaacttcatcgacggtctcgacggccttgctgccggcgtgtccgcgatctcggccggctccatgctcgtcgtggcgctgctcgtgccggattacaactccgccatcctgctagcggccatcgtcggcgcgtgcgcgggcttcatcccgtataatttcaacccggcaaagatcttcatgggcgacaccggctcgacattcctcggctttatgctctcgtccatctccatctacggcctgttcaagatgtatgcgatcatctcgtttgccgtgccgttccttgtgctcggtctgccgatcttcgatatctgcttcgcggtcatccgccgcgtctccaagggtcagagcccgatgcatgccgaccgcggccatgtgcaccatcgcctgatcgacatgggcttcagccagaagcaggccgtcgccatcgcctatatgctctcggccattctcggcatggcggccgtcgtgctgacgaatgacggcgagatgaaggccctgatcttcatcggcgccgtgatcgtggtgggcgcgatcggtgtgctggtcattttccaccgtcacccggacaagcaggacgagaccacggaaaagccggaggagaaatcgcatgaagaaaattaaggtgatgtccgtcttcggcacgcggccggaggcgatcaaaatggccccgctggtgcagacgctggcgcagcggccggaatttgagagtatctgctgccttacgggccagcaccgcgagatgctggactccgttatgcagatcttccgcctgacggcgcagtatgacctgaacatcatgcagaagcagcagacgctgtcgtccatcacaacgcgcgccctgctcggcatggagcaggccctgcaggaggcgcagccggaccttgtcctggtgcacggcgatacgtccacgacgtttgccggggcgctggcggccttctatcaaaaggtcccggtcggccatgtcgaggctggcctgcggacctatgacaagtattcccccttccccgaggagatgaaccgcacgctcgtcagcgatattgcggcgctgcacttcgcgccgacgccggccaatgtggataatctgcgccgtgagtccgtgcagggtgagatcttccgcacgggcaacaccgtcattgacgccatgcgcacgacggtgcgcccggattaccgttttgccacggcggagctcaacgagctggatttcaaaaaacgccgcgtcatcgtcctgacgtgccaccgccgcgagaactatggccagcccatgcatgacatcctgcgggccgtgcgagacgttgcggagcggtatgaggacgtcgagatcgtctatcccgtccatctcagcccggccgtgcgcgcctgcgcacaggaggagctgggcggtgtgccgcatgtgcacctcatcgacccggtcgacgtggaggagatgcataatctcatggcgcgctgctgcttcgttatgacggactccggcggtctgcaggaggaagcgcccgcgctcggcaagccggtgctggtgctccgccgcgagacggagcgccccgaggccgtcgctgccggaacggtccgcctggcgggcgttgcgcacgacgacgtgctccgcgaggcctgcacgctgctcgacgatcctgctgcctaccatcgcatggcgcatgccgtgaacccctatggggacggccacgcctgcgagcgcattgccgacgcgatcgcctggcacttcggcctgcgcgccgagcgcccggcagatttcgaccctgcgggctgatacaattacaatgtataccgggcagcgctgctgcctgaagaacgaaaaaacgcgccgcatcccggctttgggatgcggcgcaggttggttttgggagactcagcgctcctcgcggaagtaggggacgcccagcgcggcgggcggctgcttttcgcgattgttgcgcagactgctgaagatgagcacaaccaccgtgacgatgtacggcagaatcttgtagatctgcgaagggatgaacggaatgctcaggcgcaggtacaggttctgcaggcagccgaacaggatgctgccccagatggctgcggacggcttccacaggcagaagatgacgagcgcgacagccagccagccgacgccggacaggccctcatggttccacacacagcctgcgatgccggtgatataggcgacgccgccgatggcggagatgccgccgcccagcacggtggccaggtatttgtagcgggtgacgttgataccggcagcgtccgccgttgcgggggattcacccacggcgcgcaggtacaggcccttgcgggtcttgttcaggaaccacgcgaggaagacggcgagcgcaagggcaaaatacgtcaggatgttgtgctggaacagcaacgggccgagcacgggaatgttgcgcaggaaggcggggaagggggagtttacaaagatcgccttgagattgttgctcagggagacgtaggagccctcctgcacgcgcatgtattcgccgaggaactgacctgcgccggtgccgaagatcgtcagggcaaggccggtgacgttctggttggcacgcagggtgatggtgatgaagctgaacagcagcgaggccagcgcgcccgccaggaaggcgaagaacacggccagcagcagcgccacgaacggcgaggcattcgcgcctgcgagcttttcatagtagaacgcgccgccgaggccggccgcgccgcccatgaacaggatgccctcaacgccgaggttcatattgccggatttttcggtcaggatctcaccgagcgtgccgtagagcagcggcgtgccgttgacgaccgagaaaacgaacagcgtggaaagaaatgtcagaacagcgcccatacctcagtcctccttttcccgacggacggaaatcttgtagttgatgaagaactcgcagcccagcatgcacagcagaatgaagccggtcaggatgtccgcgatggtcgagggcacctgcatgcgggtgttgagcgtctgggagcccttcgtcagcacggcgagcatcgaggcgatgatgatcatcgcgaacggattgagctgagccagccatgccacggagatggcggtgaagccgacgccgcctgccacgccgtcataaagcgtgtggtttgcaccggagacaatgatgaagccgacaaggccggagatggagccggacaggaacatcgtgcgcatcatgatgcggccgacgttcataccggcatagcgcgcggtgttgctggagtcaccaatgacggcgatctcgtagccgtgctttgtgtagcgcatgtagatgaacatcaggaccgtcagcacgagtacaatgatccagccgcagtgcacgccgagcacggacggcagcttggcattgcccgcaaactgcgcgatcatctggctgccggagggaggagcctcccacgggccgccctgcagccacttgacgacaccgatgatgatgtagttcatcatcagggtgaacagcgtttcgttcgtgttccacttcgccttgaagaaggcggggatgagggcccacaggccgccgcagaggatcgcggccacggccatgatgagcagcagcggaagctgcggtatcgttttgccgaacttcagtgcgaagaacgttgcgccgatggcgcctgcggtgatctggccctctgcgccgatgttccagaagtgcatcttgaagcacggggcgatggccagcgcgcagccgagcagcggaatggcgatcttgatggtctggcggacgaacgtcttcgacccgagcgagccgtcgatgatcgtgccataggccttcagcggggaatagccgagggcgagcagcagcaggccgccgacgatcagggcgaacacgatggacgcgacgcggatggaccacgccgcagcgggatgtatcccgtcgatccggcgggagagctggagcttgcgtgcggatttttcgttcatgttgattccctcccgtcagaccttggtcatgagcagaccgatctcttcctttgtcgcggtgcgggcatccacgatgccgctgaccttgccgccgcacaggaccagaatgcggtcgcacagctccagcagcacgtcgaggtcctcaccgacgaacacgacggctgagcccttcatcttctgctgcgtcagaagattataaatggtgtaggacgtattgatatccagaccgcgcacggcgtaggccgtcagcaggacggagggagacatcgcgatctcgcggccgacgagcaccttctgcacgttgccgccggagagacggcgcaccggcgtcgagatgctgggcgtgacgacctccagctcctccatgacctccatggcgagcttgttcgggtcgcggcggttgacaaaggcgcccttgcccttgcgccagctgcgcagcatcatgttgctgcccatgcccatgctgccgaccagacccatgccgaggcgatcctccggcacgaaggccatggcgacgcctgccttgcggatctgattcggggtcttgccgatgagctgctgggcgggcttgccctccggcaggaacgtgaccgtgccgtgctccacggggtacaggcccgtgatgcactcgagcagctcacgctggccgctgcctgcaatgcctgcgatgccgaggatctcgccgctcatggcggtgaacgtgacgtcgtcgaggcgcttgacaccgagattgtcgacgcaggtcaggccctcgatcttcagccgcggcttcgggtcgacggggtccgggcggtcgatgttcaggctgacggcgcggccgaccatcatgtcggtcagggactgggccgtggcctcgctcgtcttgacggtgccgatgtacttgcccttgcgcagcacggcgacctcgtccgaaacggacagcacctcgtgcagcttgtgggtgatgaggacgatggccttgccgtcggcgcgcatgttgcgcacgacctggaacaggcggtttgtctcctgcggggtcagaacggcggtcggttcgtcaaggatcaggatctcagccccgcggaacagcaccttgacgatctcgacggtctgcttctgcgagacggaaagatcgtagatctttgccatcggatcgaggtcgaaaccgtattttttgcagatgtcgtcaatcttctgcgctgcggcgcgaatgttgagcttgcccttttccttcagaccgagaatgatattctccgtgaccgtcaggacatcgaccagcttgaaatgctgatggatcatgccgatgccgttggcaaaggcatccttgggggagcggatctggatctccacgccgtttttcagaatgtgcccctgctccggcatatagataccggacagcacgttcatcagcgtggtcttgccgctcccgttttctccgaggaggcacaggaccttgccgccctcgatggtcaggttcacgctgtcgttggcaatgaccttgccaaagcgctttgtgacgttgaccagttcaattttgcagttcgactccaaagcggtcatcctttcttgcatggatttgctggggaatttgcataactttcaaagttagtttagcacaggctacgtcaaaagtaaacaaaatttttgctttcctaacaatttttttgaaatatggtctccgaaacgacagaagccgggtctccccggcttctgcgcaatgcgatatgctgtttcggatcagttttcggaggtgatgccctcgatgatccagtagaagtacggagcggaggtctgaccgccctcgatatcggattccttgaaccagtcgtcggcgggcatttccttcgtgtcgggagcgtcggcgccgtaagcggtgccctcgcccttccacgggccctggaagacatggatgctgccgtcagccagaccggcctcgacttccgcgatcttctcggcggtgccttcggcggcgatggcttcattcagctcagtgacgacaacggcgccgtccttcatgccggcggtccagtccttcgcgatggtctcaccgttcacgaggcagtcaaacacatactcgaagtagacggaccagtcgatgcggctggagatgagggaagcctcgggagcgatgccggtcatgtcgttgttgtagccgacgtggaacacgccgttctgctgcgcgaccgtggccggggtggtgttatcggagtgctgggagatgagcacgcagccttcgtcgcacagagcctgcgcggcgttgccctcagccgtagcgtcggaccaggaggagacgtacttgaccgtcatcgtgacctcgggaacgatggagcgggcgcccagatagaaagcggtgaagccggagatgacctcggcgaacgggtacgcgccgacatagccgatcttggcctgatccgcggtgatcttgccggagtcgatgagctccttgatcttcataccggcgacgacaccggcgacataacggccttcatagatgttggcgaaggcgttgtggcagttgtcgagaccggcgaactgggagttcaggttggtgcagccgatgaactgcacattggggtaatcgggagcagccttgagcatgtacggctcgtggccataggagttgcagatgacgacatcgcagccggcctcggccagctcgacgcaggcgtcggtgcagccgtcgtcttcgccgatgttcgtgatgatgttccagtcaagggtaacgcccttggcggccatcttctccgtgacggagtccttcgcgcgatagaagttgtaggtgtagccctgatcgttctcgtcgccgatgcagatcatgccgaccttcagggtcttgccttcggtgttgttgccgttttcttcggacggcttcgtctcgtcgttgccgccttccgtcgtggcgttgttcgcggtgtccttcgtttcctcattgttcccgctgtccgtaccgcaggcggcgaacatgccgatcgcgagcacgagaacgagaagcagcgcaagtaccttcttcaatcctttttcctccttgatattgttgggtcaccccaatgtgcattcgccgcggttcgtccatgacgaatgtttgaatctatcatacaagatttttttgcaggacacaataggtattttgcaaaatcttgaaaaaatttcctgcgaaacattcggaggaaattccacgaaacaggtcgaaaacaggggagaaaaagaaaatcggaaaaatctgaaaaaagtgcttgacaaaaggaggtatgcatggtattatatcggagctgtctgcgagagacacaaacgcgaaagcagttgagggtcaagcggtcggcggtgtaccttgtaaattaaacaacgagaaacatgaacaaacaccttggacaatttgattgaaaaaacaagttgttctttaagatgtcagtataaaaactgagattgtgaagaatagccaacgagaaattcttgagtgaagctaagagcaaaacttatagaatgcatgattttattcaggacct

SEQ ID NO: 11093 - DNA, 11069 bp, Unknown
  gut microbiota DNA sequence
tgttccgtttcttccgtttcgcggcggccgagcttatgcttcgtgccgtccggctccacgatataggtgttctccagctgcgccgtcaggttgcggcggacggctgcgatatactgctggcgcagcaggtcgcgctccgccgtttcctccggcgtcaggccggtcgtctttgccttctgggcaagctcattgatacgcttgacaagctcttccatacgatttgctcccttctcagcccacggcgaacgacagcagcgcgtccacgcttccgctcgtcagcgaaacagcgctgacctcgtccggcgcgcaggcatacagataatcgccctcaaagaagaaggccgttccggaatgcacgctgatctccgggcgcgagacctcggtgatcgcgtcgcccagccggaacaggtgggacgtgtggtcatagcacacgagcgcccacgcggcatcctgcgacacggcggcgtagaccgcgccgcccgcataggtccccagctccttcacaaggcccgtggccgagacgctcccgccgcccatcgccatggtggagatggcaaggctcataccgttcgcgccgttcgcgccgctcagatccatcagcatgccttcggccgggagcagcacattgaacagttcgctcaggccggagacctccgccaaggcgggcttcgtcgggttggagaggtcgatggccgcaagcggtgtgtccgcatcgaacattgcgagcaggcagtaattgccgctgaagcgcgccgcgctgagcgaggcatccggcagcagatcgctgccgtctgcgatctgctgcagggagaggtccagcacgttcagcgctgtaccgccattctggctctgatcaaggcggttcgtccagccgtaggtcttgtcctcaaagagctgatactgcgacgaggacagagatctcacgacatacagtgcgtttgcctgtgcattgagttcccaggccgcgacctcgcccgccagcggcttcgaggccagcatcgtcagatcggcgtccgccgtcaggcgcaggagctccgttgcggcattgatggcgtggttcgtgacggaatagtggtctttcttataggcgtcgccgtgcgactccatgcggatgctgcgggcaagatacacgccctgctccgaaacgcagacatggtcgatcgttcccgtgaaggcgcgcacgccgctgcgctgcacatcggccagcgaaatggcagacacgatgctgaacgtcggcgcatcgagcacggaggagagatagaactgcgcagcgggcacagcctcgctttcggcattgtcgccgatctgcggcatggaggctgcgctcccgcttgcctcatcgaggtccgccgtgcccgcggaaacaaggaacagcaggccgtttgccgtgccgatgccctcgtaaaggccgtcctgcgagaacgtgcgcagcagggtcggcgtcgacggctcggagatgtcatacagccgcagatggcacacgtcgctgccgctcaggtcactgtccatcgacgaagccgtcgtcacaacggcaagccggtcgccctccacgagcagggcgttggcgaattcataggaatcctccgaggacgttcccgatgaaatatccagcgtattgagctgcgtcgtgctggccccggcggcgcgcaggatgcgcagctcgctgttgctcagcacatagatatagccgtcgtgcagggccgtcgtggcgcttgcatcgcccgcgaactgcactgtggccatttcgccgtccgcggaatccggcgcagcctccgagatgccggtgtaattgccgagtgccgtgcggacctccatttcattgtgggctgcgaccggagcggtgatgctgtcaagcgaaagctccggcatatcctcgctgccgcagcctgccagaaccccaatgggcagaacggcggcaagcagcagcgcgatccaacgtttcttcatgatattacctccaattggcctacggcggtctgccgccgcaatgacaacatcatacctttttcgcgcccgtctgtcaagaatacacttgtcatgcgggggtatatggcatataatgaacatagaaaacagggaggaacgagcatgaaagtactggtgatcggcggcggtgcatccggcctgacggcggcgctgaccgcctcggaggacccgcacagcgacgtccatctcgccgaacggcaggcgcgcgtcgcgcgcaagctgctggcgaccggaaatggccgctgcaatctcacgaatcgggacatggatctgtcgcactaccacggcacggcgccgcagttctgtctgcccgcgctggaggccttcggcgtggagcagacgctggcgtggttccgctccatgggccttctgaccgtaacggagccgggcggccgcgtctatcccgcaagcgacagcgccaacagcgtggccgatgttctgcggctgacgctggccgggcggcagaacgtcacgctgcacgcgggctgcgagatcacggagctgcgccgcacgaagggcggcttttccgtccgcctcggggacgaaagctgcctgtttgaccgcgttatcgtctgcgcaggcggcgcggcgggcggcaagctgggcggaacggatctcggctaccgcctgctgacggccctcggccacagccggacgaagctgcttccctcccttgtgcagctgcgcacggagccgacgtgggtgcgctcgctcaagggcgtgcgctgtgaggtgcgcgccgtgctcaagacggacggcggccgaacggagcgcgcaggcgagctgcagttcacggactacggcgtgagcggccccgtgatcttcgagctgtcccgcgcggccgcgcagggcgggctcctgctgctcgacctgctgccggacgtccccgccggagagctgacgcagctcctgcaggcgcggcaggcggccctgccgcagcttgcgctggaggacctgctgaccggtatgctccacaatcgcctcgggcggacggtgctgcgccgctgcggcctctcgctcgaagcgccgtgcggctcgctccaggcggacaggctgccggaaatttgccggaccgtcaaggcctttgctctgcccgtgctcggcccgatgggctttgacgccgcgcaggtgacggcgggcggcatccgcacggacgaattttccgcgcagacgctggagagccgcctctgccccggcctgtatgccgcgggcgaggtgctggacatcgacggcgactgcggcggctataatctgcagtgggcctggtcctccggccgtctggccgggcagctgcttaccgggagggaacgccatgcttcgcattcgtgacctgatcctgccggagacgcacgatgtctccgagctgtattatcatgcggcgcaggccctgcatgtccgcgcatcggacatcgctgcgctgcacattttccgccgctcccttgacgcccgcaaaaagccggacctccgctgggtctacaccgtggacgtcacgctccgcagcggcgagggagccgtgctgcgccgctgccgcagcgcaaagatcacgcgggaggcgccctatgtctaccatattccccgctgcaccgcagcggagcggcccgtggtcgtcggcttcggcccggcaggcatgttcgccgccctcgtgctggcgaaggcggggctgcggcccctcgtgctcgagcgcggcgaccccgcaccgctgcgccgggaaaaggtcgagcgcttctggagcggcggaccgctggaccccgagagcaacgtccagttcggcgagggcggcgcaggcgcgttttccgacggcaagctcaacaccggcacgaagaacgagcgcggccgctgggtgcttcagcagttcgtgcgcttcggtgcgcaggaggaaattctctacgacgccaaaccgcacgtagggacagatgtgctgttccacgtcattcagaacctgcgggaagaggtgctgcgcctcggcggcgaagtccgcttcggtgcgcgcctgacgggacttgaggcgcaggatggccgcataacgggtgtccaatggattgaggacggagcggagcggtcgtttgtatgccgggacgtcattctcgccatcggccacagcgcccgcgataccttccgctggctccacgcggccgcgatccccatgcagccgaagccgtttgccatgggcgtgcgcatcgagcatccgcaggccgtcatcgaccgcgcgcagtacggcaagccgcgcggcgagctgcccccggccgactataagctcgccgtgcaccttccggacggcggcgcggcctatacattctgcatgtgtccgggcggccatgtggtcgccgcggcctcgcagcccggcggcgtcgtcacgaacggcatgagctatgccgcgcgcggcggcgaaaacgccaactctgccctgctggcctccgtgacaccggaggacttcccggagcccggcccgctcggcggcatgctctggcaggagcagatcgagcaggcctgcttccgcctcggcggcgcggactatcacgcgcctgcgcagctgctcggcgattttctggcgcaccgcccctccgctgctgagggcggtatccgcccgacttaccgtcccggcgttcgcctgtgcgacctgcacgacgcgctgccgaaaaagctgaccgacacgctggagcaagccatgccccgccttgccggtctgctgcccggctttgacgcgccggacgccctgctgaccgcgccggagacgcgcagctcctcccccgtgcgcatcgtgcgcggcgaggactgccagagcgagctccggggtctgtatccctgcggcgagggtgcgggctacgccggcggcatcctctctgctgccgtagacggcatgcgctgcgccgaggccgtgctgtcccgaacggaggacaagacatgacgcaggaattcccgaaccagacaagctcgccgctctggacgtcggagtccgtccggctggaaaagctggcatggcggcaggagcttggcaggcgggccatcgcccgcagccgcatgaaccgcgtatgcctgatgcttctcatctggctggccgtgttcagccagctcagctcgaccggggtcgtgctcctgtctttcctgcacctggacattcctgcatggctcaccggggccggccgccttgcggccgcctgcggtaccgtcggcctggtgctcatctggaagcgcaggccgttctggcagaacgtgatgttcgcccgctcgggagtcccgcgcgcgggcgaggtcctgctctgggtcctctgcctgttggcgctgcagggcgcggccggtctgctgcagagcctgctctccccggccatggaatttttccgcaccaaaagcaaggtcgtgtccggcacggcggagacgaccgtatcgctcgcgctctataccgcagtggccgcccccatcacggaggagctgctgttccgcggggccgtgctgcgcagcctgcagccctatggcaagcgctttgccattttctgctcggcgctgctgttcggccttgtgcaccagaatctgacgcagacgccgtttgccttcggcttcggcctgctggcgggctatgtcgccgtggaatactccatactctggtccatgagcctgcatatcctgaacaacgccgttctggccctcgggctggacgccctgctgcggccgctgagcggcacatggtactggctggcgatccgcggcgcgctgttccttctgccgctggccgtctgccttgtgctggcgctcgtcttccggaaaaagctcgccgcgcggcgggagcgcgaccccatcgacccaaaatggcggcggctgtttttccgcacgcccggctggatcatttttctggttctgagctgcgtgtgcatcatcctaaatttcttcgtgctgggggcctgacgggatttcccgcttgcgtctttcccgtttctgctgtaaaatatgtgagagcatcatcgcacagctgcatcttcggccttcgccggattgtgcggtgctgccctagataggaacccatcgcccgcagcctgcatagtctggcatgaggtgatggtatggcgctgacgatcctgacggcggggcttgcggcctgcgggctgctgctcctgctctggtccgtggcggaggccatgctgcttccgctgccgcgcgaggatgccgtgctcgttgcgccgctgcagggcggcgcggccgaggtggagcggcagatccgtggctgccgctggatgcgcgagcatcgcggcctgcgcgcacaaattatctggatcgaccgcggcctgaccccggaggggcaggaggccgccgcgcgcctgctgcgggatgcggcgggcgagcagctttgcgccgccgggcaggcggcagaatatctggagcggctgggggcctttgaggcctgagcccggccgccccggcagaatgggagaacaggcacttggagcaggagctggtcagcgggacgatcgccgctgtggtctttgaaaatccggaaaacggctatgccgtcgtcaagctggacagcgacgacggcggcctgatcacggtcgtcgggacgatccccgccccggccgccggagagcggctcatcgtcaccggaaaatggacggcgcacgccacctacggccgccagctcgaggcagagtttctggagcggctgcttccggactccacggcagaaatacgtgcctatctctcctcccgcgccgtgcggggcgttgggccgaaaacggccgaaaagatcgtcgccgccttcggcacggacagtctgaaaattctcgagaccgcgccggagcggctgacagagatcgacggcatctcgcgcaaaaaggcgctggagatcggcgcctcgttccggcagcaggtcgccgtgcggcggctcatcgaattcctcgcgggctatcgcatcccggcacaggtcgccgtgcggctgtaccgcgtctacggcgcacagtcgctcgagcgcgtgcaggaggacccctatctgctggcgcagccgcagttcggcgcaggcttcggcgcagccgatcagcttgcgctggagctcggctttgacggcgacgacgcccgccgcgtcgaagcgggcgttatttttgagctgcgccacaatctcacaaacggacatacctttctcccgcaggacaagctcgttgcggcaacgtcccagctgctgagcctcgaggcggagcccgtgatcgcggccgtcgaccgtctgacggagctgggccgcgtggagcacagcaccatcgccgggatcgcagccgtttacctgccggaatattacgaggcggagacggccattgccgcccgcatccgtgccatggcccagcacccgcccgcgccgctgcccgatgcggagcgcgtgctgcagggcatcgaggccattgcgggcatcacctatgccgaacgccagcgcgatgccatccgcatggcagccgagcgccgcatcatgatcctgacgggcggccccggcaccggcaagacgacggtgctgtccggcatcctcaccctgttttccaagctcggccgcaaaacgctgctggccgcgccgaccgggcgcgccgccaagcgtctgtccgagctgaccggccgcgacgccgcgaccgtccatcgcctgctcgaggcgcaggtctcgcccgaaaacggcgagatgttcttcgcccgcaatgaggacgagccgctggaatgcgacgccgtcatcgtggacgagatgtccatggtcgacgtgctgctcatgcacagtctgcttgaggcgctgccgcaggaggcctgccttgtgctcgtcggcgacccggaccagctgccgagcgtcggcgcgggcagcctgttttccgacctcatccgcagcggcatcgtcccgtccgtctgcctgacggaaattttccggcaggcccggcagagcctcatcgtcatgaacgcccacgctgtcaaccgcggcgagctgcctgttctgaccgcaaaggaccgcgactgcttcttcctgcgccgccgcgcgcccgcgcagctcgtgcagaccgtctgtgagctctgcgcgcgccgtctgccgcagaatatgcatatccccgccggggaaattcaggtcatcagccccacccgcaagggcgagacggggacggccaatctgaaccgcgccctgcaggcggcgctgaacccgccgcagcccggcaggcgcgaaaagctcagcggcggctcgtgcttccgcgagggcgaccgcgtcatgcagatccgcaatcactacgatctgccgtggaagcgcgccaacggcacgtccggcacgggcgtgttcaacggcgacatcggcacgatcgtctccatcgacccgaaggaggaccagatccacgtcctctttgacgaccgcgaggtcgtctatgagcccgagatgctctcggagctggagctggcctacgccatcaccgcgcacaagagccagggcagcgaataccgcgccgtgatctttgccatcggcggcggctcaccgatgctgctgacgcgcggcgtgctctacaccgccatcacccgtgcgcgggagctgctcctcctcgtcggcaacgaggagctcatcgcccagatgacgcagaacaaccgccgcaacaagcgctacagcggcctgcgcttccggctgcagggcgaagcatgagggcgctgttctctcagctgctcgacctgctgtatccgccgaagtgcgtgttctgccgccgcctgctgcggccggaggagcacgacgtctgcgcccgctgcgcgcacgagctcgagccgatccccgccccgctgcggcgtgggcagttctacacggagtgctatgccgtgtatccctatgagggcgtcgtggcggaatcgctccgccgcttcaaattctccgggcagtcacagtacgccgctgcctacggccgcatgctcgcgcccctgctccggaccgctccgtttgagatcctgtcctgggtaccggtcagcgcgaagcgccgccgctcccgcggctatgaccagacggagctgctggcgcacgccgtggcgaaggagctggagcttccctgcacgcagacgctgcagaaaattcgccacaatcccgcgcagtcgtcccagcgggacgccgccgcgcggcgcgccaatgtgctcggcgcttaccgcgccgtttctcccgaacgctttgcaggacgcagcgtcctgctgatcgatgatattctgaccacgggcgcaacgctctcggaatgcagccgcgtgctgctcactgcgggcgcgtcctccgtggtctgcgccgctctggccgccacgccggagccggggcagaaacccgcagacaggtaggtgcaaactatgttattcttttccagagaccttgggatcgatctcggcacgtccaacgtgctgatctatgcggccgggcgcggcatcgtgctgcgcgagccgtccgtcatcgccctcgataaaaacagcggcaaggtgctgcaggtcggcgcggccgcgcggagcatgctcgggcgcacgcccggcaatgtcgtcgccgtgcacccgctgcaggacggcgtcatctccgactatgagctcacggcccgcatgctgacggagatgctccgccgcgtgctccgccacgccatcgtcaagccgcgcatgatcgtcacagtccccagcggcatcacggaggtcgaggagcgcgccgtcattcaggctgccatggaggcaggcgcccgccgcgtctacctcatcgaagcgccgctggctgctgctctcggcgcccagctcgatatcaccgcgcccgagggccggatggtcgtcgacatcggcggcggcacgacggatatcggcgtgctgaccatgaacggcattgcgcagtccgcctcgctcaaggtggcgggcgcggccttcgacgaggccatcatccgccatctgcgccgccgctacggtctgctcatcggtacgaccgttgcagaggagatcaagatgtccatcggctgcgtcacgcctcgtccggaggcactgaccatgaccgtcaagggccgtgacctcaagaacggccttgcccgcgaggccacgctggcatccgaggagctcatggaggtcctgcgccgccccgcccgtcagatcatggacaaggtgctcgatgtgctcgagagcaccacgccggagctcgtggcggacattgcgcgcaatggcatcgtcctgacgggcggcggcagccagctcttcggcatggaccgcctgctgtgcgagcgcacggagatgacgtgcgttgtcgcggacgacgcggattcctgcgcggcctacggctgcggcaagagcctgagctggatgaaccacatgcaggagggcacgatcaacctcgcccgccgccgcctgctgaaggagtgagttcctgtttgacaagcctttcaggcttaagaagatcccacttttttcgccgcctgcgggcggcgaactctgcggggctctttgaaatcatacccaccggccggaccagtggggcgttctgcaaaaacagggaccggagaaagcctccgatccctgtttttggtatttccgaattattctgcgtcgtgtttctggacatgcgccttgatggcggcaaagctctctgcgctgatcacatgctcgatgcggcaggcgtcctccgaggcgatcgcaggatcgaccccgaggccggtcagccacttcgtcagcaggcggtggcgttcgtaaatgcgctcggcgatctcctgtccggccggaagcagcgtgataaagccgcccgcgtccacggagacatagccgttttcgcgcaggttgcgcatggcgatgctgacgctcggcttggaaaactccagctcatttgcaatgtcgatggaacgcacaaggcccttacgctccttgagcaccagaatggtctccagataattctcggcggattcctgaatcttcataggccctgaacatccctttcgtatgaatagaattattataacacgaaaaacggagttaggcaagccagagatttgtgcaggagaaaaatccgggcttgatttttgccctgcctgctgttataatatctgcgaagctttgctgcgtctgcaatacggagtggtatcgaagtggtcataacggggctgactcgaaatcagatt

SEQ ID NO: 11094 - DNA, 11433 bp, Unknown
  gut microbiota DNA sequence
aaggagcgcgagatcgagagcctgtgtatgaagctcctgctgcagcagcagcccgttgcgcgcgacctgcgcacgatctcctcggccctgaaaatgatctccgatctggagcgcatcggcgaccaggcctcggacatcgcgggcatcaccggctacatcgaggatgagcagctcaagtcgggcacgcacatctatgaaatggcccgcgccgccagccgcatggtcacggacagcgtcgactccttcgtccgcaaggatctcggcaaggcccgtgccgtccagaaggaggacgacatcgtcgacggcctgttcgacaccgtgaaaaacgagctggtcggtcagatcaccgagcacccggacctgagcggcgagtgcctcgatcttttgatgatcgcaaagtatctcgagcgcatcggcgaccatgccgtgaatgtggcagagtgggtcgaatattccatcaccggcgcacatgccggagagtaaggggaactttttatgatctatttgctggaggacgacagcgccattcgtgagcttgtcgtctacacgctctgcagcaccgggctggaggccacgggcttcgccgcgccctcggagttttatgatgccatggagcgcgccctgccggagctgctgatcctggacatcatgctgccggaggaggacgggctttccatcctgcgccggctgcgcgccagcccgcgcacggagcacctgcccgtcatgatgctcactgcgcgcagcagcgaatatgacaaggtcatcgggctggacggcggcgcggatgattatcttacaaagccgttcggcatgatggagctgatctcccgcgtgcgcgctctgctgcgccgggcggagttcggccgcgagcgccgcgagacgctgcgctgcggggacatcgagtgcgacaccaccacgcacaccatgcgcgcctgcggcgaggagctgacgctcacgctcaaggaatacgagctgctgcacctgatgctcgagcacccaatgcaggtctttacgcgtgaccggctgctttccagcatctggggctatgaatttgacggcgagagccgcaccgtggacgtccatatccgctccctgcgcctgaagctcggcgcagcgggcggccagatcgagacggtccgcggcgtgggctaccgcctgcgggagactgcggtatgacaaaacgaattttccggtccatttttctggtggccctcgtcgtgctcctgctgagcgtggcgctgctgtccgtcgtgttttataacgactatgccgtgcagtaccgctcggagctgaagagcgaggccctctccatggcccatgccatcaacggcggccttgcggaggaggactacctgcgctcgctggagcaggataagatctcaccgatccgcatcacctggatcggcgccgacggaaccgtccgctatgacaacgaggccgcccccgcgcagatggagaaccatgccgcgcgcaccgaggtggctgatgccctgcgctacggcgcgggtgagagcgagcgctattccgcgacgctgtcccagaagacgttctactatgcctgccgcctgcaggacggcacggtgctccggctggccggaacgcgtgattccgtgctcggcatcctgctgcgcatgctgcgcccggccgttgcggccgtgcttgtcgccattgcgctggcgtggctgctgtcgtaccgcctgtcgaagcgcatcgtccgcccgctgaatgccctcgacctggagcatccggagcaggcggagacctatgacgagctttctccgctgctggagaaaatctccgcccagaaccggcagatcgccgcgcagatggacgagctgcgccgccgccagacggagttcaccgccatcacggagcacatgaacgaaggcctgctcatcgtcgacgcccggacgaacctgctgttctgcaatccgagcgcgcgccgcctgctgcagattgaaaatgtcgaaaagcagtccgtgctggccgtgaaccgcagcgaggacttccgggaggccgtgcagcgcgctctgtcgggcgagcacgacctgcgcaccctgacgctcgacggccgcatctaccagctcatggccaacccggctatggaggacggccgccttgcgggcgcggtgctcgtgctgctggacgtgacggagcgcgaggaccgcgagcagctccgccgcgagttcacggcgaacgtctcccacgagctgcgcacgccgctgacgtccatctccggctttgccgagctcatccgcgacggcatcgcaaagccgcaggatgtgcagcacttcgccgggaacatctataccgaggcgcagcgcctcatcgctctggtcggcgatatcatccgcctgtcccagctcgacgagggcagcgtgggcagcgaaaagacggacctgcgcctcgacggcatggccgcgagcgtcgtctcccgcctgcaggacgcggccgcgcagcacgacgtcacgctccgcacggacctgaagccctgccgcgtgcacggcatcgcgcagatcgtggacgagctgatctacaatctctgcgacaacgccatcaagtataaccgcaagggcggcagcgtgaccgtcagcacggcggaggagaacggccagccggtcctccgcgtggcggataccggcatcggcatcccggcggcggagcaggaccgcgtgttcgagcgcttctaccgcgtggataagagccattcgcgtgccatcggcggcacgggcctcggcctgtccattgtgaagcatgctgcggcctatcaccacgcccgcgtcgcgctggagagcaccctcggcacgggtacgaccgtcaccgtcaccttcccccgccccggcgaggcgtaagaaaacagaacgagccgctgcggttctgccgcagcggctttttgcacacaaatgttggggcgatgaggtgccttgcagggggcggcatgcagaaatgaatgaatactgaagactgaaaaatgaagaatgaatcattcacgggccttcggtcacgcgatgtaggggccgggctgtcccctcccggcgacgcacttccgacccgtataggccgccgtcaaaatggcaaacgcccccgaattgtcattgcgaggccccagcggggccgtggcaatctcgggaaggcagttacgttttcgccgggagtgccctgttatccaccccggtcctgcgagattgcaccccaagggcacttcctcgcgctgcgcgctcagggcgccacgtcgtttcgctcctcgcaatgacaaacttgggggtctcatgccatagaatccatgccgaaaacattgccagcccgcaaggcgctcaccgcccgtaaagggcacgccgcatccgtaaggcggcaaagccgccaacggctgcgcagtgagcgccgctacagacgcaattggtgcatgccattttaacggcagcctgtacggactgcaagtgccttcccgagattgcaccccaagggcacttcctcgcgcttcgcgctcagggcgccacgtcgcttcgctcctcgcaatgacaaacttgggggccattgcctttttaacattggcccgcacttcccgccggtgcgccgccgggaggggacagcccggcccctacaacgtgccgtcgatggcccctcaaaatgcaaaaaaccggggatgccggaaaatccggcatccccgatcgggtctcttacatatcgaacggttccatggagaggacggggtggccgacctcggtcaggtagttcagcagctcctcggggtcctcggtgcagatggtctcgtcggcgatcatgtcggcgaagttatccacatcgtagagctccttggcagcctcgttcagcttgtcgcgcatctgctccttgagctccttcggcagccagacgatacggccgaggccgccttcggcagcgatgaacttcttggaggcgatgaagtgcttgccatggcccatgaagcccggcgtctgcacgccgccgcccgtcatggaggccatctcggagaacgtcatgccgagcggggtcatgccggcgtactcacgcatcgtgatgacaacgcccatgctgaccggctcgacgccgcagatgcattcgaagcagccgcaggacgtcatcggatcctggaacagggagtacagcgtgacatgctccagcgcgccgtgagaatacttctggacggcctcgtccacatcctcgtagcggccgaggcgctcgtcgatgcagtgctccttcggcacgacctggcagggaccctgcgggtcgagctcgttcgttgccttggcgtccagccaggaaacggcgccgcagaggccgaggcgctccggggtgacgatgcagacatggctcggggagaaggcctggcacatgatgcaggtgtagaacacgggcacggactcgtccgtcatgctgcgcagacggtcgtcgcggcggttgaagacctcgttggccatcgcgcgcagctccttgttcttcgcctcgtccacgacgatcctgacctggcacttgtcgacgacggtgtcgaactcgctcttgatcttggcgtagaggacctcgccgatgtggcggaagcggaagcccgcctcaaagtcggccttcgaaacgcggatacggatcatatcgcgctggccggtgtgcataacgccctcgatgcagttcaggaaggagtggatcttgcgctccataacggactcgaagtcggactgcatgttcttgcccgcgacctcgacgatgtaggacagggagatcttggagccgacggggatctcgtcaagctcggggccgtcgatcgtgatcttgtggtcctcgatctcggcggcgtctctcgtggtgaccagctcgaagcagtccttgcgggagccgtcgacctcgacctgcatgtcgcccttgcggatgatctcgccttcgaacgcggaagcgaaggagacggggatgtcgatcgtggtgatcttgatcttgatgtcgcgcgcctcgagggaggtggcgttgaacttgctgacgtcctcctgcacgatgaggctcttcgggacgcggtagatgttctcggtctcgttcgtgacgaccgggaagccgagggcaatggcgccagcgccgcaggcgacgatgacgtcgtccaggggcttgaaggcgttgacgaacgcgggaacgcgctccatcgtgtacttcatcaggctgcctgcatcgcccggggtgatgttgccgaagatcagggcagcgcgcagcgcgacggagacggcatggatgacggcggtgacgtccttgccgagcgggatgacgcggacattgtcgccggtcttgtagcccttctcctcgagctggtcgatgacgccgcccacgagggtgatgaggatgccctgactctggtagctcttcacgagcgcgacggcctcatcggcagagggagcggagccgaggatcacggcaacgccggggatgtcgcccgtgaccagcggcacgccgaggttacgaatgacggcgtcagacaggtggccgtagcagggcagctcatagggcgctgcgccgttgaggtacttcaggacctcgatgaactcggcgcacagtgcggtggctacgccggacatgaaggcgtcgttcaggcggggattgcgggtcatgagcgtcttgacgacgccgagagcctgcttcagctcgccgagggtgccgaccttcgagccggtgacggcgtagtagcagggcagggagtaggcagtgtcggggaaggacacggcctggccttcgccgtactgggcgatggcattgtcaatggcggcctcggtcaggccgtaaacggcatcgttgccgccgaatacacgttcaaataaagtcactgggattttcctcctatttttcatcccgatccaggatggccttgatgttccgaatctcttccatagccgtgcggctgaaatcgtacggggactttccgttgcggtcagcgtccatgatctccggattgtagtggatgcagccgaggaagtcctctgcggggatgacgctgcggacatacgcctcgtcgcgctcgtcgcgcaccttgttggccacgacgcgcacgcgcttcacgccgagatcggcggcaagacgcttgacgtttccgtaggtctggacgctgcgcgcgcccggctccaccacaacgaggaactggtccatgttggctgccgttccgcggccgaggtgctccagccctgcctccatatccatgatgacgacgtcgtccttgcggtaggtcagcgcgctgagcagggccttgagcatcacatgctccgggcacacacagccgctgccgccggtgtcgaccgtgcccatgacaagcagcttcacgccgttgacctcgtgggcgtatttttcggggatatcggaaacgaaggggttgagcttgaagaatttattggcctcgttcgcgccggtgcgctcctcgacgagcgtgcgcattttggagatggggacgatggaatcgacctcctcctggctcatgccaagcgcaaggcccaggttggcgtccggatcgacgtccgcagccagcacggggcggccctcgtcggcgtaaagccgcgccagcgtggaggcgagcgtcgttttgccgacgccgcccttgccggtgatcgcgagcttcatactcagatgcccagcgcagcgcgcttctgctcgatgcgctcgatcatgagatcgccgagcttctcgatgtcagtttccacggtgtagttggcctcgacccaatccttcacgccgtgctcgccggtcagcagctcgcagatctcgctggagcccttgacgtacgggtcaacgccgaggaaggtgtcaatgccggtggccacgacgtagttgccgatggagacggccttctcgctcatccactccggggcgcagcccacgacgggaagctgggagatgttcaggccggaatccttcgacagctcggaggccaggatcatcatgcgggagatatcgacgcaggagcccatgtgcagcacgggcgggatgttggccagctcgcacacgcgcttcagaccggcgccgcacagctccttggcatgcaccggatccatcaggccggccttggcggcagcctgcgcggagcagccggagacgatgaggatgatatcgttggcgatgagcttcttcatgagctcgatgtgggcatagtcggggcggaccttcggattgttgcagccgaccatggcgacagcgccgcggagaacgccggaggtgacgcactcgagcaggggcttcgtggtgccgaaggtgtcgacctggctgttggcaacgccgtccaggaccttcacgatggcttcgagggaatagccgacgcgggcgtgggagacctggttcggaatgttgaccagatcggtcttgcggttcgtgaagttctcaacggccatcttcacaatggacttggcgttctcaccggcgttgtcggcggagaagcggatgaactcggagtccggcatgcgggcgatgggggaggtggtgacgaacttcgtatggaagcacttcgagagcgggccgagggccgggaagatgcactgcacatcgacgacgatggcttcgcatgcgcccgtaaggacaacgttctcctgcgtcaggaagttgccggccatcgggatgccgtggcgcatggcgacctcgtttgcggtgcagcagacgccgcagatgttgatgcccttcgcgccgacgctcttggcaagcgcgatcatttcgggatcattggcataatagacgatcatctcggacagggagggatcgtggccgtggacgacgatgttgaccatatccttctccattacgccgatgttggccgtagtatccacgggcttcggcgtgccgaacatgacgtcggagaactcggtgcccatcatggagccgccccagccgtcggacaggccgctgcggagggcctgacggatcagggcttcgggcagggaggagcagcccatatgggtcatgtgcagagcggtcgcgacctcacggtcaatggcgcgcggctcgatctccgccttgtgccacagctcctgcgtgtgctccggagcgcgcttcaggaagcgctgcacgccgaagggcttgccgtattccagcaggccgatctcggccatctcgtgcgccagctcatagatgtccttgccttcggtctcgacgccccactcatgtgcgatgcggatgagcttctcggggtccttgacctgatagttgccgccttccttcgtctgatgcagggtgtgcatgatctcacggccatgatcagagtgggtggcagagccgccggcggtgaacttcaggaagtttctgccgacgatgccgtgcacgtcgcagccgcagatgccgcgcgggctcttcggcgtgatacggcaggggcccatagcgcagatgcggcagcaggtgccggcctcaccgaagccgcagtgcggcgtctgattcttgacgcgctgctgccagctgtcggcgccgaccttcttgccgttttccagcagggaagcggtggcggcctccatctcctctatggtaacgaagcgttcttgatccattgggtagtcctcctgtattgatctcgggtgttgggatcgtgggtcacaaaaagattttttgcaggctgacgagcctgctgcaaggggcatactgcgcccttgttttccgatatgattttatcaataaaagaccctgttgtcaatgacaaatccggcggctctggggaaatttgcacgaaaggcagggaatttccggacgttttgtcatatggtttgccatcccccgcagggggatggatgaaataatgaataatgaatactgaagaatgaagaatggatcatacgccggccgtcgttcaatccgcactggccctgtaggggcggggcatgccccgcccgtccgcgaagcggcagtagtaccgccgattcggtgcgccgcaccgttcccattgctgcgccgccctgacgtgtcattgcgaggagcgaagcgacgtggcaatctcgggaaggcactgccgatttgtaccaaccgccgttcaatccgtactggccctgtaggggcggggacagccaggcccgtccgcgaagcggcagtagtaccgccgatgcggtgcgccgcaccgttcccattgctgcgctgccctgacgtgtcattgcgaggccccaaaggggccgtggcaatctcgggaaggcacttccagttcgtacaaggtgccgataaaaacgcaccgaccgattgcgtctgtagcggcgctcattgagcgccttgcaaaggggtattaaaccgctggagggcgctggtgcaccacagtacccgcctgacgtgtcattgcgaggagcgaagcgacgtggcaatctcgggaaggcagttgcgatttcgccggtaactttcccacgatgcagccgggaactgcgagattgcaccccaagggcacttcctcgcgcttcgcgctcagggcgccacgtcggcctttggcctcctcacaatgacaaacctttggcgtttgccattttaacgacagcctgtctcttacgccggtgcggcgccgggaggggcttgcccctcccctacaacgcacgccaaggcccttcccgaaaaaatgctgctccctgcttgtattacccggggaaacatggtaaaataatcagtaaaatcgtgtggtgcgcccaaatgtaggcgcgcaaaatcggaggaatcttatgtcaaccttacaagaagagatcagccgccgccggacgtttgcgatcatctcgcacccggacgccggcaaaaccacgctgacggaaaaattcctgctctacggcggggccatcgcgcaggcgggcgcggtaaagggcaagaaaaacgcccgcgccgccgtctcggactggatggagatcgaaaagcagcgcggcatttccgtcacctcctccgtcatgcagttccaatatgagggcttctgcatcaacatcctcgatacgccgggccatcaggatttctcggaggatacctaccgcacgctcatggcggcggactccgccgttatggtcatcgacggcagcaagggcgtcgaggcgcagacgcgcaagctgttcaaggtctgcgccatgcgccatatcccgatctttacgtttgtcaacaagatggatcgcgaggccaaggacccgttcgacctgctcgacgagctggaaaacgagctcggcatcgagacctatgccgtgaactggcccatcggctgcggcaaggagttccagggcgtctataaccgccgcgggcagcacatcgacttcttctccggcgtgtccggcaagcgccgcgccgaccgcgaggaggtcctgctcgacgatccgcgcgtcggcgagctcatcggcgcggaccgctggcagcagctgcgcgacgatgtcgagctgctcggtgcaggccgcgagttcgacatggacgaggtccgccgcggccggctcagcccggtgttcttcggctcggccctgacgaacttcggcgtggagccgttcctcgaggccttcctgcagatgacgccgccgcccctgtcgcgcacggccgactgcggcgtgatcgacgccttcagcccggacttttccgccttcgtgttcaagattcaggcgaacatgaacaaggcccaccgcgaccgcctcgccttcctgcgcatctgctccggcaagtacgagcgcgaggcagaggtgttccatgtgcagggcggccgcaagctgcgcctgtcgcagccccagcagctcatggcgcaggagcgcgagatcatcgacgaggcctacgccggggatatcatcggcgtgttcgatcccggcatcttctccatcggcgacaccatcaccacgccgggcaaaaagttccgctttgcgggcatcccgacgttcccgccggagcatttctcccgcgtcagcccgaaggacaccatgaagcgcaagcagttcgtcaagggcacggagcagatcgcccaggagggcgccatccagatcttcaaggtgccggacaccggcatggaggaggtcatcgtcggcgtcgtcggcacgctgcagttcgacgtgttccgctaccgtatgcagagcgagtacggcgtggagctgcgcatggagggcctgccctatgaggtcctgcgctatatccgcaagagccccgtcgaggagaaggagctgaacctctcgtccgacgttgagctgctcgaggactaccgcggccataagctgctcgtcttctccagcccgtgggccatcgacttcaccctccgccgcaaccccggcctcgagctggtcgagaccctgcaggagctggatacggcggagtaagactaccggcgcaccacggcactcccctgacgtgtcattgcgaggccccaatggggccgtggcaatctcgggaaggcattgccgatttgtaccgaccgccgttaaatccgcactggccctgtaggggcggggcatgccccgcccgtccgcgaagcggcagtagtaccgccaattcggtgcgctgcaccgttcccat

SEQ ID NO: 11095 - DNA, 21975 bp, Unknown
  gut microbiota DNA sequence
aaggccctctcagtcaccttcggtgacagctctcccagagggagagccaaggtcgcttcgctcctcggaatgacacgtcagggtggtgcggcaatgggaacagtgcattgcatcgaatttgcaatccttttgccgcttcgcggacgggagcggcatgccgctcccctacaggtgcaatcggagcatgccgccttacagcatcttcttcagatactggcccgtgaaagacgccgggcaattggcgatatcctccggggtgccggtggcgacgatcgtgccgcctccgtctccgccctcggggccgaggtcgatgatgtggtcggcgcatttgatgacgtcgaggttgtgctcgatgacaagcacggtgtttccggcgtccacgagcttctgcagtacgtcgagcagcttctgcacgtcgtacatgtgcaggcccgtcgtcggctcgtcgaggatatacattgtgcgcccggtggcgcggcgcgccagctccgttgcgagcttcacacgctgggcctcgccgccggagagcgtcgtggagctctggccgagcttcacatagccgaggccgacctccacgagcgttgcgaccttgtcgcggatgcgcggcagattttcaaaaaagctcagcgcctcgtcggccgtcatttccagcacgtccgcaatggacttgccgcggtagcgcacctcgagcgtctcgcggttgtagcgcgtgccgtggcacacgtcgcacgggacgtagacgtccggcaggaagtgcatttcgatcttcacaaggccgtcgccgctgcaggcctcgcagcggccgcccttgacgttgaaggagaagcggccggggccgtagccgcgggcctttgcgtcagccgtggcggcgaacaggtcgcggatgtcggcaaacaggcccgtataggtcgcggggttcgagcgcggcgtgcggccgatggggctctggtcgatgacgattgccttgtcgaggttctcgatgccctcgaagcggtcgtgcctgccggggcggacgcgcgcacggttcagcgcggccgagagctttttgctgatgatctcgttgacgagtgacgacttgcccgagccggacacgcccgtcacgcacgtcagcgtgccaagcgggatgctgacgtccacattgcgcaggttgttctcgcggcagccgaacacgcgcaggaaattcccgttccccgcgcgccgctgcgccgggacggcgatgcgccgcttaccggagagatactggcccgtgatgctgtcgggcgcgttcatgatgtcctgcagcgtgccctgcgccatgatctgcccgccgtgcacgcccgcgccggggccgacgtccacgatatagtctgccgcgcggatcgtgtcctcatcgtgctcgacgacgatgagcgtgttgccgaggtcgcgcaggcggcgcagcgtgtcgagcagcttgtcgttgtcgcgctggtgcaggccgatgctcggctcgtcgaggatatagagcacgcccatcagcgacgagccgatctgcgtggcaaggcggatgcgctgagcctcgccgccggagagcgtcgcggccgcgcgggagagcgtcaggtaccgcagacccacgctctgcaggaagccgaggcgggcgcggatctcgcgcaggatctgctcggcgatgacggcctgcgcgccctcgagccgcagatcgttcacgaatgccagctcgcggtcgactggcatgtcacagaattccgtgatggacaggccgccgacggtcacggcgcgggagatatcggacaggcggctgccatggcagtgcgggcagggggaggcggacatcgtctcctccagctccttgcgcatggcctcggactgcgtctcgcgcacgcggcgctcgatgttcggaatgatgccctcaaacgcctgctccagcgttccgcggctgctgccgcggtcgtagtgcagcgtgagcttttcgccgtgcgtgccgtagaggatgacgtccatggcctccttcgagaggctggagatcggcgcgtgcaggtcgaagtgatatttctgcgacagggcgtcgaagtacatccgcgcgatggagtcgctgcggatattgccccagccgctggcctggatgccgccgtcgtagatggagagggacgggtccgggatgacgatggcggggtcgaccttcagaaggaagccgaggccgctgcactccgggcatgcacccatgggattgttgaacgagaacatgcgcggcgaaagctccggcatggagatgccacactcgtcgcaggcgtagttgcgggagaacagcgtctcctccccggtgtccggctgctggatgacgacgagcccgccgccgtgctccagcgcggtctcgacggaatccgtcaggcggcgcgtcaggtcgccgcgcagcacaaggcggtcgaccaccagctcgatggtgtgttttttgttcttctcgagtgtgatctcctcgctcaggtcatagaggatgccgtccacgcgcacgcgggagaagccgctcttccgcgcgtcggccagcagcttgacgtgctcgccctttttgccgcgcacgaccggggccagcacctgaaagcgcgtgccctccggcagggccagcaccttgtcgacgatctggtcaacggtctggcggcggatctcgcggccgcagcgcgggcagtgcggcgttccggcgcgcgcccacagcaggcgcaggtagtcgtaaatctccgtcaccgtgcccacggtcgagcgtgggttgcgggacgtcgtcttctggtcgatggaaatggcgggggacaggccttcgatcacgtccacgtcgggcttgtccatctggcccaggaactgccgcgcataggccgaaagcgagtcgacatagcgccgccggccctcggcatagatcgtgtcgaacgcaagcgacgatttgccggagccggaaagccccgtgaatacgcacagcgcgtcgcgcgggatctccacatccacatttttcaggttgttttcgcgcgcgccgcgcacgaggatggaatttcgcatagctgcctcctgccgatgatttctctgaagtcttattataccacgctgtctggatcgcagcaacgaaaatttataaacaaatgtacgatttttcgccaaccgcccgtgccattgtaggggaggggacagccgggcccggcgctgcaccagcagcccgtacaagccaccgttaaaatggggatggcccccgatttgtcattgcgaggaggcgcagccgacgtggcaatctcacagaacccggccgaatcgcgagaaagcgatcggcgaaaacgcaactgcctctccgagattgcaccccaagggcacttcctcgcgcttcgcgctcagggcgccacgtcagggaagcgcgagttgcatcagcgctctcccctacaacatcctgtcgaaaaaatcaaaaatcgccatcaatccggatttttccgttccaatttctccttttcggttgctttcgcagaaaaaatccgttatgatggaaggtagaatctgcaattgcatttttcacggccgtttctgccgctgcccggcgctttttccggtgcataacgcagccgcgtccggttaaaacaaacgaaaaacaagggacacgggctttcgcccggcagactgtcaaaaaaactgccaagccaaaagcttcggagggaagaaaagcgtgaaaggaaaccgtcagggtgtcctttcgcgtccaatcacccgccgcagcggcagaattgcaaaataagatacaacacaattctattttgcaattctgaaagcagcttggcgaaaagcccgaagggactttttgacaagctgacgggctttcgcccggcccctaccggcctctgcctgcatgccggagaggagggcttttcttggaagaagatgatctgttatgggtcctgggggccttcccccagcccgtttttctgacggacggcgagaccgtccaatggcgcaacgccgcggcgtccgccgtgctcgatccgggcgcgtccctgcagcccatgctgcagggaacggcgttcggcctgtggtcgcgcaggggcacgctgcgcctgagcctgccgttcggcggggcgctgtgtgatttttccgtccgcgtgatgcagcggggcctgctgtttctggccgacgccccgcatgagccgtctgcggcggccggggcggcgctcaaggcctcggccattctccgccgtccgctgcagaatgtcatgacggcggcgcgcgagctgttcgaccgcgtggaggacctcgaggaaccggcgaccacggccgtctcctccgagctgaaccgcgggctgtatcagctcctgcgcctgtgcggccagctcaccacgggcggcgagctgctggccggcacctgcaagccggagcggcaccgcgtggacctgacggccctgctggacggcatcgcggacgatgttgccccgctgctcgagcgcgccgggcggcgctttgtctaccgcggcctgccggccgccgtcaccgccgatgcggatgcccagcttgtggagcgcgcggtgtataacctgctgtccaacgcgctggcctttaccccggcgggcggcgagatctgcctgagccttgagcggcgcgagcagtcgctgctcatccgcgtgacggatacgggcgagggcttcccggagagcgtgctcggcacgctgttcgaccgctacagcctcatccccgtcggcgacccgcgctggggcaccggctacggcctgcccatggtccgcgagatcgcccgcctgcacggcggcacgctcatggcggccaatgtcccgactggcggcgcggacgtgatgttcacgctctcgctcgtgcgccggcccgcagccgtccgcaccgcacagcagcgcttcgattacctcagcggctaccgccatgccctcgtcgagctgtccgacagcctctccgcgtcgctgtacgaccccgcaacggtgtcctgatcagcagactgccgatggcgcattgcaggggagcggcacgccgctcccggcgcagagctgccgattccataatggcagaggccaaaagtcagcctgcatggcggtccgtgaccgccatgcaggctggcaatatctgcgatacgcattctgtggcgtgaagctctcaagtttgtcattccgaggagcgaagcgacgtgggaatctcgcaggacccggtccgataacaggggaaccccggcgaaaacggaactgccttcccgagattgcaccccaagggcacttcctcgcgcttcgcgctcagggcgccacgtcggcctttggcctcctcgcaatgacaattcgggggcgtttgccattttaacggcagcctgtactagacgcaagtgcggcgccgggagcggctgtccgctcccctacaatggcgtgtgcggtcgacgagagtgcacggaaatttgccgttgcgccacgagacgtcgaggacgccgtcccctacaacgcacggccggcagccttggcaggttctccgctttccgcttgccccgtgcctttctatcctgtcagatacaaaaatcggaccggctcatttgggtgagccggtccggtttttatggcaataccgcataattcaacaagagcattcggcgagagattttttgccgatacaaggtttgaaaagtgcaggaatactttgtgtatttcaaacttttcgaaccgcagaatcggcgaaaaatatccggcgaaggccgaagaggaattatgcggtgttgccttatatcacggcgcttcttcatcgccgccggtggactcggtcggggcgtccgtgggcggttccgtcggctccggctccgtgggcttttccgtcggactttccgtcgggctttccgtcggctccgtcggcgcctccgtggggggctccgtctcctcgacgagcttggcgaccagacggttgcgccagtcgtagctcgagtggttgaccttctccgtggacagcagcttgccgttcttgtcgtacttcatgcggtaggtatcgacctcatagccgtcgtagccgacctggatgcgctcgccgtccttatagtccttgtacttgtcgtagttcttcatgcccttggagatctcgacctcctcggtcttgctcttgtgggtcatcgtggccttgtagtccagctccacggtgtaatccttcgtctccgtgcccatgaagcgcacgcggacatagccgccggaggcctccgccagaatgcggatggggtaggtcgtgttgttgcggaacttatagtcgaggctgccccagtagatcgtggcgtccatgccccagggaatatagtccggcacatactggtgctcctgccgcgcgatgacctcgaggtcggatttcagcgtgcagtagtacagtacggacgcgacctggcagacgccgccgccgagctgctggacggtctcgccgccgacatacacgccgccctccttgtagcccttggccgccgtgcgctcgccgacgacaccgttgaacgagaacgtctcgccgggcttgagcacatagccgttgatggccaggcaggccagacgcaggttctcacttcggccgatgagaccggcgttgtacgggctgtcatagctggcaagctcatcgtggaacagcttctcctgcagggattccttcgtgtactgcggctctatgacgtcgagcgtcagcgtgacctcgccgccggggcctgccttctccagctcgtccatggcctttttgatgtcgaagccgtagccgtccgagccgtcggtcacttcataggtgtcctcgttgcacacggcgttcaccggcgcaacataatacttgtggtacagggcgtcgaggtcaaaggcctccggcaggtcctcctccaccacatactgcatctcgaaattcgcgtcggcataggcggtgagcacggccttgtacagctcgtccgtgttgatctcgcggcccgcgctgccgagcctgaccgtcagggtcttgagctcgcgctcctcgccctcgtcgtccgtcacggtcgtcgtgccctcggtgacggagggctccgtcttttcgctcacggcgtccttggcatattcgtccagcatcgtgcggacgtagctttcatcgagcgtgaggaaatcggcgacgttcagatcggtgcgctccgtcagcgcgttcttcttcacgcgggagaacaggccgccgccgcggccgtaggcataggcagcctccacggccttgtcgaggtcgaggcggaccgccgtgtccgacggcgtcaggcacagctttgtcagcagcgtcatcggcttgccgtcctcgtcgcgcggggtgttcgggtcctcggtcggctcctccgtcggggcctcggtcggcgcttccgtcaccggctccgtctccgaaggcgcggtctcggtcggctccgtcgcctcggtctgcgcggaggcatcgagcggcttgccgaaaatgtcgacgagcgggatctgcgccgggtcatatgtcgaggtgaacgtgtcataggggcgcgtgtagagcgcgacgttcatattttccttcccatagacgctcacgcccttttcgagcgcggcgcgcgcctcctccttcgtcatgccgctgagatcgacgcctgcgacatagaggttgttgacgatcctgccgtcgtcgcgcaggaacatatagcccacgccgcagccgacgagcacgacggctgcagccagcagcgcgacgatcaggccgaggcgggactgctttttctgctttttctttttcggcgcacgctgcggctcggcataggactgagcctgcgtcgggcgtttgcctttttcaaatttacccatttaaatctccttctccggtggttctacggcagaatgccgcctattctccagacggcatccgccgccgtttgttcctatcctattataccgggaagccgccaaaatgcaacaacgttttgccaacaaaagcgttacaattgtgaactttatgtaaacctcccgaacaggatcatggcggctgccccccgaagtgccgctgcgaggccgcggaaagtggtatcataaacggacactgactttcggctaagcagggccttgagagtctaaacagccccacagaaacacttctgtggggctgcttttgcacgttgtttttttgtcaagccctggggcttgcgccgtgctcaccgcggggcaatacgcccccggtaagcacgccgtttcggatagaaatcagtgaatgctctggcagtatctggcgaccactgccgcaagctgggcacgggtggccgtagccatgggctccagcttgcccgtttctgtgccgagaataaagccgttggcaacagcccactgcatggattccacagcataggaggagacacgatctctgtcagagaagctgctcaggtcttcggacaccttttcataggcgccggtcaccttggcataccgagcgaggaaggaaaccatctgctcgcgcgtcacgcagtcgtcaggcgcaaaggtatccgcgctgacaccggtggtgatgccgttctggtaagcccagcgcagggcgctgccgtaccagctctccagattcacgtcagtgaagggcagggccttggaatcatccacagcaggttctcccgcaatgcgatagagcagtgtcaccacctgggcacgggtcgcagtctcatcggggcggaaggtgccgtcgccgtagccctgcataatgcccttagacaacacatagtccacggactcatgataccaagccgttgtgctgagatcctggaattccttcgacgggcacggatcatcacggttgctgcttgccgtcagatgctccacctcatcgatccgctgttcattgcgctctgtcttttggaccgtgaaccgaggatcggcgtccttgccggcattcgtcttggtgaacgtcagctctgcgacctgttctccggcaggcatgctgtccacggaaacataaccaagcgttacctttccggcttcagccttgtaggagaaatactgcgcgtttccaatgacattcttcagctcccagccggcagcatcgtagctgacgctcataagcccgttcgtggtgggggccgttcctcccggcaccagcttcagggtgaccgtgttctgatcctccgaggtaatgatctccgaggatgcaggctgttcgcccgcgatgtcagccgccggtttcgccgatgcggttttttctgctgctgtattaagcgcaccataagacgcggccgcttcttcaaccgcagcagaattgagcatgtctgtcaaatcctgagtctgtaccgtgtgggagccaagcggcagattgcttacgatctgctccagctccgtctggttggcctcatgattgtcgatcttcaggatcgttgccggatatacattctcgccgaagctggccagcttttcgccggtccagaagttcttggcggaatcgtatgtcagacggtagagctcattggccttgccggtaaagtaggacaaatacaatgccagctgtccattgaccgtcgtgggaaccatagagcacagcggcgtgccgttatcgtcgcccatgaagtacattttaaatgcactggtcaggttagactttgcaatctcatatttgcctgtcgtgctgctgtagtcgatcccgtcataaatctggaaggtccacacgttgccgcggttatccagcagcagcagcacctccgcatccgtttccgcagtgccgtcctggtccagatcaagctttgtcttgccgagcgaggtcatcgccgtaaacttatcggctccgtttccgtaaagcaggaaatccatgaacagcatgaagccgtccgtgcggatgctgcccagttccgcaggcttgttgagcataaagttatagatactgtagcaggccggtacgtcgcccttggtaaacagctcgctgtattccagatcaaacagcggcacattaaagttaccgcccgcaacggcatcatagtccgccagaaccttgccgctctccatgtcgacctgatggagcttccgttcatttccgtcaaccacaatgacattgttgcgatccgtgtcatatgcggtagaggtaatgccatcgacctccatcacagcccccggcgtccatgtagtatcattttccatatcccacgtatagaactgggaggtggaagagccatccatcagcgcgccggtgagcgtaaccttcaaaacctcaacggttaccgtgcaggctgcactcttggtaggatcctttacagaggttgccgtgatcgtggcagtgccatcgccaatgccggtaaccgtaccgtcttcgtccacggtagccacattcgtattgtcgctggtccaggtcaccgtatcgggatggatgccgaaaggcgtaacttccgcctccagcgtcgccgtgccgcccttgaaaagcttcagcgtgctgcgattcaaggaaacctcaacaggatcattcagctcggacttgttcagattgatcttgtaggtactgcagttgtttgcgtagtcatatacctgcagcagcagatgtgctgcatttgctgttccgtttgcatccaacgacatggtaacagcctcgccgcggcttgctcccttcggagaaccgcccgtcctcgcaaggattttcccggtcgggtaatcgtacagcaccgctgctgcaacatatctgttgtcggaggccgtaacggtcatgacccgtccgtcgttgatcaggtcctcggaaagcgtaatgccggtcagcgtaggagcagtcttgtcaacaaacatcgtataggtctgacttgctccctcaccaagcgcatcccaatccgtcgaaagcgtcgagccgctgtaatccacataatactccggcgccatggtaagcttcacagtcagcttttcgccttccgcggcatccggcgcacaatccacggacaagccgctctgcacctgcatccacgtcttctggttcgagaaatagtaggcgccaatgatcggagcctgagtctccttgttgagatataccgtaccgtcctcgccggtcacagtgatccggccattggccgcatttcggatcaggcagaaataaatatcagagatctttgcggtatccgggttgatggagtaacgatctgcatcgtagaatccgtcgtctacatacagatttccgccaagggaataggagtcatccacgcctttgtattttatggtcagcgactggagctgcgctgcctgctgaattgcagcaagcatgtagggaggacgggtctccatgccgtagtgatactgaataaagctgccgacatcaaacatggaggcatcggtccaatttccgtagtagcccagcaccgggatagaatggctggtcccttcgacaccctctttactgcttacctcgttggcaaatacataaccctcgacataagcgcctgcaccgccgttcttttcgtcgtagctgtccagaccaagaacctttgcacgaatcgtgacgtgaattttcccgtttgcaggcaccgtcacggcagcgctgctcaagcgggagaagaacaggtaagcatcataggtatcgatgtctccgtccttatccagatccgcacggctcttgccgctgatctcggtccgcacgccggtcacatagtccagcagcgcctgaccgtcatccgcagttaccttgccgcttccgtcaaagtcgcagccgtccagctccgcaggcatttccggcttcagcgttttcccatctacgtcccagacaacgtccgcggctaatgcggcagtctttttgtccgagaaattcatgacttgcccgttcccgttattgagctcgccctgaagtgccgcctgcgtaaagaaatcagcgcttaaggtaaacgtgctgtccgtattctccagattgtacagcgtaaagccaaaggaatactcaccggtgcgctggggatcgtctcccagctcggctttgatctttccgtctgcatacgaatctgttgcatcctgatccatcatcaaatagcttccgctatttacagccgcgccgatatttgcaaggcctgcaccctgctgcagaacagagtagtaaccctccagtgtcttcccctgctcatcaacaccctgcttctcaacgatcggctgagcagttgacatcagcaggctttgggccagcgtacgcacagccagtcccgtcttttcggccagatcgttctgcttgatgtactcagctaccagcgccgccattccggctacctgcggagaagccatagaggtaccggacatattctgatactctccgccgtccttcagggagtagatccggccgccgggcgccgtgatctccggcttcatcgtcagggcgccgggaatgccccagctggagaagctgctcatcgcatagtagtcttctcccagatcccaagactcccgctcggagctcacaaacatctcgccgctataatacagaacactgccatcctcgctcgtcaccttcgtggagctttcacgcaggaacgcgccatccgtctgagaaatagagacgcagggctccgtttttgtataatcggtcagatccatataattggagcccggctgattattcacgataatggtcgcaattgcgccattggcaaccgcggcttctgccttctcgtaaaatgaggtatcgcctcgattgcaaattgcaatttttcctgccaggacatccttgactgctgcaaactcttccgcggtaccgatcttgtccagataaatatactcatggcttccgccgatggtatagatcggtttgttctgatagcttttttccgtgtaggtcatgttatgacctttcaccttcagataattgtctgtaacgcccgcgttatcgacggaggctacacacagcgagttaacataggagccggggctgccgtttgtagcccagttcacactgcccgcatagggaaggccaaacacagtttggtcaaaccagctgccggaattacctgcagaaattgtgacaaccatgccgctgccaacgatttcatcaagaatatgacggtatttctcttccgtatactcggagtagcccgggaagcttccgcccagggagaggttcgctgcgtccgcgcccagcaccatggcgtcttcaatcgcgaccatgtagtctgaatcataggcgccgccgcgcttgccgaagactttcatcgtcaggatctgcgcatcgggcgccacgccctgcgtcatgacggagtccaacgctgcgacatagtttccggcttcgtccttaacaaaacggtttcccgccgcgatgccggtcacgtgcgagccatgatcgccctgcgtatcattatcatgcgtgatatccgtgtccgcatccacatagttaaagccaaacgggatcttctcgttgacataaaaatctgctgcggtcagtccggccttgcgagtatatgcatttagctgattcagcacctcatcggtcaagtcagcctccgtcatgatcgtcgcattactcccctgcagggcatatttcagcgcatccggatccagagagggatgatccacatcggcgcctgtgtcgataattgcgatccggcttcctgcgccggtatagcctgccgcccacgcagcgctggagccgatcatcttatcggaggtagccatattgggatccgccgtctcctcctgcttcaccacgcagggctcataccggttctcaagaatgacctcctgcacaccggcaacttccttgattttctcgatctgcccatattggacatttgcagaaatgatattggctgccaatgtcatattccaaacaacatccagtgttgcaccattcagtgcctgcttggagatggcggcagccatgctgtcctgctgcttctccagcttccgccgatattgcatggcgctgcgatcagcagctgcaatctcatcagaggtaaagcccttttccagggtagaggcgtcctttagaataatggagacacgaaccatatcggtgtcttcgtgttctaccgtcttttccactacgccggtattcgcctgaatgggggactctacctgaacagagctgctgtctatttcctcccaagtcagtccgttgctgcctgatttcgagacgcctgtttcctcaattgccagagatggcgcagccaaactaacagctaacaccacggccagcaatgcagccacaatgcgttttcttaagtgtgtgcttttcataaacctgccttctttctttattttggtatgtccacaagccgggcatgcggccgcttctacaccaatggtgttctgtatatattatcacaaacatccggtatatgcaattaaaaatacacatacagagatgccgtgcagttctaaatatcggccggaaacatgtctgattttttccattatttacaaattctggaaatattcaatcgttactgcagaaacgccggcatcggccggcaaaggcttgccgtcatgataaaaatccgaaaagctgccgttccagctcctcatgtcataagagctttttgcttctcttggtgacgttatttgcccttgccacgccggacagactgttttgttctatgcttcgtgatcagtccgcggcattcgatgcgccttttttatccgattttgtttgttccgacaagagaatacggtcattgtccaaggccttgccagcaccgcttttgaacttggcaagcaggtcctccacggtcatgcccgcccgttccgctccggcaacatccagaatgatatggcctctgtccatcatcaatgtgcggttgccaagctccagggcctggtgcatattgtgggtgaccatgagggtggtgatacggttctccgagacggtctgacgggtgatttccagcaccttttctgccgtggcggggtccagagcagcggtatgctcatccagcagcaggagcttcggcggcttgaaggtggccatcaccagcgtcagcgcctgacgctggccgccggaaagcagccccacgggctgcttcatccggttctccaggcccatgtccagctgagccagcttttcccggaaggcggctttttccgcccgggtcacatggctgagccagccgccggaggccgccgccagagagaggttttcctcaatggtcatgtggggggcgctgccgcgcataggatcctggaacagacggccgatttggcgggagcgctgatattccggcagaaaggtaatatttcttccgtccagataaatgctgccgctgtcggggaaaaagctgccgcagatggcgttaaggagggtggatttgcctgcgccgttggagccgatgacggtgacgaaatctcctgggagcaggtgcaggctcaggccctgcagggctgccttttcatggatggtgccggggttgaaggtcttggatattttttcaatcttcagcatgaaggcgggcctcctttcgcgcagccatgcggcggcgcagcatgggcagctgctttttgaaatagggggcggcgatggccagcaccacgatcaccgaggataccagcttcagcatgaaggcgggcatatccagccgcagggcgatggtatacaccagacggaaggcaaaggcgcccaccaccatgccgatggcccgcttgagaatgctgcccttgcccagcagcacctgtcccatgagcagggaggccagggcaatggtcaccatgccggtgccgatgtcgatgctgacggatttttgactttgggccagcaggcagccggacagacccgtgaaggcattggccacgcacaggcctacgatggtggtaaaggtgggattgatagaggaggagcggaccatgtcaggattgtcgccggtggcgcggatggccagacccaagcgggtgcgcagaaacagggccaaaaaaacgaccacggcaatcacggcgatggccgccacaagcagcttatactgctcagccaggaaggtgccctgcagcagagcccgggccttggtgaacacggtctcggttttgttcatgttcagcagggaggagccgcccatgacggcgatattgatggagtagagtccggtgttgacgatgatgcccgcaaggaggctgtcaatgcccattttcgtttgcagcagggcggtgataaagccggagaggactccggcggccatggcggccaggagggccagatagggatgcccggcaatggctaccatagcacccacagccgcacccagagtgaagcagccgtcggtggaaaggtcgcatacattgagcatggagtagctcaaaaacagtgccagcacggtcagcgagcagatgaggcccagctccagggcggtttggaccagagaaaaaatgttcatgagaggcttctcctttcctgtgcaatgggtttgtttcccgagtgggcggtgcgagggtcatcagcgggggcccgctgatggatgcttgatttcttattgattcaaatcgtcgaagctctcggcggtgacgatggactggaccttggtgcacagaggggcgaaggtcttggccagctcgtcatagttcaggcccagctccctgcagatgtcggtgttgatggtggcggtgccgttgtcgaaggtcagcacgggggtggcggagggcttgctgccgtccagaagaatgccggagaccatgttggcggtttccacgcccaggttggcatagtccacgccgtagcccaggaacgcaccgttcagggcgaaggagtcagcgccggtgtagtgggggatgccggccttggccagagcctcgtaaatggccagctctgcggtcatcacggtgttgtcggtgggggtgaacacggcgtcggccttgtcggccacgatgctgctgacggccagactgatctcgtcggtggtggtgccgttatactccttgtaggacacgcccctcttgtccaggtacgccttggcattcttgatgggagcggcagaggagtcctgccccaggtcatacagcagggcgatgttcctggcatcagggtcggcggcgaaaatcaggtccagaatggcatcggtgtccagatagtcggaggtaccggtgatgttggcgccgggggcctccagactttccaccagacccgcacccacagggtcggacacggcggcaaagaccacgggaatgtcagtgccctcggtggcagcctgcatggccacggccacgggagtggctacgccgatcatcaggtccaccttgtcggccatgaagttggcgatgatctgattcagcacggcggaatcggtgttgcagttatcatagctgatctcgaaggtgacgcccttctcctggccgatggccttgagccgggactcgatgttgtccacgatctggttcagggatgcatcgtccgcatagctgcagatgccgacctgataggatgcggcaccggaggagccggtggaattgtcatcgctttttttgccgcaggcgaagagagacagggccagcagggcggccagggccagagtcagcacacggctcagcatgttctttttcatttttgttttcctccaaaattttatatgggtattttgggcggcggatggagggaccggtgccggcggcctggattttaaaaacaaaaaaggcttctgccccacatgggacaaaagcctttgcttctgcgataccacccaaattgacatcttgcgatgtccactcgcttttacgcaccatcatgcgtaccccatggataacgggagggttcccgtcggaccctacttgggaaaatttcccgttcaagccgccctcggaaggccattcacaccgctgcgcaccgctccgatctcaccacccgaagctctcttgggatgccctgtgctgtgctactcttcttcctcacaggtttgtcgtttgaaattaagtgcattataatcatattttttgcctttgtcaagaggggaaggcgaagaattttttgagaaaatcttcggggcggtaagcgagaaaatgtcatgtacagtgcagcaatatggtgagcatatctgcaaaaacaatgtatacagcatcctgcgtcggtacggctgcatcagcattgaggagtcccggaagtgcggggcgctcacgcggtccgggaaggatgcctgcaacgacatgtggcaggcggatctcaagggcgggttccggagggaggacggcaattcctgctgtccactcaccattccggacgatcgaggcacgttatgattcaccgaacgatcgcaaggctgtgaattgtgtcccatgtccgtacaccgctgtatcccgtgttgctcttgccgctgcaaagcgtgcagcgtctactctccctgataggtcttcacgaacctctccgcggcctgcaggggatcctccttcgcggtcagctggagcgtgatggcaggctcttcgctcttcggctcgacgaacatgcgcttctggtactgcccggccacgcgggagacgacggcaaagtcgaactgcgccagccggaagcggagcgtgcggcccttctgggcgatgtcgcggatgccggcggcgctggcgcgggcgcgcagcagcgcaatggcgatgaggttcatgacgcccctgggcgggtcgccgtagcggtcgacgatctcgtcgagcagctcgtcggcatcgctctgcgagcggatgcccgccatgcggcggtagaggtccatgcgctgctcgcccgaggtcacataggccttgtcgatgttcgccgtgacgtcgaggtcggccgtgcaggcgctctcctccggcgacggctcgccgcgctcctcgagcacggcctcctcgagcagcttgaggtagaggtcatagccgacggagatcatgtggccggactgcgccgcgccgagcaggttgcccgcgccgcgaatttcgaggtcgcgcatggcgatcttgaagccggagccgaactccgcatagtcgcggatggcgttcagccgcttttcggcgacctccgtgaggaccttgccgcggcggaacgtcaggtaggcataggcatggcggctgctgcggccgacgcgcccgcggatctgatgcagctgggcaaggccgagcttatcggcgtcctcaatgatcaaggtattgacattcggaatgtcgatgcccgtttcgatgatggtcgtgcagacgaggatctgcacctcgccctcatccatgcgctgcatgacgtcgctgagctcctcctcgctcattttgccgtgggcgacggcgatctcggcgtccggcagggcgcgcttgatgcgcgcggcgcactgctcgatgctctcgacgcggttgtgcagataatacacctgcccgccgcgctcgatctcgcgccgcatggcgtcgatcagcaccggctcggcatattccagcacgaacgtctgcacggggtagcggtcgtgcggcggctcctcgatggtggacatgtcgcgcaggccggacagggccatgttgagcgtgcgcgggatgggcgtggcagaaagcgtgagcacgtcgacgccgcgggccagctccttgagcttttccttgtgcgtcacgccgaagcgctgctcctcgtccacgatgagaaggccgaggtcgtggaactccacgtccttctgcagcagcttgtgcgtgccgactacgaggtcgagcgtgcccgtgcgcaggtcggacaggaccttgcgctgctgctgcggggtggaaaagcgcgaaagcgcgccgatgttcacggggaagccgcggaagcggttgagggccgtcgtgtagtgctgctgcgccagcacggtcgtcggcaccaggatggcgacctgcttgccgtcgagcacggccttcatggccgcgcgcagcgcgacctcggtcttgccgaagccgacgtcgccgcacagcagacggtccatgggctgcggcgactccatgtccgccttgatctcctcgatgcagcgcagctgatcgtccgtctcggcgtaggggaagttgtcctcgaactccgcctgccacggcgtgtcggccgcgaaggcgtagcccatgcggcgcttgcgctcggcatagagctggatgagcccggcggcaaggtccttggccgcggatttcgcgcgggcctttgtcttctgccactggtcaccgctgagcttgttgagcttgacgaccgtgtcctcgccgccgccaatgtatttggagatgagatcaagctgcgtcgccgggacatacagcgtgtccgtgccctgataggcgatcttgacatagtccttgacaatgccgtcgacgcggatctgctccatgccgacatagcggccgatgccgtggtactcatgcacgatgaggtcgcccggcgaaaggtccgtaaacgagctgagcttttgacgattggtcgctttttgatgctttttgcgcggtttctgagcggcctgcgccaacagctggccttccgtcaggatggcaaagcgcaggtcggggtattccatgccgaacggaagcgcgccgtccgtcagtaaaatctgccccggtgcggggagctttgccagcgggaaggcgaggaaggcggaaagatgcttctcccgcagctgctgggcgagaatttcgccgcggcggcggttgccgcacagcacgagggaggcatagtcatttttctgatagaacgcgaggtccgaggctgccgcatccagattgccgccgtaggacggcagctgcttggccgtgacattcacgagcagcgacggctgcaggctctgcgggtagctcgcggcgaggaacgagtcgaagaacgccgcgccgtgcccggccacgcggccgcacagctgctcccagtctgcggaaaaatcgcacagctcgccgcacagcaggccggactgcagcaggctgtcgagcatcatgcccagctcctcctgcgcgcgctgcgcgctgcggcgcagattcccgtggtcgcagaagaacaccagcgcctcggcgggcaggtagtccgcggcgcaggcgaactccggatagatgagggcctgatagcggtcggccgccgagaaggcaaggccgccccgcagcgcgtcggcgtcagcctgcagcgtgcgcatcagagcctcgttcggcgttttgcggcggcgctggcgggccagcaggccgtccagctcccgcgccagcccctcgatgccgccggggtgcagggcaggcagcgtctcggccacgggcaggatgacgagctcgtcggcattttcgacgcgccgctgcgtgacggggtcaaaatagcccatggtgtcgatctcgtcgccgaagaattccagacgcaccgggcgctcctctgccggggagaagatgtccacgatgccgccgcgcacgctgaactggcccgcgccctccacgagggagcagcgggagtagcccgcgtgcaccaggcgggagatcagctcctccagctcgagctgcgcgccgggcagcaggcgcatcgcggcggagaacagctgcgccttcggcatcgtgcgcagggaaaacgcctcgagcgtcgtcaggagcaggggcgttttgccgcgcgccagatcgtaaaggcagcgcaggcgctgctgctcccagccgcgcgagatggcggaggcgtcataaaacatcaggtcgcgcgtcggcagaatgggggcctccgcgccgaggaaggcggcaagctcactctgtgtgcgccgtgcggccatttcatcctggcagacgaccacggcgggccgggccgtgtcgcggcagagggccgcgatgagatgggaacggttgatctgcgccgcgccggatacgccgacagcctgcgcgctctccagcgcggtccgcaggcggggataatcgggcagccgccgcagaagatcgaggatcagctccatgatacacctccggaaaaaggaatttcgagcatgtcaaaatgcggaaagcagggattttcccactttccgtcagaatttcggatatgatttgttttgtaggggaggggacagccaggcccggcggtaaaccgccgattcgaaccggctatcgtaaaaacggtaggggcccccgatttgtcattgcgaggaggccaacggccgacgtggcaatctcggggaggtactcacagttcgtaccggctgccgtgaaaacgctgtgcaccgattgcgtctgtagcggcgctcactgcgcagccgttggcggcttt

SEQ ID NO: 11096 - DNA, 54490 bp, Unknown
  gut microbiota DNA sequence
gtccaaatgcctcgcagagttcgccgcccgcaggcggcgaatgaagtaagatcattttctccggcggcgtgtacgtcggagaaaataccgctcagtccgccagtgtgcgaattgtccgcccttggcgggcgattcgtgcgcgcagcggactgcaagccttttgccggaaaagcccgaaggggtttcccggcagttgagcccgtgcagcgatttgctgtacgggcctttttgtgcgccttggggcttgttaccataatatagacaaacatatgttcaaaaattcggttttcgcgggtttatgggaaaaatttccggaaaaatctcgggcagaatccgaaaaagtgattgcatttttgggacaggaatagtatactacaagcgaagtggagcgaaatggatgaaatgtgagcaaaatggagcggaggtgagggaatgttcggcaaatacaagcacacgcttgaccccaagggacggctgttcgttcccgccaagctgcgcgaggagctcggcagcgcgttctatgttgcccgttcgctggacccctgcctgacggtctataccgaggaggagtggcagcgcatcgtcgagcgcagcaaggctgcgccgtcgtccaaggcccgcggcctgcgcacgttctttgccaacgtcgtccgctgtgagccggacaagcagggccgcttcctgctgccggacgatctccgcaaatatgccgggatccagcaggaggtctatttcctcgggcaggccggccgcgctgagatctgggcggcagagcgctacgaggaggaagaggccaatgtctccgccgaggagctggccgcactgatggaagagatcgggatctgatggaatttcaacataaatccgtattgctgcaggagtgcattgacgcgctgaacatccgcccggacgggatctacctcgacgggacgctcggcggcgcagggcattccagtcagatcgcccgccgcctgacggagggtgggcgtctcatcggcgtggaccgcgaccgcacggcgctggccgccgcaaaggagcgcttagccccctatgccgaccgcgtgacactcgtgcattccaattttgcggagatcgacgcgatcctcgattcccttggcattccggccgtggacggcatgctgttcgacctcggcgtttcgtcgccgcagctcgacgatgcttcgcgcggcttttcctacatggcggacgccccgctcgatatgcgtatggataaggacgacgcgctcacggcgggggcggtcgtcaacacctggccgcagggcgagctgcgccgcattctctatgattacggcgaggagcgctatgcaccgcagatcgcggcagccatttgccgggcgcgtgagaaggcacccgtcgaaacgacgctggagctggtggatatcatccgctcggccatgcccgcgcaggcgctgcgcgaaaagcagcaccccgcaaagagaagctttcaggccatccgcatcgccgtgaacgatgagctcggcgccgtcagccgcatgatgcaggctgcggtcggccgcctcaatcccggcggaagattggccgttatcacattccactcgctcgaggaccgcatcgtcaagagcgagatgcagcaggcagcgcgcggctgcacctgtccgccggaattcccggtgtgcgtctgcggcaaaaagccgctcgtaaagctcgttacgcgcaaacccatcgtctccggccctgcggagctggaggaaaatccccgcgcccggagcgcgaagctccgcgttgcggaaaaactttgacagaaaggatgagccaccatggcagacccttatcgcagcaacggctcggcggcctatgatgtccgccgccggaataccgcacagccgctggagcagccggagcgtctgccggacgcgcctgcgcggcgtaagccggcgcgccatgtccgtgcacgtctgggtatctcgcccctgacggcgctcggcgcggccgccgccgtgctgatgcttgctctggtggttttcagttatatccgcctctatgaggcgcgcagcgatgtcggtaagctgcagacgcagctcagcacgctggaggagcagcaggccagactgcagtcgcagtatgacaatgccctcgatctcgagcagatcgaaaagcgcgccaaggagcttggcatgcgccagccgggcagctcgcagatcatctatgtgcaggtcgatgcggacgatacgacggaggtctatgccgcgcctgcggagaagaatgtgttcgtccgcgtgatcgacgcattccgcagcgcctttacggacgccatcaactacttctcctgagcctgccgcagaatttcgggagggacggccatttcaggcatggtcccgccgcccgattcatatcgtatacagagcatgggcggtgagtgagaattgccgcccatcttttttccactgttttgccccgggagggaatactatgaagcagcaaccgcagagaagacgccgccgcgcgccgaagcgcgaggaggtctcgacgacccatgtgcgcaagggcatctttttcctgatgatcctgctgggtgtcgtcagcttttgcgccgtggcgggcatgctcgtgaagctcatgctcgtcgaccacgattattatgaggcaaaggccatccgcaaccagacccgcagcacgagcgtcaccgcctcgcgcggcacgatctatgaccgcaatggcaatgtgctggcggcctcgtcgagcgtggagaatgttttcctcgacccgctggagctgtcgcagaacaaggtcgacgtcccggcgctggcaaagaagctcgcggccgtgctcgatctggatgcgggctggatcgaggagcaggccgccgatacgagcctgcgctacaaggtcatcaagcgccgccaggcgcaggaggtctgcgacaaggtccgcgagatcattgcggaggataagatcatcggcgtgcatctcgagccggattctcagcgctactatccctatcacgatgtcgcggcgcagatcatcggctttacgaacaccgagaacgtcggctccgaggggctggaggcctattataatgacgagctgcagggcacggccggagccgtcatcacgacgaagggcaactacgagacgcagatgctctattcctatgagaagtattatcaggcgtccgacggcgacagcatccacctgacgctcgacacgacggtgcagtattatctgcagaagcagatgcaggacgccgtggaccgctatgacgtgctcaacggcgcgttcggcatcgtcatgaactgcaaaacgggcgagatcgtcgccatgtgcacgctcggcagctatgacccgaacgattatcaggaaatttatgacgaggacctgcgcacacagatcgaggagctttacaccaaggcggaaaagcagcccgaaaattccacggcccgcacggaggccttcaacgcctataacgccgccgtgcgcgacgcccgcctgaagcagtggcgcaaccgctgcgtctccgacggctatgaacctggctcgacgttcaagatcctcacgctggcggcggcgctcgattccggcgcagtcacgacggccgatacgttctactgcggtggctccgagaagatcgagggccgcgagcagatcctcaactgctggaaccatgccggccacggcagcgagaccacggcgcaggccctgcagaaatcctgcaacatcgccttcgcccacatcggcctgcggacgggcggcggcacgctgtatgactactgccgcgccttcggcctgatggagcagacgggcatcgacctgcccggcgaggccttcggcgtgttccacacgcgcgagcgcctggccaacaccgcctcctacggcacgagctacctcatcgcaacgtcgttcggccagaccatcaagccgacgcccatccagctcgtcacggctatttccgccgtggtgaacggcggctacctgctcgagccctatgtcgtctcggagatcgtcgactccgagggcaacgtcgtgcagcagaacgcccgcaccgtcgtgcggcaggtcatctccgaggagacgtccgccacgatgcggcagatcattgagtctgtcgtcacggagggcacggcaaagaacggcagcgtcgtcggctaccgcatcggcggcaagaccggcacggccgaaaagaccgaccagaccgattcgaacggccagcagacgaacgacaagatcgtctcgtttgtcggcattgcgccgatggacgatccggagtatgtggtacttatcgcacttgatacgccgaaccccgccaccggcacctatatctccggcggcgttatggccgcgccgaccgtcgcccgcgtgatggaggatattctgccctatctcggcgtcgagccggattattccgaggtggatatgtcccgcgtgacggtccgcatgccgaatctggccgggaagaccgagtccgaggcggctgccattctggaggaagatcacctgaactacaagatcatcggcgacggcgacaagatcgtcagccagatcccggcccacggccgtgagctgcccggcaattcgaccgtgctgctctatacggacgattccatgccgaccgacgaggtcgaggtgccgaatctgacgggtatgaccgtggcgcaggccagcacgacgctgtcccagctcgggctctatctgcaggccaagggcacggattcgaatgcatggtacgtcgtggtgacaaagcaggacatcgacgccggaacaaaggtcccgcgcggcacgatgatcgccgtcacattcacggatacgaccgcactggattaaagaaggttgaatgcaatgaaattacacgagcttttgcagggcatcgaggtgctcgaacagaacgccgacccggagctggagctgacgggcgtgagctatgattcccgctcgaccgcgctcggcgagctgtttgccgccatttcgggctatgccacggacggccaccgcttcattcccgccgcccttgcgcgcggcgcggcctgtgtgctgtgcgagcacgacatgccggagcacacgccgtgggtgcgcgtgcgcgatgcgcgcgcggcgctggcgcagctcggctgcaactggttcggccatccggcggagcgcctgtgcatgatcggcgtgacggggacgaacggcaagacgaccgtgacctgccttgtcaagcatgtgctcgagcagacgctcggcgcgaaggtcggcctcatcggcacgatcgaaaaccgcatcggcgacaccgtcctccccacggagcgcacgacgcccgagagctttgccctgcagggcctgctgcggcagatgctcgatgcgggctgcacgcatgtggtgatggaggtctcgtcccatgcgctggcgctgcaccgcgtggacggcatcccgttcacggtcggtgcgttcacgaacctgacggaggaccacctcgatttccataagaccatggaggcctacggagccgccaaggccagcctgttccggctttgccggacgggtgtgctcaatgcggacgatccggcctaccggaccatgctgcagggcgcggcctgtgcgctgctgctcgtcggcaccgggaaggacgccgcgctgcgcgcagagcaggtgcagcttgcgccggatcatgtggcgatggacgtgcgggaaggggagaaggcggcacatgtccgcatcggcatccccggccgcttcacggtctcgaacgcgcttctgacgctcggcattgcccgcgccctcggcattgggctggaggacgcctgccgcgcgctcggcacggcggcgggcgtaaagggccgcatcgaggtcgtgcccacgccgggccgcgattacaccgttctcatcgactatgcccacacgccggacggactggagaacattctccgttccgtgcgcgacttctgccgcggccgcctcattgtgctgttcggctgcggcggcgaccgcgaccggacaaagcgccccatcatgggcgagatcgccgcgcggctggccgacgtgctcgttgtgacgtcggataatccccgcacggaggagccaatggccatcatccgcgagatccttgccgggatcccgcagacggagaagcccatctatgtggaggagaaccgccgcagggccatccgcatgaccttgcgtttcgcgcaaaaagatgatatgatagtgctcgccggaaaaggacatgagacctatcaggttctcggtacggaaaaaaatcactttgacgagcgcgaggaagtcgccgcttgtctgcaagaggaagaccatgagcaataagaccctgacgctcgggcaggccgccgcgtggtgcggcggtcagatagcccccgagctggaagaacggccgtttttcggcgcaaattttgactcccgcctgatccggcccggcgagctgttcgcagccctgcccggcgcgcgtgacgggcatgactttgccgcctctgcgctggagcgcggcgcggctgccgtgttggccagccgcccggtggacggccccgcgatctatgtcgaagatacgtcccacgccctgcgcgacatcgcccgcggctaccgcgagagcctgccgtgccgctgcgtcggcatcacgggaagcgtcggcaagacgacgacgaaggaaatgattgccgccgtcctgcgcacggcactgcgcacgcagtggacggaaaagaattataacaatgagatcggcctgccggtcagcgtcctgcggctgaagccggactgcgaggcggccgtgctcgagatgggaatgaaccacttcggcgagctgtccgtgctcacgcgcatcgcgcagccggacctggccgtgatcacgaacatcggcacgatgcacatcgaaaatctcggctcgcgcgagggcatcctccgcgccaagctcgagatcctcgagggcctgcgccccggcggacgcgtgatcttcaacggggacgacgccctgctgcggccgctggccgcgcggtatcatgccgtgtgcttcggcctgcctgagggctgcgacgtgcgcgcctcccgcgtgtgcgaatcggcggagggaagcaaatttacggtccacgccttcggaaagagctttgaggccgcactgagcgtgccgggcctgcacaatgtgctcgacgcactggcagctgcggccgtcggcctgctgctcgggctgagcccggagcagattgcagaaggcctgcggtcctatgcgccgctgcggcagcgggtcagccatgcggcgggcatgacgatcattgatgactgttacaacgccggacccgagtccatgcgtgccgcgctgcgggtgctggcaggcacgcctacggaggggcgccgcatcgctgtactcggcggtatgctggagctgggcgattatgcgcctgcactgcatgccgaggtcggccgcgaggccgcaaaggcggcggatctgctgctggcctacggcccttgcagcgaatcctatgtgcagggcgcgcacgaggcgggccttgccggggcgcaggcctttgccacgcatgatgcgctcgtcacagcgctggaggaaacctgccgcgcaggagacacgctgctgttcaagggcagccacggcatgcatatggagcaggtgcttgcgcgccttttgaaaacgaaagaacatatgggggaataaaaaatggaacctacgctgatctggatccttgtttcggtgctgggcggctttgtcctggcgctgctgctcggccgggtgctcgtcccggcgctgcgcgcgctgaaggcgggccagtccatccgggaagtcggcccgaagtggcatcagggcaaggcaggcacgccgaccatgggcggcatagtctttattctgtcgtcgcttttgtgcatcgtcaccggctggcatgccatgcgcgagaccggcgactataagcacctgttcgtgctggcgctggcgctgatgttcggcctgatcggctttgccgatgacttcatcaaggtgaagaaaaagcgcaatctcggcctgacgggcctgcagaagctcgttctgcaggtactggctgcctgcctgttcctcgccggcatgcattttacgaatgccctgacgtatgatctctatgtcccgtttgtccgggaaccgctcgtccacatcccgccgctggtctatctggcgctgtccgtgttcatcatcgtcggctgcgtcaacgccgtcaacctgacggacggcatcgacggccttgccacgggcgtgacgcttcccgtgatgctgttcttcacgctcgtgtccatgacggcaaagcagtggggccttgccacgttcccggcgacgcttgtcggcgcgctcggcggcttcctgttctataatttctatcccgccaagacatttatgggagataccggctcgctgtatctcggcggcgcggtgtgcggccttgcctatgcgctcgatatgccgctcgtgctgctgttcgtgggcctcatctacatcattgagacgctgtccgatatcctgcaggtgagctacttcaagctgacgcatggcaagcgcatcttcaagatggccccgatccatcatcattttgaaatgtgcggctggtcggagaaaaagatctgggtggtcttcgtctccgtcaccgtgatcatgtgcgtgatcgcctggttcggcgtgcgcatctggttctgatctgatttctgcacgctatcccgcggagaggaggtgcggccatgtcccacagagaaaagcaactgaaaaagagcgcggtgcgtgttgtggagagcgatctcggcgtcattgacctgccgtacctgctgctgacgctgctgctggtggccatcggtctgctggtgctgttctccgcaagctatgcccgcgcttattacgagacgaaaaacgcggcctcagtcttcgtgaatcagctcatctttgccgtgatgggcatcggtgtgatgtggctcatcagccgcgtgccatatgaatggtatcagaagctgtcgctcctgatcctggctgcgtccatcggactgctggtcctcgtgccgttcatcggcacggagagcggcggcgcgacgcgttggctcgacttcggcttcgtgagcttccagccgtccgagattgcaaaattcggcgtcatctgctcgtttgcggccattatggcggcgcacacgcgggatatgaagacgatccgctacggcgtggcgccctatgtcgtgatcctcggcatcatcgccgtgctgctctacctcgaaccgcacatgtctgcgacgctcatcattctggcactcggctttatcctcatgacgctcggcggtacagactggaagtatttggtcggccttgttattctgggctgcctgctcgttgccgtttatcttctgacgaagggctacaccggcggacgcatcagcgcatggctgcacccggagaacgacccgctcgacaagggcctgcaggtgctgcagtcgcagtatgccatcggctccggcggcctgctgggcctcggcttcggccgcggccgccagaagtatctctacctgccggaggagcataacgactatatcttcgccattgcgtgcgaggagctgggctttgtaggagccatcggcatcctcatcctgttcgctctgctcatcatccgcggctactggattgccatgcatgcgcgcgaccgcttctccatgctgctggccgcaggcctgacgacgcttctggccctgcaggtggtcctgaacgtcgccgttgtgacgaatcttctgccctccacgggcatttcgctgccgttcttctcctatggcggaaccgcgctcatcatgcagctcgccgaaaacggcatcgtgctgaatgtgtcgcgcagcattacccaaagtcccagataagtcaaaggaggcaggcccatgaaggccgtattcacctgcggcggaacgggcggacacatcaatcccgcccttgccgttgcgcgcgtgctgctcgagcgccgtccggacagcgagatcctgtttgtcggcgcagaggacggcatggaggccactctggtcccgcgcgagggcttccggctcgaaacgctgcagatctccagctatatgcgcagcctgaagccgagcgccatccggcataacgtcagggctgcgctctctatccgccgtgcgctgaaaaaggcggaccgcatcatccgcgatttccagccggacgtcatcctcggcacgggcggctatgccagctatccgatgctccacgagggcgcgcgcctcggcatccccacggccgtgcacgagtccaatgccgtgccgggcctcgccacaaaaatggtggccgataaggtcgaccgcatccttgtgagcttcgcggacagccgctcggcctaccgcgacccgtcccgtgttatcgcggtcggtatgcccgtacgggaggagttcgtcttcacccgccgcgccgacgcccgccgcgctctcggcctcgacgagaagacgccgatgatcgtctctgcctggggcagtctcggcgcgcgcgaaatgaacaagaagatcgcgcagttcatgaagctcgaatgcgagcaggactgctggcggcatatccatgcgaccggctcgttcggctggcgctggatgccggactatgtgaaggagcagggagtcgagctggaaaagcacccgctcatcacgatgcaggaatatatctataacatgccggagcttatggcggcggccgatgtggtcatcagccgcgccggagcctcgacactcaacgagatcgccgcagcgggcacgccgtgcatcatcgtcccgtcgccgaatgtgacgaacgatcatcaggagaaaaacgcccgcatcctcgagcagcacggcgcggccgtcgtactgcatgagaaccactgcgacggagagctgctgttccgcacgacgcaggagctgctggccgatgctccgcgccgcgcatccatgcgcaaagcgctgcaggagctggctgtcgtcgattccgcgtcccgcatctgtgatatcattctgaatctggctaaaacacacaaatcctgaccgccgcataggatggggcatcttcccatccggaggtcggtcatggacatattctgcatccgcggcggaacgccgctgcacggtcgcattgcgctgcacggcgcaaaaaatgccgcgctgccgctgctggccgccacgctggcgaccggtgcgcgctgcgagcttctcgattgcccggatatttccgacgtcacggctgcctgcgccattctgcgccaccttggctgcgcggtggagcagcacggcgggatcgttgcagtcgatgccggctccgcatgccggtcagatattccggcagaactcatgcggaaaatgcgcgctgccgtcctgttcctcgggccgctgctcgcgcgcttcggcacggcggagctgagcctgcccggcggctgcgtgctcggcgcgcggccgatcgatctgcacctgcgcggcctgcgccggatgggtgcggagatcacgcttgacggcgagcatatttcggcccggaccgacggccttcacggctgcacggtcgcactgccgcttccaagcgtcggcgcaacggagaatctcatccttgcggcgctcggctgccggggaacactgacgctgtgcaacgccgcgcgtgagccggagatcggagacctgatcgtcttcctgcgcgcctgcggcgcagacatccgcggcgaggggagcctgctgcgcatccgcggcggcgttccgctcaccggcgcatgccacacggtcctgccggaccgcatggaggcggcgacgtatctggccgcggctgccgcaacgcgcggcgacgtgacgctcacgaatgtccggccggagcatctgacggccgttctggccgtgctcgagcacgcgggctgtacgctcacgcagcaaaacggcatgctccgcctgcggtgcagccgtctgcgggcggcggggccgatccgcaccgcgccgtatgacggctttccaacagatgcgcaggcgcccctgatggccgccatggccgttgcggagggcgtgacggtatttgaagaaaatctgtttgaggaccgcttccgccatgtcccggccctgcgggcgctcggcgcgcacatccatgccgcacggcgctacgccgttgtgacgggcgtgcgggagctgcacggtgcaagcatgacggcaacggacctgcgcggcggggctgcgatggtcatcggagcgctctgcgcccgcggcgagagcgagcttgccgggactgcgcacctgaagcgcggctatgcggagctcgtgccgacgctgcgtgcctgcggcgcggacattacagaacgctgacaagacccacggaggggtggacaccatggaacacgagaaaaacgagccgcggcgcaggccgccggagcgaaattcccgcgcagcacaggctgcgcagcagcgccgtgaccagcggcgcgagcaggcgcatctggaggagctgcgccagaagcagcgtaagcgcgcgcggcaccgcacgcgccgccggatcaatcccggcgtctggaagcgtattctcatcatggcggcggtcgttgctgccgtcgtgctgagcatggtgctgttcttccgcgtgcgctccgtggaggtgacgggctcggcatattatactgccgacgagatccgcgccgcctgcggcgtggctcagggcgacaacctgctcacgctctcccgtgcgcgcatcgccgggaatatcatggcggagctgccctatgtcagcacggtgcaggtcacacgccgcctgccggacacgctggagctgaccgtgacggaatatgacgtcacctatgcggcacagggcgcggacggggcctcctatctcatcacggcggacggcaagatcacggaaaagatcgacgagaccgccgcgcgcggccacatcgccgtgacgggcctgcagctcgccgacccggtcgtcggccagcagctcacagtcgccggggacgatgacgtcgccgcgcagggccagcatgacgcgctgtgcgcgctgctgcaggcgctcgaggaggctggccttacgaagaaggctgcgtccgtcgccgtgccgagctcctatgagctctcgttctggtacggcgatcagtacgaggtcaagctgggaaattccgagaatctcccctataagctggcctatcttgaaaaggtgctcgaaagcctcgcggattaccagaccggcacgatcgatctgtcgttcagcgagggaagcgaggccagattcaccccgaagcagtgaaaacgatacggaaaatgtaaattattttctgaaatccgagaaagtctattgacctgcggaccattccacgataaaataaaacggtataaatctgcatatattatgtacggcgcgccgcgcccgaacagtggatacataggaggagattgtcaatgtctgaaacttacacagataaggtcgtaaatatcaaagtgatcggtgtcggcggcgccggcaacaacgttgtcaaccggatgatcaccagcggcatcggcggagtcgaattcgtcgttgtgaacacggatcgtcaggatctcaataagtccaagtgcgataacaagctgcagatcggtgagaagctgacgggcggcatgggcgcaggctccaagcccgacatcggcaagaagtccgccgaggagagccgcgcggccatctccaagtgccttgagggcgcagacatggtcttcatcaccgccggtatgggcggtggcaccggcacgggcgcagccccgatcattgcggatctcgcacatgaggccggcatcctgaccgtcggtgtcgtgacgaagcccttcaagttcgagggtgcaaaccgcatgaagcaggcagaggccggaatcgccgccctgtccgataaggtcgactccctcatcatcatcccgaacgaccgtctgaagtacgttacggatcagaagatcacgttcgccaacgcattcggcatcgcagacgatgtgctgaagcaggccgtgacctccatctccgagctcgtcggctactccgaccgcgtcatcatcaacctcgactttgcggacgtttcctccatcatgaagaacgctggccgcgcacacatgggcgtcggcatcgcctccggccgcgagaaggctgagcaggccgccatggccgccgtcgccagccccctgctggagacctccatcaacggtgcaacgggcgtcctgatcaacgtgacgggcgctgcggacctcggcctcgacgacgtcgagactgccgcgaacatcgttatggaagctgcgaaccccgaggcgaacatcatcttcggtgcgacgttctccgaggacttcgaggacgagatgcgcgtgacggtcatcgcaaccggttttgacgagaagaagccggagtccaagggaatctattcctcctcgaagcctgccgcgggcagcaagcagcagagcattcccgcagatgccgcttcggacatcaacgatatcgacgagatcttcaagatcttcaacaagtaaaaaacgctctgatctcccccggcgcaaagcaccgggggagatttctgcgtaatttgccgtaaatatccgcagaatgcggtttactttcacaatatagtgtgttaaaataaagatatccaaatatccggaggtgttatcccatggacagcaggaacaaacgctcagataaaaacagcgagctgtatcgcgcgatcaccgcgctggattcgctcgatgactgctatgattttctcgtcgacctgtgcacacagccggagctgaaggccatggagcagcgctatgaggtcgcccgcatgctcgatcgcggcatgatctacagcgacatcctcgccgagacgagcgccagctccgcaaccatcagccgcgtgaaccgctgtctgacgggcggtacgggcggctatgagcgcgcttttgcaaaagtcgatgcggaggaaaagaaatgagccccgaagcaagggaaccctatgaaacgctcgcgggcgcgtatgacgggctgacgaccgatgtggactatgccgccgtgctgcagtttttcgagaccgtcctgcagcgcgcggggcattcgccaaagaccgtgctggaccttgcctgcggcaccggctctatgtccgtgctgttggcggagcgcggctatcgcgtcaccggtgcggatatttccgaggaaatgctgacggccgctgcacagaaggctgcagccatggcggaaaacccgccgttcttcatttgccagcccatgcagcgcctgaccctgccggagcctgtggaggccattgtgtgcctcctggacagtctgaactatctgacggagccggaggattgccgcaagacatttcaccgcgtctggcgcgcgctgcggcccggcggcatgttctttttcgacatcaacacgccacaaaagctgcgcgggctggacgggcaggtcttcctcgatgagaataacgagtcctactgcgtctggcgagcggaatttgacgaagaagagaactgctgctactatggcatcgatctgttccgccgcaggggtgcactgtgggcgcgcagctttgagcagcactgtgaatatgcctatgacccggacacgctggagcagtggctccgcgaggcgggctttgcgcgtgtagagtgcttcggcgaccgcacgctgacgccgcccggtccggacgagcagcgcatgtattttgccgcatggaaggagtaactgcaatgcaggatcatattgttcgcgccatcacgaaggatggctttctgaaggcgacggccatctgctccacggggatcgcggagcgcgcccgccagatccaccacaccacgcccacggccacagccgcgctcggccgcgttctgacggctgcctcgatgatgggcaacatgcagaaggtcgaaaacggcacgctgacgctgcagatcaagggcggcggcccgcttgggacgctgctggccgtttcggatgccgagggcaatgtccgcggctatgtgcagaatcccggcatcacgctgctggagaagtatgcgggcaagctggatgtcggcgctgccgtcggcacggacggcatgctcacggtcatccgcgacctgcagatgaaggaaccctatgtcggctccgtcgcgctcgtctccggcgagatcggcgatgatgtgacggcatactttgcccagagcgagcagacgccgacggcctgtgcgctcggtgtgctcgtcggccgcgaccagacggtcagcgtggcgggcggctatctcatccagctgctgccggatgcgccggacgccctcatcgaccggctcgaggccggtatccgcgccgcaggcgccgtgacgcccatgctctctgaggggctgacgccggaggccatgctgcgccgcgtgctggacggcttcgagctggagttcctcgagaatacgccggtgagctatcgctgctactgctcgcgcgagcgcgtgacctcgacgctcattgccatcggccgcaaagacctcgaggagatcgtcgcggaaggaaaacccatcaatctcgagtgccagttctgtgatcaggtctataccttcacgccggaggagatctcggacctcctgaaagagatttgaagaaacttgaaaaaaatcgaaaaaagtgcttgacaaaatgggggcctgcgtgtataataagacccgtcgctgatgagtgatcgccactcagaaggacgcaggggagcatagctcagctgggagagcacatgccttacaagcatggggtcacaggttcgagccctgttgttcccaccattatctggcccggtggtgcagtcggttagcacgccagcctgtcacgctggaggtcgacggttcgagtccgttccgggtcgccatttttaaagcatctgagccgagttttactcggctcaacatgcctctgtagctcagtaggtagagcagcggactgaaaatccgcgtgtcgttggttcaactccgaccggaggcaccagatgcgggtgtagctcatctggtagagcgccaccttgccaaggtggaggtagcgagttcgagcctcgtcacccgctccattcgttaactgaaggaacgcaccccgcgttccttttttacaagataacttcatatggtgccgtggccaagtggtaaggcaagggtctgcaaaaccctgactccccagttcaaatctgggcggcacctccaaaaaagaaagacacgttgatgcgtgtctttcttttttggtgtcagtgtatcgaaagccctgcagaacgcagtcggaagtgtatggcatcccatcgccccaaagacccaaatggctttcctgacagttgaaaagccgccctcgatgggcggctcagactgtcaaaaaccctgcccagccgaaggtttcggagggaaggaaagtgtgaaaggaaaccgtcagggtgtcctttcacgttcaatcacccgccgcagcggcagaattgcaaaatcatgctgcaagatttgattttgcaattcggaaagcagcttggcgaaaaggcccgaagggactttttttgacaagctgaaaagagccgccctcggtgggcggctctccgtctatagatcggggatcagaactctgcggggttctttgccgcggcctctgtctcggcggcagcggcggccttggacttgcggacggcgtcgcggatgaagaagacggcctccagaatgctgaagacaaaggcgatgccaaggtccttcagaacgctggttcggatttccgcctccgtcagaaaatcgggaacggatgccagagcatcgcggaacgtgacttcataggtatccttgaatacatcgtagatttccttggccaggccgaaatattcggcggcgacgatcatcagcatggtgaacacgacggcgaggatcgcgccgtgcacggtgttcttccggccggaaaacaggccatagccgaagtaaccggcggccatgccgaccagcgcgctgatccacgcaatgtagccgagctgcagcaagccgaaatggaccaggccaccggcggcggagaagagcagcgcgccgagcacgccgagggcgatgttttcgcggcgcttcaccggaagctccgcagggttgacatagggttctgtcatgggaggtacctctctttcttttctgtaagcccattctaccatgccgggcaggagaaagcaagaagtagttattcctccgtcggcacgatggagcagccgtccgtgatgccataggtggcgagcaggcgctttgtgcccttgtccgttaccgggcgaagcaggcgcaggtgctttgcgcccgcggcacgcagcgggcagatcgcctcgcccagaagctgcgccgccagcccgcagccgcggtgctccggcagcagggccagatgcagcagcgcgccctcatcgccgtccaggcggcgcgtggcgaccatcccggcgggggtatcgcgcagcatggcaatgcgaacgcggtcgcccggctccgtctgcgggcagccaagcgcggccagcaggggagcgtcctccggagctacgtcgcgataccacatattgaaatccagatagcggctgccgcgccaccagttctggcggccgagcgtcgaaagctccggcgtcaggtgcgaggcgtcgttcagcgagacgagctcatagctgccgttttcccagtgcagctccgtgacggccgtgttttcactgtggctgacgccttcgtcctgcccggggaagaacagctctatcagcgcgccgcgcaggaccatgccgtgagagaaaatggcgatggactgcccttcgtgacggcggacgacgtcgttcagcccggcaaggaagcggtgtgcatattgcaggaagcactccgcgccctccacataccaatggtaggaatcgtgagagaaggcgtgcagctgcgcgggataacgtcgctccaactcgccaaacggcgtgtcctcccacgggccgaggccgacctcgcggaagcgcgcgtcgcggtggagcggcaggcccttctgccggtagatggccgtcgccgtcaggcaggtgcgcttcagatcgctggcatagaccgcgtcgacggggatgcctgcaaagcgctgcgccagcgccgcgatctggcggcggccattcggcgtcacgcaggaatcatattggccgtggatgcggcggaagacattgccctccgcctccgcgtgccggatcaggtagattgttgtcatagtccgttcctctctgtgcatgggattttccttcagtatagcacagcaattcaaaaatgaaaagtgacagacggtcaaaaaactgccggccaaaagcttcggaggggaagaaaagcaggaatggaaaccgtcagggtctctcttctcgttccatcactcctgcagcggcaaaattgcaaaataatatttcaaaatttcatttttgcaattttgaaagcagcttggcaaaaagctgaagtgtttttttgcgcaggcgcgggtatgctaaccgtgcagaaaagcacgaagggaggaagaacgatgcaggtacgatcctttttgatgacgctcggcctcggcatggccgcaggcggcacggtagcgctgatgctgccgcggcagtccggcgtgcgccgggaggcgcagaaggccgccgatgctgtggagcagaccatcacggatgcggtgcagaaactgaagccctgacggcccgatgctgcggaggacctccgcagcattttttttcgcggcgtgcagcaggacttgcgggaacggaaaaatcatgctataattatggcagaatctctgcaaaaaagacctgcggccaattttaggcagcaggtctgcagcttatcccaaaggtcctttcggactttttcgctaagccgtttgcaaaagtgtaaaatagaattattattttgcatttttttgccgctgcggggagtgatggaacgagaagggagaccctgacggtttccgttcattctttccttcccccgatttccggtcctcaagcatgattgcggcacagagcgtctgtgcctaaataaaatttcagaaaagaaaaggagacgaagatgaagcattcgctgacctccggctcgatctggcgcggcatgctgttttttgccctgcctatcctgctcggaaacattttccaacagctctacaacacagctgacgcctttatcgtcggccgcttcctggataagaacgcctatgctgccgtcagctcctccggcagtctgatcttcctgctcgtcggctttttcaacggcatcgccgtcggcgcgggcgtcgtcatcgcacgctactacggcgcgaaggacaacgagaaactccagacggccgtccatacgacgctggccttcggcctgacggcgggcatcgtgctgacggtgctcggcatgacgctcacgccgcagctgctgcgcctcatgaagacggatgcggatgtgctgccgaactccatcgactatttccggatgtattttgcgggctccatagccatcgtcatgtataacctctgcgtcggcatcctgcaggccgtgggagacagccgccacccgctgtattacctgatcctgtcgtcgcttgtgaacatcgcgctcgacctgctgtttgtcggtgtgttccattggggggtctggtctgccgcactggccacgagtatttcgcagttcgtgagcctcggcctttgcatcttccgcctgtgccactatgacacggtctaccgtgtgtgcctgcgcaaaattcgcttccatctgcctatgctcaagcaggttatccacttcggcctgccctccggcgtgcagaattccatcatcgcctttgcaaacgtcatcgtgcagagcaacatcaacgccttcggctcgaacgccatggcgggctgcggcacctatgccaagctcgagggctttgccttccttcccatcacctgcttcacgatggcgctgacgaccttcgtcagccagaatctcggcgcgcatcagtatgagcgcgtgaagaagggtgtgcgcttcggcatcgtctgctccacaacgctggccgagtgcatcggcgtggtgctattcctgctggcagagccgctcgtggccattttccagaacgaccccgccgtcattgagatcggcgtgcggcaggcccatgtggaggcgctgttcttctgcttcctggcctttgcccactgcatcgcgggcattatgcgcggcgctggcaagccgatggtgccgatgttcatcatgcttgccatctggtgtgtgctgcgcgtggcctatatctccatcgtcgtgccgcttgtggccaaaatcgacgtcatcttcacggcctatccgcttacctggggcgtgagctgtatcattttcctcatctacttccttaaatccgactggctgcataactacgaccggctggagcagaaaaaggcgctgctgtaacacaatttcaaaccggccgtccgggttttccgggcggccggttttaccgagaaaagcccccaccggcgcagccggtgggggtggtttctacaacgaaaaagcagcccttgcgaacaaggactgcttttggagctactggccggactcgaaccggcgacctgctgattacgaatcagctgctctaccaactgagccacagtagcatggcgcgatttgcgtgaattattgtacttcattttgcggaatttgtcaagccatatttttgctatttcagaaaattcaatttctgggccgttcttgtgaaagctgcacagcattgtgtccctgcatgacggattcttcgtcggttttttggattgactttgaataaaaattgatatagaatgtatataaattcaaacgataaagcggacacgctccgccgaaacatgaaggagaatgaaagcatgaaaaaatggatcgtcctgacgctggcccttgcgctggcgctgtctctgtttgcgggctgcggcaagagcgcagacgcagatgaaaccgattatgcatccatgtccatcgaggagctgaagcccctgctgaagacggtcacggacggcaagctgaccgtcgcgaccagtccggacttcgcgccgtatgaattctattccatcgatgagaacgagaatccgacgctggccggcttcgacatcgcgcttgcgcagtacatcgctgattacctcggtctggagcttgagatcatccccatggacttcgacggcacgctcagcgagctcagcgcgaagaaggtcgaccttgcgctctccggttactctcccgatcccacccgtgaggacaagatggacttctcggatatctactatgtcggcggccagtcgtttgtgactgtgcaggacaaggcggattccttctccacgctggccgacgccaacaaggcggagtaccagatcggcgcgcagctcggctccattcaggccgacctcgccaaggagaacacgccggatgctgatatcgtggagctctcgaaggtcacggacatcattgccgagctgctgagcggcaagctggacggtgcgttcatcgagacggtcgtcgccgaggcctatgccaagaactatccggagctgtgtgtcaagttcgacgtcccctatgagcaggagggctccgttgtcggcgtgagcaagggcaacggcgcgctgctggctgccgtaaacctcgccattgccgctgccaaggaggacggctccatggacgagttcgttgccgaggccaacacgctcgccgagggcaatacctacgaaggtctgctggataatcaggggtaagcacgcatctgaaagagtaaggaaatcgcagacttctcccgccggaacggcgagagaagtctgcctgtctgtcaaaataaaaaaggagggacccccgttgctttctgtcaatggcttccgcgccgccctgcgatacctgaccatgttcaaggagggcatgatctgcaccgtctcgctgtcgttcctgacggtcgtgttcggcttcctgctggctctcgttctggcgttgatgcgtatgagccgcatcaagcctctgagcattttcgcgtccatctatgtggaggtgttccgcgcgacgccgatgctcgtgcagctgttcatcatctattatatcgttttcggcggcgtatcgctgccgtcgttcaagctgttcggcttcattcgctttgagcgctttctgccgggcgtcatttcgctggcgctgaactccgctgcctacctcagcgagatcatccgcgccggtatccagagcatcgaccccggccagtcggaggccgcccgcagcctcggcctgacgcgccgccagacgctgcagtccatcgtgctgccgcaggccatcaagaacatcctcccggccatcgccaatgagttcgtgacgatcatcaaggagtcgtccatctgctataccatcggcgtgcaggagatcatgtccgcagtgaactccgtgaagtccgcgacgttctccattggcgagccgctgatcatcgctgcctgcgtgtatttctgcctgacgttcccgacgtcgaagatcatccagtatttcgaaaggagaatgagccgtggcgaccgcagataatgtcatcatctccgtgcagaatctctgcaagtatttcaaaaaggacgccatccgcgcgctggacggcatctccgtcgatatccggcagggcgatgtcatcgcggccatcggcccctccggctccggcaagagcacgttcctgcgcagcctgaacctgctggagacgccgacgagcggatctatcctgttccacggcgtcgatatcacgcaaaagaaggtcaacatcgatcagctgcgccagaagatgggcatggtcttccagcatttcaacctcttcccgcaccggacgatcctgcagaatatgacgctggcgccggaaaaggtgctccgcgtgccgcacgaggccgcgtcggaaaaggctctgcagctgctgcgccgcgtcggcctcgaggaccgtgctgacgcctatcccatccagctctccggcggccagaagcagcgtgtggccatcgtgcgcgcgctcatgatggagccggaggtcatgctgttcgatgagccgacctccgcgctcgaccccgagatggtcggcgaggtgctcgacgttatgaaggagctggcgcacaccggcatgaccatggtcgtcgtcacgcatgagatgggctttgcccgcgaggtcggaaaccgcgtactcttcctcgatcagggcaagctcgtcgaggagggcacgccggagcagatcttcggcgcgccgaaaaacccgcgcctgcaggatttccttgcaaaagtgctttgagtttcaaaaaacgggatcgcctcgtcggcggtcccgttttctgtatcaggtatgctcctgcccggcacggtagacgctcggggagcagccctcgctggcggcaaacacgcgcgagaaatagagcgcatccggatagccgacggaccacgcgatctcggagatatgcatcgtcgtgccgcgcagcagggtgcgcgccgttttcagccggatctcccgcagcagggcggtgggggagcggccgaagcgctgcatgaagccgcggtagagccagctgcggctcaccccggcaaaggcggcgatgtcgtcgatggtgatgggctcggcgtagttgttctcgatataggccgccgcgcggtcgatgacgtctccgcggtcctctgggccttcccgtccctcgatgagcttgccgagcagcaggtaggcatagcctagcatctgcgtccggctccacgcggactggccgcgcgcctcgtagatcgccgtgatgtagcgctggaacgtccgcccgaagtcgatgtgcagcacgggcgcgtccgggcgcaggtccgtgcgcgccagcagggcggcggcatccggcccgctgaagccgagccagtagtattcccacggcgattccgtgtcggcctcgtagctcaccacgacgttcggccagacgagaaagacctcacccgcgcgcacggggaaggcccgcccggccgccgtgaacgtcccgcggccggagacaacgtagtggatgagatagtgatcccgcacgcccgcgccccagcggtagccgggtgtgcattgctgaaacccgacgttttttaccgacagcggcagagcggcgccgtcggatttataggaattcttgaagtaaactgccatgatacccgcctcccgtaccagaataccacaaaaggcaacaaatttccatatcagcgcttgaaaattccattgcatccgcaacatatttccctaaaataaagatatcggtaataaaaagcgaataaaaagaaatcacagaaaggtgcgtcattccgatgtacgaatctctcaagaagcgatttacagatcagtttggcacgaagcccggcttcgtattctccgcacccggccgcacggagatcggcggcaaccacacggaccatcagcatggctgcgtgctggcgggcgccgtgaacctcgacaccgtggcggccgtcgcccgcagcgagcgcggcgcgatccgcgtgctgtccgagggctatcccctctgtgaggtctccctgtcagagctggaggccgtccccgccgaggcgggcacgacgaaggccctcatccgcggtattgccgcgcggttcgccgcgctgggccatgcgcccgtggcctttgacgcctatgtgacctccacggtgctgccgggcagcggcctgtcgtcctcggcggcgttcgaggtcctcatcggcgtgatcctgaaccatctcggcagctgcggactgacggctccggagatcgcgcaggtcggccagtatgccgaaaacgtctacttcggaaaaccctgcggcctgatggaccagacggcgtccgccgtcggcaacatcatcggcatcgattttgcggatccggcccatccgaagatccagcccgtcgcctttgacttcgcctcctgcggctacagcctgtgcatcatcgactccggcgcgagccacagcgacctgacggactgctatgccgccatcacggaggagctgaagaccgtgtgccgcgtgttcggcaaggcggtcctgcgcgatgtgccggaggatgagttctatgcccgcctcggcgaggtgcggcaggcggcaggggaccgcgccgtgctgcgcgcgatccatgtctatgaggacaacaagcgcgttcgtctgcagctgcgtgcactcgaaaacgacaatttcgccgccttccttgagtacgtcaaggaatccggcgattcgtcgtggatgtatctgcagaatgtgatccccgagggccgcacggcccgtcaagaggtcgcgtttgcgctggcgctggccaagcacctgctgggcggccatggtgcatgccgcgtgcacggcggcggttttgcgggcaccattcaggccttcgtgccgaatgagcagctcgaggaattccgcggcggcatcgaggccgtcctgggcgagggcagctgccatgtgctgtccatccgcccggagggcggcattctggcggaggtgtgcagccatgattgacgcctgcatcgccggggtgctccactatgcggaggataccggccttatcgaggcggacgaccgcctctgggcgcgcaaccgcctgcttgaggccctgcagctcgacggctgcgaccctgactgcgccccggcagagctgccgctggcggacctgctccgcgaactgacggaggacgccgtttcccgcggcgttgcacaggataattccgtggcgcgcgacctgtttgatacgaagctgatgggcgtgctgacacctgctccgcatgaggtgcgggctaaattccgcagcctgtatgccgtctcaccggagcgggcgacggactggttctacgccttcagccagaacacgaattatatccgccgcgaccgcatcgcgcgcgatcagaagtgggtctacgagagcgcctacggtccgctggacatcacgatcaacctctccaagccggagaaggacccgcgcgccattgcggcggccaagctcgcgctgcagtccggctatcccaagtgcgctctctgcgccgaaaacgagggctatgccggacggatgaaccacccggcccgccaaaaccaccgcgtcattcccgtgacgatcaacggcagcggctggtatctgcagtattcgccgtatgtctattataacgagcactgcatcgtcttcaacggcacgcatacgccgatgaagatcgaccgcgcggccttccgcaagctgctggacttcgtcggccagttcccgcactactttgtcggctcgaacgccgacctgcccatcgtcggcggctccatcctgagccacgaccatttccagggcgggcactacacgttcgccatggagcgtgcgcccgtggaggagcctgtccgcttccgcggctttgacgatatccgcgcaggcatcgtcaagtggccgatgtccgttctgcgcctgaccggcccggacagtgaccgccttgtggagctggcggaccgcatcctgcgcgcatggcgcggctacacggacgagagcgccttcgtctttgccgagacggacggcgagccgcacaacaccatcacacccattgcccgccgccgcggcgcggactatgagctggacctcgtcctgcgcaataacatcacaacgccggagcatccgctcggcgtgttccacccgcatgcggccctgcaccatatcaaaaaagagaacatcggcctcatcgaggtcatgggccttgccgttctgcctgcccgcctgaagggtgagctggccgcactggagcaggccatcctgtccggcgcggacatccgcgcagacgagaccctcggcaagcatgctgactgggtcgaagagctgaaaacgcgttacacgttcacaccggaaaacacggcggacattctgcgccgggaggtcggcgcagtgtttgcgcaggtgctggaagacgcgggcgtcttcaaacgaaatgaagccgggcgggcggcattccgccgcttcctcggcactgcagatcaggagggatcgttatgaaaattctggtaaccggcggcgcgggcttcatcggcagccacacctgcgtcgagctgcttgaggcgggccacgacgtcgtcattctggacgacctgtccaatgcgtccggtacggtcatcgacaagatcgagaccatcacgggcaagcgccccgcgttctatcaggcggatgcgaaggaccgcgccgtcctgcatgagatcttcacggcgcaccgcatcgatgccgtcgtgcattttgcgggcttcaaggcggtcggcgagagctgccatatcccgctggcctattaccgcaacaatctggattccacgctggccctgctcgaggaaatggcgcaggcgggctgcacgcgcttcgtgttctcgtcctccgcgacggtctatggcccggacaacgccatcccctatgtcgagacgatgcccacctatgtcgcaacgaacccctacggctggacgaaggtcatgatcgagcagatcctgcgcgactactgcaccgcaacgccgggcttcacggccgtgctgctgcgctacttcaaccccatcggcggccatccctcaggcctgctcggcgacgatccgaacggcattccgaacaatctcatgccctatatcgcccgcgtggcggccggtcagctggacaagctgacgatcttcggcgacgactatcccacaccggacggcacctgccgccgcgactatctgcatgtcgtcgatctggccaagggccatctcaaggccatcgactatgccatggagcacacgggcgcggaggccttcaatctgggcaccggccacgccgtgagcgtgctggagctggtcaacacgtttatggaggccacgggcgtaaatgtgccctatgtcatcgggccgcgccgcgagggtgatctgcctcagatgtgggcggatacgcacaaagcggagaccgtcctcggttggaaggccgagaagaccgtggccgatatgtgccgcgacagctggaacttcgtctgcagcgtgaagaagcagtaatgtccggtcaggaatcggaataacaaaacagccgtctcattacgagatggctgtttttgctgtctgcatctcgtcgatcccggcggcgcagtcgtgcgggatcggcttccagtccacatgggagaacagcgcgatgaccgtgctgatgcggccgatgacgtcgaacagcgggaacgtcacggcaaaccagagcttccggtaccacggcagggcgggcatatgctgccgctccgtcaggaagacatagagtgcgatgaccgcattccgcagccagcgcttcccgaagccggcggcccatgccagcagcgccgcgccgaccacgccgaagctctcctttgtgaacagccacagtgcaagggcgcacagcagccgggcagcgtaggtgaagatgctccacagcgcgcgggggcagacgagcaggaacatgtcgtaggacatgaaagccgtcggggcgtcgtgcgacgtgaacacatgcttccacagcggccagcccgtctcggcaaaggcctgcaggtggcccttggcccagcggatgcgctggcgcagggcgatgcgcagggagacgggctgctcgtcatagaacacggctgcatcgcagtaggagatgggatagcctgcagcgacggcgtcggccgtaaaggcgcggtcctccgtcagcgaggtgtagtgccagccgtttttgaccagctcagaggcgaacaggaagcccgtgccctgaatgcgcgtggccagtccgaacacggagcgcgcgcggtgttccatgcgcacggtgcgcagccagtgcagggcataggatgcggagatccagttgtcgccgaaatttttgctggcgcggcaggacgttacgatgcgctcgcctgcgtcaaaggcctcattcatgcgcgagacatagtcgcggttgagcaggttgtctgcgtcaaatacaaaatagccctcaaaggcatccgttccgtagtcccgcgcgatgcaggaaaacagatattccagcgcgtagccctttgtgcggtggtccgggtcgcagcgctcatagcagaccgcgccgccgctgcgcgccgcctgcgccgtcccgtccgtgcagttgtcggccacgacaaagaccgtgagcagctccgacgggtagtcctgcaggcggatgctctcgagcagacggccgatgacggcctcttcgttgcgggctgcaatgacgatggcatagcggtgctgccgccgtgcgggtgcaaagcgccgtgtggcgaacagaccgacgatggcgtagacggtataatagcagctcatcgcgccgagcagggcgccgatggcggcaaaaattttgggcagcagatgcagcataggcggcacttcctccttcgaactcaaaatgcacgcctgattatagcacagaaggtcgaaaaaggaaatgccgcccggattaagattttatgaacgttagatgtgttgacgcagtgccgcaagagcctttttctcgatgcgggagatctgcacctgcgaaacgccgagaattttggccgttttgtcctgcgtcaggccgtgaaaatagcgcaggcggatgaccatctgctcgcggtcggtgagctgggcgatcgcctcgcgcagcgcaatgcgttccaatattttctcctccatttctccctcggtcaggacgtcctccagcgcaaagccgtcctcgccggagcgccgctgcagggactccgtcgcgcaggtggctgtctcggctacggcgatgtcctccggctgcagggccgtggcctcgctcagctctgccagcgttggctcgcggccgagcgtgccggtcagccgctgacgcgcggtgcggatgagggcggcgcgttccttcaggctgcggctgaccttgatggtgccgtcgtcccgcagaaagcggcggatctcgcccgcgatcttcggcacggcataggtggaaaactgcgtgccgtagctcaggtcgaacccggccacggccttgagaaagccgaggcagccgagctgatacaggtcgtccgggtcgacgccgcgcccgaaaaatcgccgcgcgacggaccaaacgaggccggaattcgcctgaatcagcgcctctcccgcctcgcggtctccgtcgcgggcgcggatgagcagctcctcctgattcatttttttccaccccggcgtacaatccggcgcttcatatggacggtcgtacccttgccgggcacggagctgatgcggaactcggtcataaagctttccatgatggtaatgcccatgccggagcgctcctctccaccggtcgtgaacatgggacggcaggcctgctcaaggtccgcgatgccgcagccgcggtccttgaccataatgtccagcacattgtccggcagcagccgtgcccgcaggatgaccggcccgatcgtctcggggtaggcgtggacgatgcagttcgtcacggcctcggacacggccgtcttgatgtcgcccagctcgtcgagcgtcgggtcgagctgcgcggcaaagcaggcaatggcagagcgcgcaaaggcctcattggccgagcggctgggaaattccagattcatgtagttttcgctcttcatcggttgcattcctccctgatctccgtgattttttcgatgcccgccgcgcgcagcaccttatagggctggggcgggatgttctgcagcagcaggcggccctgcagcgtgttcatgcggcgcagcgtatggatgaccacggcgatcccgctggaatccatgaatgtcacatcgcggaagtccagaatgcagcgaaggggaaggtagagatcgatcttggctgacagcgcctgcatgatttcccgggcggcatggtggtcgatctcgccccgcagagcgatcgtcagctgcctgtcctgcacatagctcgtcagattcattggtatggttcgcctccagcaaaaaaaataacgcacacggaacccgtgtgcgtttagtataaagcactgcccgcgcgccgtttgtcgaagcggatgcgcgggcggtaattttatcaggaaacaaaccagtagttgcgtgccgtgtgtacggcctgcagggagtcgtcccggtaatttggctcgagaccctcgaccagcaggtcgacggtctcgacctccggcagggcgctcagcgaagcgacgatctcgcgcacggccatgcgctcctgctcggccgtgcggcagccttcgagaaattcggctgttaggtcgagcgtgcatacgccgcctgccagcttgagggacagaattttcgtgccctgcgggatggagttttccagcccgttttcgccctcgagcgccagcagggcctccagcacacactgcacgctgctggtgccctcggcgagcgtgagctgcatcggcacctgcgccagcagcggcatcgtgtcgcaggtcaggctgagcgtgacgtccagcgttccgtccagtgcaggcacatagatcatgcgctcgtcgcgtgcaaggccgttctccagctccagcacatacagccgctccaagggtgcgcccgcgatccagagatccacggtctggatctgcggcagctctgtcagagaattcacaatggcgtagacggccagccgctccgtgttccagctgcgcggcatccccgtcaggaactgcgaggagagatcgacggtgcaaacgccgttttctacactgacgctgcgcagtgccgtgccctcgggaatggcgctctcgctttccggcagggccagcaggcggcgcacgatctccgcgggccggtcggccgcattcatggcggcgacggtctgcgtttcgcgcacgaggtagcgctgcgcctcgtccggcacatagagcacgagctcttcctcctgctcctccatgccgttgtcacgcagcaggatatccttggcggccagcacatcggccgcgccgtcgccgctgcacagaatgctcacgcgctgcacgccgggcagctgcaggagcgtccgggcaaggcaggcgttgaggatggtgcggtcgaggctccggcacggcatgccggaaaagaccagctccgccgtgccctcggtcagtccaatggactccagcgcccagtctgcgggcaggggagtgcgcagctccggcgaggcgggccccttcaggtattgcagcacgacggtgcgcagatcgacgtctgcctcgagcggcgcggcctcggcgcggatcacgccgtcctcgccgccgaaggcgacctcagcacagcggtagtagaaggaaaacggggcgtccgcctgctctgcgggcgcggtggtgcaggcgcacagcagcacaagcgggagcagcaaaagcagcaggcgtctcatgtttcgtcctcctccagatcaaaatgcgggaaccgcacggtgaagatcgtgccgccgcccggccgggcctgcacggcgatggtgccgtagctgcgctcgaccatgtcgtgcacgatggaaaggcccagcccggcgccgcccgcggcgcgggagcgtgccttgtccacgcggtaaaaacgctcgaaaatatgctccatggactccggcgggatgcctgcaccgctgtcctcgacgcgcagctccacctgatcgtccgcccggcggacagacacgccgacccagccgtcctgccggttgtatttgatagcgttttccgttagattgaatacgatctgatacagatcgtcctccacagtcatgacgctgcagtccggctcgaacgttgtgtcgatgccgatgccgcgcagccgcgccagcggcagcagcatgcgcacgaccttgcgcacgacgggcgcggcatcgaggatctcgcgctcctcttccacgctgctgtcgagcttcgtgagcgtcagaagcttctgcgtcaggcggccgagacggtctgcctcgcggccgatgtcgccgatgaactcacgctgcgtctcggggtccatctcgttttgcaggatggagtcggacagcagcttgatggaggccagcggcgttttcagctcgtgggaggcgtcggagacgaactgccgccgccgagcctcggagctttccagtcttgcggccagctcgttgaaggcccggctcaggcgctcgacctcgtcgtgcccgcggacgggcggctgctgggaatagtcgccctcgcgcatgcggccgacctgattcagaatggcgcgcatgcgccgcgagaatgcggccgagaagaacagggagaacagcacgacgccgccctccagcgcaaacgaaatgcgcagaatgttgcgctccagcgcggcgatcagctcgccctgatccgtgtcatacgacatgaggtatacggcgcccagcgtccgtccgccgcgtatgagcggaacggcggcgtggctttctacggcgccgtcggcatagcgggcgaaaaagacgtcgctgccctccagcgccgtgataagctccggaaacagcagcgtctttccctcggcattgccggtggtcagagaatcgtatacggcaacgcccgcagcgtcggtcacgacggtgcgggtggtgtgcagctcctccatggaatttacggcctgcgcggcccggcctgcggaaagctcgtcgagctgcagcagggcattgctcaggagctgcgccttgctctcgagcgaatcggcctgcgcgtggaacgtcatgctgcggatggtcgtcgaggcatagagattcagcaggaacagggcggccgccgtgatgaggatgtaggcggcggcatagcggagctgcgagctggcaggcagaaagctgcggtgtttacgctttgaaatagtacccaactccccactttgtcatgatgtattccggttcggccggaacggtctccagtttttcccggatgcggcggatgtggacgtccaccgtgcggatatcgctgcggtactcatagctccagatgaggtcaagcagattttcgcgggaatagacgcggttcgggttgcggatgagcagctcgacgaggtcaaattcacgtgccgtcagctcgacgggcttgccgtccttatagacgttgcgctcctgtgtgtcgacggtcaggctgcctgccgtgatacggttgttctggttctccagcccgccgctgcggcgcagcagggcgcgaatgcgcgccttcagttccagaatgttgaagggctttgtcagataatcgtccgcgccgtgctcaaagccgagcagcttgtccatgtcctccgtgcgggcggtgagcatgataatggggacgtccgaaaattcccggatggtgcggcaggcggtcagcccgtcgacctccggcatcatgacgtccagcacaatgagccggatttccggatcgcgcgccagctcgatggcctcgcgtccgttgcttccggtgacgacctgatagccgtcgttctgcaggttgaagcgaatgcccttgaccagcagctcttcatcatctacgaccagtattttcatggttcttcctccaccgtgaccagttcgcggagcttttccagcttgccctcgccgatgccctcgaccgcaatgagctcttctacgctctgaaaggaaccgtgcgcctcgcggtagtccacgatgcgctgcgccagcacctcgccaatgccgggaagcgttgtcagctcctgcaccgtggcgcggttgagatcgagcggacccggctccgtgggcggctgcgtcgcggcctccgtcggcgctgccgtcgatttctctgtcggagcggaagccgccgggacggacggcagggcagactccgtctgtgcggggacggtgcgcgccgtgcgcaccgtaacgccgtccgtatgctgtgtccagcgcgccacgccaaagcccagacagaaggcaagaaagacggccgccagggtgatgacccagttccaacgcggtttctgctccattttcgctctgctccgttgacataatccggatttttgttataatgtgtctgtcggaccggcacgcggtgtcccacgcggcctgcccatactcattatatcacacagttccgccctgcggcaatgccgccgcggcgtttttggaggagaatatgaaaaaaagacttttgtccgggctgaccctgctggccctgctgctgcagtgcctgctgcttccggcctttgcggagccgacagacgcaccggccgatcctacggagccgtccgcctcggagactgtggctgatgctacggagccggatgcctcggagccgggtgcgaccgacgccgcagagccgacggcggagaccgcggctcctgctgaaaacgacaaggcacccgccgccgtgacggatgagatgccgcccgcgctgaacgattttggacagtatctcgataccacggtgcaggccaaggcggcggcgcttgtggagctgaacagcgatacgctcgtctatggcatgaatctggacgaaaagctctatcccgccagcctgacgaagatcatgacgtgcatgctggcgctggagcacggcaatctcgacgatatcgtgacggtcagccacgaagcgctgcaggacctgaacgcagcgggcagctccgccggtctgctcgagggcgagcagctgtctctgcgcgagctgctgtactgcgtgatgatctcgtcggcaaacgaggcctgcaacgttgtggcggagtacatcgcaggggatatcccatctttcgtggcgctcatgaacgcgcaggcggcggccctcggcatgacaggcacgcattttgccaatgcccacggcctgcatgacgagaatcactacaccaccgtgcgcgacctcgttacgctggcgcgctgggcctggcagagtgagcagtttcaggaattctccacgcagacatcccacacggtgcctgcgacgaacaagtccgaggagcgcgtgctccacacgacgaactatctgacgagcggtcagaccgtcggaaagtattactacgacaaggcgcgcggcatcaagaccggcttcacgacgcctgcgggcggctgcctcatctccacggcggagagcggttcgctgcatttcctcagcgtcgtctgcggctgcgagacgctgcagaacgacgacggcacggagacggaccagcgctttacggagacgaagcggctgttcgaatacggcttcaatcatttgaacagtgtgcaggtgctggcggacacggcccttgtggacatgccgcaggtgctgtatgccgacggccgcgacagcgtcgtcgtgcgcgcaaaggacaatatctccgtcctgctgccggacagctgcgacacctccggcattacgctgaccgtgcagtatgactccgaggctccgctcgaggccccgcttgaggccgagacgaaggtcggcaccgtcagtgccgtgctggacggcaaggtgcttgcgacctgcgacctcgtgacgctgacggccgtggcgcgctccacgccgaaatacgtcgccaagcagaccgaaagcgtgctggcgaagatctggaagggcatgtggcggctgtggttcgtgaccgtgccggtgctgctggcgctggtgttctggctcatcgttgccatcctgcgctccgtcaatcgccgccgcgcgaagaagcgcgccatgcgcgcgcgccgtccgggagcccgtcagggcagggaggaccgccgtggatgagctcaatgtcctgcgcatgtcctgcgagggctgcacgggctgcggcctagccgccacgcgccacagtgtcgtgttcggcgtcggaccatgcccctcgcccgtcgtcttcatcggggaaggccccggccagcaggaggacctgcgcggcgagccattcgtcggcccggccgggcagctgctcgacgacatgctgtccatcatcgacctcgggcggcacaactgctatatctgcaatatcgtcaaatgccgcccgcccggaaaccgcgacccgcagccgcaggagcaggacgcctgcttcggctggctcgagcggcagctccggctgctgcagccgagcatcatcgtctgcctcgggcgcattgcggccatgcggctcatccggccggatttccgcatcacgcgggagcatggccagtggttcgagcggaacggcgtgcgctatcttgctatgtatcatccctctgctctgctgcgggacccggcgcgccgcccggagacatacacggacctgctgacgctgcgcgaggccgtgcggacgctcggtccgctgccaaatgcctgaatctgcaccgccccgccggattttttttcgcggcggggcgctcttttttgcggaaaacggttgtaatttttgtaataatttgttaccatagagaaaaagatgaagggaactgcctatgaaactgatctcgtggaacgtcaacggcatccgcgcctgcctgcagaagggctttgaggacgcctttcatacgctgaacgccgatttcttctgcctgcaggagacgaaggcgcagccgcttcaggtcgagctggatctgccgggctaccggcagtactggtattccgcggagaaaaagggctactccggcacggcgatctttgcccggtacgagccgctcgccgtgacctacggcgtcggcgtggaggagctggaccacgaggggcggctcatcacgctggagtatccgaactgctttatcgcaacgtgctacacgcccaacgcgcaggacggattaaagcgccttgaccaccgcatggcctgggacgatgcgttccgcgcctatctcgtctcgctcgaccggcagaagccggtgatcgtctgcggcgacctgaatgtggcgcatcaggagatcgatctgaagaaccccggcccgaaccgcggcaacgcgggcttctcggacgaggagcgcggcaagttcaccgagctgctgcaggccgggttcacggatacgttccgctaccgcaatcccgacctcacgggcgcgtattcgtggtggagctaccgcttccatgcgcgggagaagaacgcgggctggcgcattgactattttctggtgtccgaccgcctgcgcgagtccgttgcggccgcgcccatttatcaggaaatttacggctccgaccactgtccggtcggcctggagctggatatggaggtatctgcatgaaaaagcaacgcatcattcgctggctcagcgcgcttctgtgcttgtgcctgctggcagggtttgcccctgcagccatggcctattcgaatgtcagtgactgggcaaagtccgaggtcgcggagatggaggcgctcggcctgctgccggactgcctgctgaacgccgacctttccgccaatattacgcgcggcgagatgtgcaaaatggccgtcgaggtctatgagaacctgatgaacgtggaggcatcctgcgccagtggggccaggtatttcacggacacgcaggagatggagatcaacttcgcctttgagcagggcatcatcaacggctacgaggaccagacgttccgcccgaatgagccgctgagccgtcaggacttcttcaagatcacctacaacctgatgacgcgcgcgctgttctggaaggacgagagcgtcgagccgtccgacctttcccagtttacggacgcagcctccgtcagcgactatgcgctcgagccgacgcagtatatggtcgcgctcggcgtggtgcgcggcaccggcacggcccttgagccgaagggcacgacggagcggcaggcggccatcgccatgttccgccgcgcgtattacattgtcagcgagtggctgcgcaaaaatgatgatatgccggtcgatccggacccggatgacgacggcggctacagcggcatcccggcgtgggccgttgcagagttctctgaggtcgtgaagctcggcatcatcccctcgagtctcgacaatgccgacctgagcaagcccatctcccgcgcccagatgtgctccatcgccatgctggcctataacggcctgatgggcacggaatatacgccgtccggcacgacgcacttcacggacacgaacgatccggacgtgaacgcggcctatgagctcaagatcgtgcagggctacggtgacggccgcttcggcccgaacgatacgctgacgcgcgaacagttctttaaaatttcgtgcaacttcatgcagactgtcggctatccgacggagcagaatccgcgcgtgaaccgctattccctcagcgaattctccgacctgaagcagcttgccgagtgggcgaaaacgccgacgcgcctgctgtgctacatcggcgcggtcaagggcagcgacggcaagcttctgccgcagtcgtccaccagcagcctggaggcgcttgtgatcttcctgcgctgctataagttcaccacatcgtgggacggcacgatcgagcagccctcgctggcggacgatctggtggcctatgccctgacgttcgagggctatgactatgtctacggcggcacaacgcccgcaggcttcgactgctccggcttcgtgcagtatgtctaccgccacttcggcttcaacatcacgcgcacggcgatgtcgcagtattataacgacggcgagcatgtcagccgcagcgagctgatgccgggcgacctcgtgttcttcggctccggcggtgagatcacgcatgtcggcatttacatcggcggcggacgtttcatccacgcggccaatccgcgcaagggcgtcatcatcagctccttgagcgagagctattacaacgcccgctacttcggcgcgaaccgcatcatttttgaatgaaccatacgatcaaacatataaagcaggcgtgtcatgtttggcacgcctgctttttacggtggcataatagcatgggaaagatcgtattgtgcgaaactgcatagataatgactgttatattgcgcaattttggagaaaatattttcatctgtacctcttgacaaaattcaaaatggtggtatcatggggtcaaaagaggttagcactcaacaagagagagtgctaaagaagctctggcgaatgcgtcggatgcttcttgaaacccctcggcggaattcgccgccggagaggagaatgaggttatgaacacgaatcagtatacgcagaaaacactggaggccctgcagagtgcgcagacgatcgcagcggcgcatcagaatcagcagatcgagcaggcccacctgcttctggctctgctgcagcaggacggcgggctcatcccgcagctgctgaagaaaatgggcgtgagtgtcgagagtctgacggctgcggcgcaggcggctgtggaaaagctgccgggcgtcagcggttccggccgggatgccgacaaattctatatttcccgcggcatggacagcctgatggctgaggccgagcgcacggcgcagggcatgcgggacgaatacgtctccgtggagcacctgttccttgccatgctcgacacggccgacgagaccgtcgcgccgctgtttgcggactatcgcatccgcaaggaggactgcctgaagaccctgcaggccatccgcggcagcagccgcgtgacgacggacagcccggaggacacctatgaggcgctgcagaaatacggcaccgatctggtgaagaacgcccgcgaaaagaagacggacccggtcatcggccgtgacgacgagatccgaaacgtcatccgcatcctgtcgcgcaagtcgaagaacaaccccgtgctcatcggcgagccgggcgtcggcaagacggccatcgccgaaggactggcgcagcggatcgtccgcggcgacgtgccgaagtccctgcaggacaagacgatcttctcgctggacatgggcgcgctcatcgcgggcgcaaagtaccgcggcgaatttgaggagcgcctgaaggccgtcctgaacgaagtgaagaactccgaggggcgcatcatcctgttcatcgatgagctgcacaccatcgtcggcgcaggcaagaccgagggcagcatggacgcgggcaacctgctcaagccgatgctggcgcgcggcgagctgcactgcatcggcgcaacgacgcttgatgaataccgcaagtatatcgaaaaggaccccgcgctggagcgccgtttccagaccgtgctcgtcaaggagccgtccgtcgaggacaccatcgccatcctgcgtggcctggaggagcgctacgaggtcttccacggcgtgaagatcacggaccccgccatcattgcggcagccacgctgtccgaccgctatatcacggaccgcttcctgccggacaaggccattgaccttatcgacgaggcctgtgccatgatccgcacagagatggattccatgccgacggagctggacgttatccgccgcaagatcatccagatggagatcgaagaggctgcgctgaagaacgagaccgacgagctctcgcagggccgtctgacggagctgcgaaaggagctggccgagcagcgcgataagttcaacgccatgaaggcccagtgggaaaacgagaagaatgccatcggcaaggtccagcagctgcgtgagcagatcgaaaagctcggtgcgcagatcgagcaggcagagcagagctatgacctcgagacggccgcccgtctgaagtacggcgagctgcccgagctcaagaagcagctggcgcaggaagaggcgctggcgcagaacgccaagcagagcaacctcctgcgcgacaaggtcacggaggaggagatcgcaaagatcgtcgagcgctggaccggcatcccggtcgcaaagctcgtcgagggcgagcgcgaaaagctcctgcatctggacgagcagctgcataagcgcgtcgtcgggcaggatgaagccgtccgctccgtctcggaggccatcctccgcagccgcgccggcattcaggacccgaaccgcccgctcggctcgttcctgttcctcggcccgacgggcgtcggcaagaccgagctcgccaaggcgctggcagaggcgctgtttgacgatgagaagaacctcgtccgcatcgatatgtccgagtacatggagaagttctccgtgacgcgcctgatcggcgcgcctcccggatacgtcggctatgacgagggcggccagctcaccgaggccgtgcgccgcaagccgtacagcgtcgtgctgttcgacgaggtcgaaaaggcccatcccgacgtcttcaacatcctgctgcaggtgcttgacgacggccgtatcaccgattcgcagggccgcaccgtcgacttcaagaatacgatcctgatcctgacgagcaacctcggctcggaatatctgctgaacggtattaccgacaatggcgagatctccgaggaggcccgttcgcaggtcgagcagctgctgaagcgttcgttccgcctcgagttcctgaaccgcctggacgagatcgtcttctataagccgctgacgaaggaaaatatcgtcaagatcatcgatctgcagatggatgcgctcaatgcacgtctggctgacaagcagctgcgctgcgagctgacgccggaggccaagcagttcatcatcgacgcagcctatgacccgcagtacggtgcgcgtccgctccgccgctatctgcagcacacagtcgagacgctgctggcccgccgcatcgtcgagggcaatgtgtcgcccggcgcgacgctccgcgtcgaggtgcgggacgacgccctgcaggtcgtctgagcgaattccggacagccggggagcgggttgccgcttcccggctgttttttacaaaaatgaaaaacaggacttgacaatcctgtcggagtatgttactattttagggctgatgcaaagcctgcccacgcgggtgtagtataacggctagtacaacagccttccaagctgtgggcgtgggttcgattcccatcactcgctccaaatgcgccagtagctcatctggatagagcaactgccttctaagcagtaggtagggggttcgagtccctcctggcgtaccagcgcagggatgcatcagctgccacaaagatcgggtcgaaatatggtgggtgtagcgtagttggttaacgcgtcagattgtggctctgaagatcgagggttcgagtcccttcactcaccccattttcccccgcgccggggcttggcacacgccggatattgggatgtcgccaagtggtaaggcaccagactttgactctggcattcgtaggttcgagtcctgccatcccagccatcgtcggagcaaagtcactttgctccgaattttttgcatcatgacccgctagctcagttggcagagcaattgccttttaagcaatgggtctggagttcgaatctccagcgggtcaccacgaccggcaaacgcctgatgacgtttgccggttttttgaccttttgatgaccctgaaacgggggaatcattgaattaacacattacgaatacgataactcacggtttttgcttgcaatttgccgaatcctgtgatatgcagtccgcggtgctaccagtaccccggtaggcggttctcctcgaattcattcgggggtgataaacttctttttgctcccgatcgaaagagagggggtgacaggcatggttacatggggagaattctttcaattctgcatggtcatacttgcggtcattgccctgatttatcaggacaacaataagaagagataatcgccgcctccccaaaggaacgattatctcttcatagtcatttggggagccgacctactggcagcacccttttgtacctatactatactccagttttgcctttttgtcaagcgctccgccggaagacggagcgcttttctctgtcttagtcttacatttttgcggccagcttgaagacctcgttggagcggccgatgaggatgatgtggtcgccctcgcggaagcggtaatccgggccgacgttcgggttgatctcgttgtcatgcttgacggcgatgatgttgatctgatatttgcggcggacattcaggccggacagcgtctgaccgatccatgcggcctgaatgggcagctcataaatggaataatctgcggtcaacgggatgaaatcaaagatgttgtccgcgttgtagcgcacggcgagcttttcggagatctcgcgctccggacagacgatctcgtctgcaccgatcttgcgcaggaggtctgcctgaatgtcctgcttggccttcgagacgatcatgcgcgcgccgaactgcttgagcagggacgtgacgacgagcgaggcctggaagtcctcgccgatggtgacgaagcagatgtcgaaattgtcgacaccgagcgccttgatgatggcatcgttcgtgcagtcacagatatttgagtccgtgaagcggccggagagcgcttcgatgatggcggggtttttgtcgacgatcatgacgtcgttgccgagctcctgcattttgctggccagatggcggccggtgcggcccatgccgatgatgagaacagatttcatgaaacggttcctttctctgattatccgatgaggatcttgccggtgggacgatccagcggcggctcggagcggcgctccgagaacagcagaacaaagctcagaccaccgatacgcccggcgtacatgagcagaatgagaatgacacggctcgcggagctgagctgcggcgtcagcccgagcgacagaccgaccgtcgcaatggcggagacgacttcgaacgtgacggccttcagaccgaacggctcgatggcgcagatggccagaatggccgtcaggctcatgccgagatagatgagcagaatggagctggcctgccggagcgtttcgcgctcaatggacatgcggaaggtgttgacacgcatgcggccgcgcgccgaggccagcgcactgagcaccagaacggccagcgttgtcgtcttgatgccgcctgccgtggagccgggactgccgccgatgagcataaggaagtccgtcagcaggttgccggagtcggacagcttggacaggtccacggtgttgaagcctgccgtgcgcggtgtgacggcctggaagaacgaggcgaggagcttctccgggatggagaggtccgccatggaggcgttccactcgaagccgagaaacagaagcccgccgccgagcagcagaatgccggaggttgtcagaacgagcttgctgtgcagctgcaggcgcttccagcggaagcggcagcggacaagatcgcgccagacgagaaagccaagtccaccgatgatgatgagcatgcagatcgtcaggcttacgagcgggtcggacacataattggtcagagaagagaacggcgcgcgcatgcccatgaggtcgaagcctgcattgcagaaggcggagatggcgtggaacacggcggcgtagatgccgcgcagaacgccaaattccgggatgaaccggatggaaagcaatgcggcacccgcaaattcgaacacgaacgtaaagggaatgatcttgcggatgagcgccgccgtaccgtcgagcgtgatgttgcccgcagactgcataaggaccttgcggtcataaaggccgaggcgtttgccgagcagcatggacgtcagcgtgatgaaggtcatgaagccaagaccgccgagctggatgagcgtgaggatcacgagctggccgaagaccgtccagctggtgaacgtatcgcggactaccagacccgtcacgcaggttgcactcgttgaggtgaacagggcgtcgaggaacccggcaggttccccgcgtgaggcgatggggagcatcagcagccccgcgccggccaaaatgaccagcaggaacccgaccgcgatgagccgcgagggggtcaggtgcatttttttcaaatgaggatcgcttccttccgaccggccttcgtgcagatgggccggtgttgctttctcagacagtatagcggatttggagcgaaaacgcaactgtgatttttgacacgaaattgtgtgaattatttttgaaaattcaagaaaaacagttgaattttggggtcgtttgtcatagaatattggtcggcagtgttttggagagcatgctgccgcgaaaatctcttctccgcaggagcaccatgctgaacgttgtccttgttgcgccggagatcccgcagaacaccggcaatattgcccgcacctgcgccgcaaccggctccgtgctgcatcttatccggccgctgggcttcgatatctccgagcgggccgtgcgccgcgccgggctcgattactggcatctggtcgatgtgcgcgtatacgacgatctcggggacttctatgcgaaaaacaacgttgcccagcagcggctgttctccacgaaggcgccgcgctcctactgcgatgtctcctatgacgacgggtgctacctgttcttcggccgggagacgaagggcctgccggagccgttcctcgaggcccattatgacgactgtgtccgcatccccatccgcgaggaggcacgcagcctgaatctcagcaattccgttgccattggcgtgtttgaagcgctgcggcaattgaatttcccgcacctgcgggactatggaaagatgaaagtgtgaattctgcgtatcgcaagtctatcaggaggtcaattatgaactacaacaagaaatccgttgaagacatcgatgtcaagggcaagcgcgtgctttgccgctgtgacttcaacgtccccaccaaggaaggcaagatcacgagcgacaagcgcatcgtagccgctatgccgaccattgagtaccttgtcaaccacggcgcccgcgtcatcctttgctcccatatgggcaagccgaagggtgagtggaagcccgagctgtccctgcaggtcgttgcggaccgcctgagcgagctgctcggcaagcccgtcgtgatggccaaggacgtcgtcggtgaggatgccaaggccaaggccgctgccctgaaggacggcgacgtgatgctgctggagaacgtccgcttcatgaagggcgagacgaagaacgatcccgagctgtccaaggagctggcttctctggcggagatctttgtgaacgatgcattcggcacggcgcaccgcgcccattcctccacggccggcgtggcggactatctgcccgctgtctgcggcttcctcgtggagaaggaagtgtccatcatgggcaaggctctggccgatccgacccgtccgttcgtcgccatcctcggcggtgcgaaggtctccgataagctgaacgttatcaataacctcctcgagaaggtcgacaccctcatcatcggcggcggcatggcctacaccttcctcgctgcgaagggctattccgtcggcaagtccctgctcgacaacgagaagatcgactactgccgtgacatgatggccaaggctgaggccaagggcgttaagctgctgctgccggtcgacaccgtcgtcgctgcggatttcccgaacccgatcgacgcagacatcgccgtgaagactgtcgccgcggacgccatccccgacgacatggagggccttgacatcggcgaagagacccgcaagctctttgcgggcgccgtcaagagcgccaagaccgtcgtctggaacggcccgatgggcgtgtttgagaatccgacgcttgcacagggtaccatcgccgtggcacaggctctggccgattccgatgccgtgaccatcgtcggcggcggcgactccgcggctgcctgcgagcagctcggctttgccgatcagatcacgcacatctccacgggcggcggcgcttctctggagttccttgagggcctcgagctgccgggtatcgcctgcctgcaggatcgctgagcgggagcgcggaatgaacagaaaatatcgcaaaacgctcattgccggcaactggaaaatgaataaaacgccgacgcagacgaaggcgttcatgaccgagctgaagggcctgctgccgaagggccgctggtgtgatatcgcgctgtgcgtcccggctgtgtgcatcccggccgcagtccgcgccatgcgcgagacacgcgtggccatcggtgcagagaactgcaatgcgcatacctccggtgcctataccggcgagatcgccgcggatatgctcgttgatgcagggtgcaaatatgtcatcctcggtcactccgagcgccgcgccatgggcgagacggatgcggacgtgaatgcaaagcttcatacggcgctggatgcgggcctgatcccgatcgtctgctgcggcgaaacgcttgcacagcgggaatccggcgtgacggaggaatggatcaccatgcagatcaagctggcgctggccggtgtgccggaggagaagatccgccgcatcgtcatcgcctatgagcccatctgggccatcggcaccggcgagaccgcaacgccggagcaggccgaggaggtctgccagcacatccgcaccatcatccgcaagcgcttcggctcgaagaatgcccgcgcgatgaccatcctctatggcggctccatgaacgaaaagaacgcctttgagctgctggcccagccggatattgacggcggcctgatcggcggcgcatctctcgtgccggagaagttcgtccgcatcatcgaggatgccaaccagcccgtcggctgagaagcaaaataaattctaagcggggttcggtcatccggaccccgcgtgatttttgaaagggagacagtatggaacgcattcccatcgtcatcgataccgaccccggaatcgacgactttttctgccttgcgctggcctgcgcctattcagaccgcctggacctgcgcgccgtgaccaccatgggcggcaacaatcacacggatgtgacgacgcaaaacgcgctgaacatcctatccctgttccggacggatgtcccggtggcacggggcgcggaccgctatctcgaggcggagttcggcgcgcctgcggcgaagtgccacggttccaacggcgtgggggacctcatcctgccgcagtcctgcagggcgccggatgccctgcctgcgtgggacaagctctatgagatcgcaaaggccgcgcagggcgagctcgtcctcgtgacggtcgcgccgctgacgaatatcgcgctggccctgcagaagcatccggacctgccgcactggatcaaaaagatcgtgatgatgggcggcagcatcggccgcggcaacatcacgccctatgtcgaggcgaacgcgggccacgacccggccgccacgaagctcgtctttgagagcggcattcccatcgatatggtcggcctgagcatcacgctcggctgccccatccggccggatgtgttcgagcgctatatcccagcgcagcggggcggctttcgggagatcatggaggcgctcatccgcttccgcagcggcgaggccatgcacgatgccgtcgccatctccacactgctggacgaccggctgatgacgtggcagaccggcgagatcaccgtggagctggctccgccggagcgcagcggccagaccgtgctgcatccgtcggagcatgccaacatgcgtgcggccgtggccgtggatacggaccgctatgacgccattatcggcggtatgctgcagcgtctggagaagaggctgcggaactgaatacggcattttttccgccgcagagatgcgttctctgcggcggctttttgcgtttgaagctatcttatagaaaaagataccttgacaggcgaagtatcttgtgctatagtagactcacaaaggctgccggatgcggcagcgggaaggaggctggagttccttgtatattgcgggagacctgatccgcggccatacggagaccattatcctggcgcgcctgatgcagcgcgacagctacggctacgagatcaacaaaacggtccgggagctgtccggcgggcgctacgagctgaaggaggccacgctctacaccgcgttcaagcggttggaggagaccgggcagatcatgtcctattggggcagcgaggctacgggcgcccggcggcgctattatcgcatcaccccggccggacgcatggcctaccaggaacaggtcagcgtctgggaggccacaaaagagatcattgatcggctgatcgccatggaggaagagtcatgagagaacaattaaggcaggaggtgctgcgccgctttgcgggcgcaccggacacgcagcaggcgcgcgatctgcgcgatgagatcctgagcaataccctgcagcggtatgacgatctgcttgccgggggaaaatcggagcaggaggcttatgccagcgcgctcgagagcatcggcgatgtggaggagctgctttccagcttgccgcgcactgcgcaggccgagcctgtacgggaagcgcagccaaagaccgaagcgccggaaaaggagccgcattcccgcggcatgcgtatcgcctgcgccattgtgtggccgtgctcggccctgctggctgtggccatcggctggtatggctcgtggggctatgcctgggcggtgttcccgcttgcagcggcgttgctgcatgtggccgaaagcgtgatcctgctggcgcgcggccgccgcgcgggctggcggctcgtggacggcctgctgcggctgtgcatctgcgtgctctatgccgtcctaacggctgcaacgggcaagtggatcgtgacctggctcgtgtttccgataggcgcggcgctcggcggcgtgctgagcagcgtgcggactctggtggagggtgtataagatgaaagcaaaagctattgtaaagatctgtatctgcggcacgattgcgctggtgctggccagcatgctggtcagtctgctggcgctccccagagtgctggactggaagattggggacctgtctctccactggatcgacgaccacggcagcgacgagggctataccgtcggcgaggcctccgtttcgggcgaggtgcgtgagctggacgtcagctggctctccggcagcgtgacagtggagctgacggacggcgacaccgtgacgctccgcgaagagccgcagcccgagagcagtgatgcccgtatgcgctggaagctgaaggacgggaaattaacggtttattcgcagaaaagcggcctgacgatcccgacgcgcgccaagcagctgaccatcggcatcccggccagccgggcggcaaagctgcagaagctcagcctcgacctcagcgcagccacggcttccctcccggcactgacgctccgtgagatggaactggacagcgtctccggcagcgtgaccctgatgggaggcagctatgagaacctggacttcgacagcacgagcggtgatctgacggtgacggatgctgcagtcggtgagctttcggccgacacgacgtccggctcgctcacgctggacggcgcgtttgaaacgatcgactttgacaccacgagtggcgcgctgcacctgacgacctctatcctgccgcaggacatcagctgtgacacagttagcggcggcgtgatgctgacgctcccggaaaacggtggcttctcggctacgctggacagcgtgagcggcgatctgacagtcgacggctttacgggcagcctgcacagggatacgtttgcctatgggcagggcggccctgcctatgaatttgacagcgtgagcggtgatgtccatatccgctgcgcctgacgggcggaatgcatatgaagcgttggcttgctctgctgctgatcgctgccgtactgctcgcctccgggtgcacggctgcgcggcaggaccagctgtatctctacggcgaattccatgcgaacgacgagctgctgcagcgggagcttgcgctctggaaggactattatgaggacggcatgcgcgagctgtttgtcgagctgccgtattatacggcccagtacctgaaccgctggatgcaggcagataatgacagaattctcatggaggtctataccgactggaagggcagcgcgtcctatcaccagaatgtgctggacttttaccgcggcatcaaggcggcctgccccgagaccgttttccacgggacggacgtcggccaccagtataattcgaccggctaccgctatctgaggctgctgcgcagcgagggaaaacgcgatacggaggaataccgccttgccagcgagaacatcgatcaggggctggaattttaccgcacgcaggacggggaattccgtgagaacgccatgacgcagaacctgctgcgggaatatcgcgcgctgggcggcggctccgtcatggggatctatggcgcttatcacacgtcgatgaccagtgacgacggcgtacagaccatggcaagccgcctgacggaggcgcttggcgacagcgtgatcttctacgacctccgcgaggagtaaaaatggggctgccggagaggcgcactccgaaaggaagtgcgcctctgttatattcgcctgacggcgagcgatattgtcctttggacagtgatattatgcttcgcatcgtgatattgcctgcggcagtttgaccggcgaatataatatcacaaaagccatgcggcttttatatcactttccgaaaaggaaaatatcactccgggcaaagcccggaatatcactttagtccattgtccataggcacagcatgaagcctctcctgacggcagccccaaaatgaaatcaaattttcgcgtgctccaatttcaggagcgcgcgctttttttccatgcctccggcgtagccggtcaggctgccgtttgcgccgatgacccggtggcagggaatgaggatcgagatcgggttgtgcccgaccgccccgccgacggcctgcgcggacaggtgcgcgagcccgcgctgcgcggccagctgctgcgcgattgcgccataggtcgtcgtttcgccataggggatcgtcagcagaatgtcccataccgcgcggcggaacggcgaaccgctcgggtggagcggcggcagagcggcagggcgctgcccggtgaagtagccttccagccagcaccgggcctcctccagaatgggcgtttccgccttcgcagccgaagcaggaaggcccgcgccgaagtattttgcgcccgtgaaccacagaccggtcagccctagctcatccgccgcgagcaagatgccgcccagcggggaggcgtagcttgcggtatagatcatgttattttcctccgtttgcttttgggagcgcagggtccgtcagctccgggatcgcgccgccggagacggcccaaagatacaggctcgccacgctgccatagggatggaagcggcggcggtacctttcaaacagcgggcggtcgatgcggcgatggcggtagaccatgcgcagaccgcgctggatcgcaaggtcgtcatagctgaaaatgtccggccgctgcaggcagaacagcaggatcatttctgccgtccagacgccgatgccgcgcaggctgctcagcgcacggatggcctccgcatcgtccatgctgcggacggcctccagattgaacgagccatccacaattcgcccggcaaggtccgtgagatattccgccttgcggaacgtcatgccaagggcctgcagcgcgggtacaccggcggctaagatcgtttcggcgctgacagagccgagcgtgtcctgcatgcgctgccagatcgtggcctgcgccttcatggagatctgctggccgatgatgtggtgcacgacggcggaaaacagatcagggtccaccgtgcgctccaccggcccgatacggtcgatgaccgcagccagccgcttgtccttccggcgcagatacgccagctcggcctcgccgtagataaaatacatcagcccacctcctgatgggactattatagcacatacgttcgagatagcaagagtgagcatataaaaatcggaggcagcgctttgcggctggatgtgcccgcttcgacactgcgattttatgacaag

SEQ ID NO: 11097 - DNA, 2071 bp, Unknown
  gut microbiota DNA sequence
ctgaaaagggactgattaagataccattttatagagagtttgatcctggctcaggacgaacgctggcggcgtgcctaacacatgcaagtcgaacggagtcggccccgcaagggactgacttagtggcgaacgggtgagtaacgcgtgagcaacctgcctttcagtgggggacaacagttggaaacgactgctaataccgcataatgcattttgaccgcatgatcgagatgccaaagatttattgctgaaagatgggctcgcgtctgattagatagttggtgaggtaacggcccaccaagtcgacgatcagtagccggactgagaggttgaacggccacattgggactgagatacggcccagactcctacgggaggcagcagtggggaatattgggcaatgggggaaaccctgacccagcaacgccgcgtgaaggaagaaggctttcgggttgtaaacttcttttaccagggacgaagaaagtgacggtacctggagaaaaagccacggctaactacgtgccagcagccgcggtaatacgtaggtggcaagcgttgtccggatttactgggtgtaaagggcgtgtaggcggagatgcaagtcagatgtgaaatcctcgggcttaacccgggaactgcatttgaaactgtatcccttgagtatcggagaggcaggcggaattcctagtgtagcggtgaaatgcgtagatattaggaggaacaccagtggcgaaggcggcctgctggacgacaactgacgctgaggcgcgaaagcgtggggagcaaacaggattagataccctggtagtccacgctgtaaacgatgaatactaggtgtggggggactgaccccttccgtgccgcagttaacacaataagtattccacctggggagtacgaccgcaaggttgaaactcaaaggaattgacgggggcccgcacaagcagtggattatgtggtttaattcgacgcaacgcgaagaaccttaccgggatttgacatcctactaacgaagtagagatacattaggtgcccttcggggaaagtagagacaggtggtgcatggttgtcgtcagctcgtgtcgtgagatgttgggttaagtcccgcaacgagcgcaacccctattgttagttgctacgaaagagcactctagcgagactgccgttgacaaaacggaggaaggcggggacgacgtcaaatcatcatgccccttatgtcccgggctacacacgtaatacaatggcgatcaacagagggaagcaaagccgcgaggcagagcaaatccccaaaagtcgtctcagttcggattgcaggctgaaacccgcctgcatgaagttggaattgctagtaatcgcggatcagcatgccgcggtgaatacgttcccgggccttgtacacaccgcccgtcacaccatgagagtcgggaacacccgaagtccgtagtctaaccgcaaggagggcgcggccgaaggtgggttcgataattggggtgaagtcgtaacaaggtagccgtatcggaaggtgcggctggatcacctcctttctaaggagacctcagcagacgcaagcgtttgctgtaacatcctaaggtcagggtctgaggcagagctcatgatcttctcgttgtttaatttagagggtatacctcaggaagtgaagattggatgtgggggtttagctcagctgggagagcgcctgccttgcaagcaggaggtcagcggttcgatcccgctaatctccaccaaatatgggccaatagctcagctggctagagcacacgactgataatcgtgaggtcggtggttcgagtccactttggcccaccaccaaaaacagaacgagcatagcaaaaataggaatgagcattgattgaatgttgaaggaaatccttgcagagggtttcgttgagcattcaagcagccggaaggctgagaggaagctcaaatggcagagcgatctgccggatgcaccttgaaaactgaacaaagagtgaatgaagaagcaagttatgagaaggcaacagtaaggaaacaaaaatttagggtaattgtttacaatttcagctaaagaaaa

SEQ ID NO: 11098 - DNA, 200 bp, Unknown
  gut microbiota DNA sequence
ttgttcgcttgaccaaccgcattccctttcgggaacgcttacaagctagtgtagaatttccagtttctggtttctcactatttcttatcagaattatgcaggctcataaagaagttttctttagctgaaattgtaaacaattaccctaaatttttgtttccttactgttgccttctcataacttgcttcttcattcactc

SEQ ID NO: 11099 - DNA, 8182 bp, Unknown
  gut microbiota DNA sequence
aacggcaaacgccattgtaggggcggggcatgccccgcccggcactgcaccgccgatttgtacaggctgtcagtaaaatggtaaaagccaaaggtttgtcattgcgaggccctgaaggggccgtggcaatctcgggaaggcagttacgatttcgccgatggctttcccacgatacggtcgagtactgcgagattgcaccccaagggcacttcctcgcgctgcgcgctcagggcgccacgtcggcctgcggcctcctcgcaatgacaattcgggggcgttcaccattttaacgacggcttgtaccggctgtgagtaccgcgccgggaggggacagcccggcccctacaatggcatgcgaaatcaaaggcgcgtgaaaaatcaagggaagctctgaattgatcaacaagagcggatggcgagagattttttggcaaggcgaggtttggaaagtgcagttgtactttgtgtacccgcaaggggcatgccgcatccgtaaggcggcaaagccgccaacggctgcgcaataccacaaactttccaaaccgatggattgccgaaaaagatccggcatccgccgcagatgatcgattcagagtttcccccaataaaggaggaaaatcatgtttcgaaaaaagcagagcgtcgcggcggcggcggcgcagctgcgcggcgggatgcagagcccgttcggcgcgggccttccggccgtcccgcccggcgaggcgcagctctaccgcgccatgcggcagtcgcttcccgtgctggatgcggctatcggcaagcttgtgcggctgagcggcggcttcacggtgcgaagcgcccagcagcaggccgcgctgaatgaattcctgcggaccgttccgtgcgggcgcggacagaccggcatccacagcttcctctcggcctacctcgacagccttctgacctacggccgggccgtcggcgagatgctcgtggcgcagggcgacctgcgggctgtgtgctggggcgatgtgaatgcgctggagcttcgggaggggaagtcccccctcgaggtcgtgctgtgcggctgcggcgaggacggccggatgcggccgctgccgcggcaggagctgctgctgttcacggcgctgaacccggagccgggcagcccctatggcgtctcgctgctgcgcagtatgccgtttctcgcggacatcctgctgaaaatttaccgcacgatcggaaaaaactgggagcgcgcgggcaatgtgcgctatgccgtcgtctgcaggccgggcggcgacgggatggagcgcggctccgcctccgagcgggccggggccatcgccgccgagtggagcgaggccatgcgcgacagccagagcggcgttgtgcgcgactttgtggccgtgggcgacgtatccgtcaaggtcatcggcgcggacgggccggtgcttgacgcggccgtgcccgtgcgccagctgctcgagcagctcgtggccaaaacgggcctgccgccgttcctgctcggcctgagctggtcgagcacggagcgcatgagcgcccagcaggcagatcttctgacaagtgagctctgggcgctgcgccgcgccgtcgagccggtgctgctgcgcatctgcacgctgtggctgcgcctgcacggctgcggctgcgcgccggagatcgtctgggacgacatcagcctgcaggacctcgtcgaggaggcgcaggccgacctgtaccgcgcccggacggaacagctgagaaaggggacataacatggagattcgcaaggagggcgggctgcgcggcgcgggagcgccggacgaggcccggctcgcaaagatcaacgcctatgcgcgcacgccgctcacggcggaggccgtctactgcttccgcgtgcgcctgtgcgacgaccggcccgaccgcgactttgagcgcttcgacacggcggccctgccgcgcatggcggagctgtttcgcggcaagaccggcatctgcgaccaccagtggtcggccgaccggcaggtcgcgcgcatttttgacacgcaggtcgtccgcgaggacgacggcgcaagctgcctgatggccgaggcctatgcgctgcgcacggagcgcaacgccgacctgatcgcggacatcgagggcggcatcaagaaggaggtctccgttggctgcgccatggggcaggcgcgctgctcgatctgcggcgagccctacggcacctgtgcgcaccgcaagggcgcggtctatgacggcgaaacgtgcctggccgtgctctcggagccgctcgatgcctatgaattttcctttgtggcggtcccggcgcagcgggcggcgggcgtgacgaaggcgggaaaggagggatatggcatgacactgcaggactgtgtggcaaagcatggctcaccggagctttcggacgccctgcgcaggctctcggccgaggcagagctgggccgcgcctggcgaaagcagcttgaggacgggcttgtggcgctggggctgtcgctcgacctcggggccgcggagcagacgctccgcaaggcggccgccgcgctggacgacggccagctgcaggcgtggaaggccgcgctggaccggcgcgccgcggagcgctacggcggcgggccgcagctgacggcggcgcaggcgggcaccgcagatgaagcctatctgatttgatagggaaactccggatcaatcttcgacgggctgcgacgaatcttttgccctcagagcttcagcagaaaagccttgcaatacacaaagtattccggcggcttttctgccttgccctgagtcaaaatctttcgccggatcctcgccaaagattgaaccgcagcttcccggaaggcagctattcgcaccggcacatcttggatcgcttccatcggaaacggcatgtttcagaaattcgggccttctgggccccatgggcagaaccggaatatgaaaggagaatcaggcaatggcaatttttcatcaggagctgggtcaggtctgcacgacgatgtatctgcagggcagcgcagcggacaacacggtgtgcaagatgcacgccaatgacaccgtcgcggcctgcgcggcgggcaatgactttatcggcgtggtcgtgggcaagcgcgacggtctggcctgcgtgcaggtcgctggctttgtgacgctgcactacaccggcacgacggccccgtccgtgggcgagtgcgcgctggcgggcgacggcaagggcggcgtggccgtgacggagaatgcgaaaaaataccgcgtcctccgcgtggacaccgccgcgaagaccgtcggcctctatctgtgagtcggaaaggagaaacgaacatggcatttgacaacattcatctcgaaaagggcatgtatcacgaggccggccgcagcttcacacaggtgctcgagcagctcgacccctccgagggctaccgcggcacgccgctggagaacacggacgccttccagcgccagctcaagcgcttcggcatccgcgtgaagggcgcgggctcggacacggtggagaaattcttctccacgttcgaatccgccgtgctgttcccggaattcctggcccgcgccgtgcggcagggcatggacgaggccaacatcctgcccgccatcacggcgacggtcacgcgtatcgacgccatggactaccgcagcatctactccgtgccggaggaggccgaccgcagccttgcctatgtggcagagggcgcttccatccctgccacggccatccgcacgcgcgagcacctcgtccgcctgtacaagcgcggcagaatgctcgtggcgtcctatgaggccctgcgcttccagaagctcgacctgttctccgtcatgctgcgccagatcggcgcgcagatccaggccatgcatctcgaggatgccgtgaacgtcctgcgcaacggcgacggcaacgacaacgccgcggccgtgttcaccgccggcacgtcgcccatctccggcgagcagggcacgctgacgtatgcacagcttgtggaattctgggcgcagttcgccccgtatgagatgaacacgatgctcgtgagcaacgccacgatggtcaggctcctgaagctgacggagctgcagaatccgctcacgggtctgaacttccagggcacgggcaagttcgaaacgccgctcggcgcttcgctgctgcgcacgcaggccatggcggacgactgcatcctcgcctttgaccgccgctatgcgctcgaaatggtgcaggcgggcgacgtcggcgtggaatatgacaagctcattgaccgccagctcgagcgcgcggccatcacgtccatctccggcttcggcaagatctgcacggaggcggcgaaggtgctcgaggtatgacgggcatgagcgaggagatcacggcggccgccgtgcgcatcctcggcacggaggaggagatgctccccgctctgtgcaccgcagcggaggccgggcttcgtgcccggctccgccgggatgtcgacccggagaaggagtgccgcgagtgcttcgtgatggccgccgccctcgttgccgcgtcgacgctgctttcggcgcaggcgcagggcgtgacggattttgacgccgggcaggtctcgctccggctgaaggaccccggcgactccatggtgcgcggcgcgctctacatgctcacaccgtggatggagccggacacctgctttgtgggggtgcgggcatgaagcggcgcatcgcggccctcatccggcgctacggcagcagcgtgcaggcggtgttcccggaccggacggagatcgtgcgggccttcctgcagcccgtgacctcgcggagctggcagaacatggaccacatgatcccgacgggcggcgaggtgccgcgcgggcagtttttatatatcgggccgccggagctggatatccggggcgcggagcatctgtatcttgcggggcgctattttctcgtgcgccgcgcggacatgatcgtctttgacgacgcggagctgtttttgtgggggctgtgcgtcgagggcggaagggaggacccatggagcagctgatcgaaatggtgctgcaggcgctgcgcgcagcgggcatccactgcgtgcgcgccctcgacgaggagacgctgccccggctgaaggcgccgatggtcgccgtcggggccgatccctcggcctgccgccagcatgcgctggcgcggtatctcgggcaggatgccgacggcgcggagcgctacggcatggagctgcaggcgacgctgcagctggaggtctattcgcccggcagacgggcgggcgcgctgtgtgaacgcgcagcggcgcaggtggtggacgtgtttctcggcggcatcgagggcctgtattccggcgacctcgagctggggcgcacggcctatgacgcaaggacggactgcttccgctgcgccgtccgcgcgccgctgacgctgcggctttataccacggcgcaggacggcgcgttcacgcacgcggacatcaggggggtattgcaatgatccatgaacggccgggcgtgtggtccgcctttggggcgcaggggaccacggagctgacggaccgccgccttgcggcggtcatcgccccggcggacgcggcagagggcgtgcagctcgtgcacagcgcggcggaggccgtgtcgctctacggcgggaacgccctgctcacgcgcatgctgaagctgtgccttgccaactgcggcgatccggtctatgccgtcgccgtggacgaggacacgaaggttgcctatgagacggcgctcacggctctgttcgccgcggcgaagccgggcgttctcatcgtgggcagcgcccgcgaggacgtgcagctgctgctgcgcgagacggctgaggccaacgagtgcctcggcgtggcgggcatgaagggcgcgtcggccgatgccctcgttgcgcgggcaaaggcgctttgctgcgcgcgcatcgtgctgaccgggccggacgtgctggcgcaggacgaggccgtggcggacggcttctgcgcggcggcggctgtcggcggggccatcgcctcgctgtccacgcccgttgtgccgctgcacgacgtggccctgttcggcctgcagagcctttcggccctctatacggatgacgagctggacaagctcctgcaggcgggcgtcacgcccgtgcagctgtccggcgggcggatgtgtgccctgcgcattctgacgacgcgggccgcggccgaggggccggagggcgagagcttccgcagcctgaacgccacgcttgtgacggacgagctgctgcgcgatctgcgggcggcgctggcggcgcggttccgcgcggcgcagaacagcacgctcacgcgcacggccatccgcagcgccgtgctgctcgtgctgcaggactatcgcgcgcggggctggctcagcgcgttcggcgatctgcgcgtctatgccgatgccggcgatgcgtcgctgtgccgcgtggagttcacctattccatcccggcggggctgcaccgcatcgccctttcggcacagatgaccggctgaggagggggagcatgacgggaatttgcattccgacctcggcggacatccgcatcgaggtcgcgggacggcgcgtcgcggtggtgcagagctaccgcgttgaggaggaggcgtcgtgcgaggtcgtcggggccatcggctcgaatgagccggtcggcgtcgtgcgcggcccggcgcgctatcgcatcacgctgcagcgggtctatgccacggacgaggccatttccgacggcctgcgcttccacgagctgcggcagttctcgcttgtcatcgcaaagccggacacgatggtcgtgttctccggctgcgagtgggagcggctgacggagcgggccgaggtcggcagctccgtgctggaggaggccgtggtgctggcagccgtgcgcggcgaatatgagcagcaggagggatgagcatgcagttccgcaattttacttggccgaacgagccgtcctccctgcgggtgacgagccgcaggcgcacggccctgctcgaggagccgggcggcggctggacgctgcaggacctcggcacggcggcgcggaccgtgacgggcgagggcgtgttcttcggcgaaactgcctatgagagcctccgaacgctcgaggctcttctggcgcagggcggcgcgggcgcgctgaccctgccccatgtgggaacgctgcaggccgttctgacggagctggagggcgggcaggagccgcgcgagaacttcgtgcgctaccgcttcaccttcgtggaggcggcatgatcgccctgtggaccgcgccgcagggcggcgcgtggacgcgtctgccggggccggtgacggcgtggagcattctgcggacggaccggctggggaaggattcgttccgtgtggagctggccgatgccgccctgccggacggacgcctgcgcttcagcgcccgcgtggacggcgtgggctggtttacgggccttgcggacgaggtgctgcgcacggaaagcggggccgggcgcaggctcgtgctgcgcgggcgcgggatggacgccctgctcgaggactgcgagttcgacgcgcagacgggaacgggcatcacgcctgcggcgcttgccacccgcgtgctccagccggtggggctttctgcctggagcgatgcgcagtcggccacgggcaccctcaaaacagccctcggcagcacgggcagctcgatcgtgcaggactactgcgcctcggccgggctcctgccgccgcgtatgctggcagacggccgggtgtgcctgacggccacgcgcaggagcggcggcacggcgctgcagggcggcacggtacgggagcgttccgtgcaggcgctggcgggcatcggcgtgctccacgccgcgggaacgacctacgaaaatccggcgggcggccgcgaaacgcgctggcgcagcgcactgggctggcccgccgcggcggaatttgcccggtctatgcgcgatcgggacgccgtgcgcctgaccctgccgggcacgcacgccctcgagccgggcacgacggcggagtatggcggccggacgctgacgctcacggactgcgccctccgcggcggcgcggcgggcattaccacggagctgacgctggcggcaatttaggcggggcatcgttggcgcgcggtaggggaggggacagccaggcccggcgcattactgtcgaccactgcaggctgccgataaaacggtgaacgccaaaggtttgtcattccgaggag

SEQ ID NO: 11100 - DNA, 27067 bp, Unknown
  gut microbiota DNA sequence
cgcctctgctgcatacaatggaaacgggaggtggaatatggatcatccaatcgtttgggcactgatcgcgacgctcgggacatgggctatgacggctgcgggcgcggcgacggtgttcctcttccgcaggccgtcgccggaggcaatgaaccgcatgctgggcttctcggccggagtcatgatcgcggcgagcttctggtccctgctgcagcccgccattgcccgcgcggcagagcaggacggcctgccgccgtggctcgtcgccacactgggctttttgcttggagccgtcttcctctgggcctctgaccgcgtggtcacatgtgtcagctgcagatctgagagggggaacggggcgaaccgtgtcgttctgctcatcctcgcgatcacactgcacaatatcccggaggggctggctgtcggcgtggcctttggggcgctgcagcgcggcgcgtcgccggaggcggtcatgggtgcagtcagcattgcattcggcatcggcctgcagaattttccggagggcgctgcggtctctgtgccgcttcggcgcgagggcgcggggcggcttcgcagctttctgctcgggcaggcctcggggctggttgaaccggtcgcgggcgtgctgggtgcattgctcgtcggctccgttgaggcgatcctgccctatgcgcttgcctttgcggcgggcgcgatgattcttgtggccgtccatgagctgattccggaatgtcagcgcaaccgcgaggcgcgcccctacacagccacgatgggcattgtggccggatttgcgatcatgatgctgctggatgtcgccttggggtgatttgcaagcttttccggggaaatagcggcgcgttccgtcatcctccccggaaaaccgcgatttccgttgacttccgccgcgtggggaagtataataaacgcgtataacttccgattggagacattgcgtatgaagaaagccctgatcctgctggttgtgctcgtgctgctggccggacttctctttggattgtatcatttcctttggacggcggataattttgcggcgctcggagagaaggccatgaagagcggcaactatgcccgcgcggttgaccgctatacgacggccgtctcgcttgcgccggacaatgtggactatgtgctggcgcttgcggatgcctgcctggctgacggcagctacacgcgcgcggagcgcacgcttgtggaagccatccgcacggccccctcggagcagctctaccgccgcctgagcgcgacctatgtggcgcaggacaagctgcttgatgcccagcagatgctcgacagtatcacggacccggccattcgcgcctcgttggaggcggcccgcccggcagccccagcactgacgccggatggcggcgaattctcggattatatcacggtctcggtctctgcaccgaccggcacagtctatgtatccgtgacggagcagtacccctcgacggcggacgcgccctatgctgagccgatcgccctccccgcaggctccacgcatgtttccgccattgccgtcagcgacgacgggcttgtcagcccgctgacggaggccgactatctgatcgtcggtgttgtggaggaggttacgtttacggacagcgcctttgagcagtatgtgcgagaccttattctcaagccgtcgccgtccgtcatctacacgagcgacctgtgggccgtgacggagttcgtcatgccggaggaggtcacggatttctcggacctgcattacttcacgggcctgcacagcctgacgatccacaacggtatgtttgacgactacaccttcctgatggtgatgccgtatctcgagaagctggacctctccggctcccttgtctcggcacagacgctcgaatatatcggcacgctgaccgacctgtccgatctgaacctcagcggctgcggcctttcgaacatcgtggcgctctccggcgcgagggcaatggagcacctcgacctgtccgataacagcatctccaacatcggcgcgctctccaactacagcggcctgaagacggcggacctgtcccgcaatgccatcacggcgatcgatgcgctggacggcctgacgaagctcacggcgctcgacctttcggagaatgacatcacgagcgtgtctgccttggccaagtgtacggagatgacggaactgaaacttgccagcaaccgcatcacgagcgtcgcgccgctgtcaggcatgcgcgccctgacgaagctggatctttcgaaaaacgccctgacggacgtctccggcctcggctcgtgcctgcagcttacagagctgcgcctctcggacaaccagctcgagaatgtcgacagtgcggcctcgctcgtgaacctgacataccttgacatgagccacaatctcgtcaaggagctgccgccgtttacggagacgtgccggctgcagcagttctacagttcctataaccagctttccgatatcagcggccttgccggcctgccggagctgaattatgtggatgtggattacaacaccgacatcacggacatcgagtgcctgaaggcctgccagaacctcgtgcaggtcaatgcgttcggtacgaagatcacgcatgtgacggagctgtccgacatgggtgttgtggtctattgggacccgacctccacgattgccggataagaacaaatgcctcgctgcattcgcagcgaggcatttgtttttcagacagttgccggtttcgccgggttccggaatactttgcggtacaggtagaaaaagtagactatttcggccccggctgtcagcgtccaagacaccggatagagcaggtagagtgaggcaatggtcccgacggaggcgaagatcgtgtagacccagatcacgcggaacacgcatgagccaagcacgacgatgatcgtcggcacaacacagcggccaaggccgcgggaggccgcgatagtgcagtccataaaggccgagatggcataggagaagcccatgatgcacaggcggtgcataccggcggcggcgacctcagccgagtccgtaaagagtgcaaggaagccgcggccgaagaacacaaggctcaggccgagcacggcgcccgctgcgaacgagtagctgaggctgatccaataggtcctgcgcacgcggtcgcggttgcctgcgccatagttctgcccaatgaagctggcacaggctgtgtggaaggcagccatgacgtcgtaaataaggccgtctgcgttggcggcggcggagttgccttcgaccatcagggcgtcgaaacggttgacgcctgcctgaatgaacaggttggcaacggcgaagatggcgttctgcagaccagcggagcagcacagtgtcagcaggggggcgagcttgtcgcggtgaaggcggatgcatttcggccggactccgtaggcatccttcgtccggacaagagcaatgaggatcaggatggacgacaggtactgcgtcaggatactggccagtgcgacgccgtcggcgctcatgccgcagacgatgacgaagaagagattcagagcgacgttcagaatgcccgcgatgagcagataaagcagggggcggcgggtatcgcccgcagcgctcagaacggcattgccaaagttatagagcgccatggcgggcatgccgaggaaatagatgcgcaggtagatcgtcgcgccgtcgatcagctcttcctttgtgccgagcagcttcagcagaggaacggccgtcagctcgccgagcagcaggagcaccgcgccgaagatgaggctcagggcaagggccgtatggacggtgcgctgcgtctcctcgcggctgcctgcgccgagaaagcgcgcaacaagggcattgataccgctgccaaggccaatgagaaaacccgtaaacagggtaacgagcgtcgccgtggatccgactgcgccgagtgcgatcgggccggagaaacggcctacgacggcgatgtccgacatattgaacaggacctgcagaacattcgacagcatcagcggcaggctgaaggcaaggatctgcttcccgagccggccatgcgtcaggctgccggctgctttcgtttccatggtatcttctccagtcgtcataaaatgggctgcagcagatcggatgactgctgcagcggtgtagacacaatgagtatatcacatacgctctgggcgtgcaagagagtttcgaaaaaatgttcctgcttgacgagaccggccggttcctgtatactaaatacggaaaatcagaagaaggagtgcagactttgggagaaaagatcattcacgggatccatagatttctggagattctcgagatcgtgctggctgccatcattgtgctggtgctcgttgcgctgatgggcatcgagatctgggagcttgcgcgcgatccgtccgtttttctggcggagggctttctcgattcattcctgagcagcatcacgtcgcttgtcgtggcggtggaatttgtaaaaatgctgctgcggccgaccgtcggcaacacgctggagctgctcatcatggcgctgtcgcgctatgtggtgctgaaccatcatgagcccctttccctggccgttggcattgcgggcgtcgtggcgctgtttgccacgcggcgcttcctgagcggccgcccggagggcggaaaggacgatcgcatcagctcggagcttgaggaatgaggcaaaagttcagaaactgagcgcgcaaaacgccgcagcacttcggtgctgcggcgtgagcctatcagaaaagccaaaagggcttttctgataagggaatttcagtccgctgcgcgcacgaatcgtccgccggagccgaacgattcgcacactgacggactgagtggtattttctccgacgtacacgccgccggagaaaatgatctcaattgattcgccgcctgcgggcggcgaactctgcgaggcttatgggaaacgcaaacgccgcagcacttcggtgctgcggcgtaaattgcaagataggggatatcttacttgatctctgcggtagcgccggcttccttgaggtcgttgacgatcttctcggcatcttccttggaaatggcttccttcagggtcttcgggcagttgtcgacgatctccttggcttccttcaggcccaggccggtcagagcacggacgaccttgatgacagcgatcttgttcgcgccgcattccttcaggacgacgtcgaactcggtcttctcttcagcggcctcagcagcaccggcagcgggagcagcaacagcggcagcggcagcggagacaccgaaggtctcttcgagagcatggacaagctcagacagctcgaggacggacagacccttaacttcttcgatcagggcagcgattttctcagacattataaaatcctcctaattagtgtaatagatgaatgatggatcaggcttctgcgggagcttcttccgcgggagcggggccttccttctgctgacggatctggtcgaggcagaatgccagagcggagatcggagccaggaaggtgccgagaacctgggcgatgagagcgtccttgctgggaagctcgccgaagccctgaagctgctcgacagacaggacggagccttcaacgaagccgcccttgattttcagaacgttcttgttcttcttggcaaactcgcagacgatacgagccggggcaatggggtcacccgtggtggtggcgagggaagtagtgccgttgagcatctcgtcgaactggttatagccggccttgttggcggcaaaacgggtcagagtgttcttaacaacggtgtattccacgccggcttcacggaacttgttgcgaagctcggtatcctgtgcgacagtgatgcccttgtagtccacgaacacggctgcggtggaaccctgcagcttcgtagccagtgcatcgacgattgccttcttgctttcaagtaccttggaattgggcaatgtgtgtcacctccgaaaaaatgtcctcatgccaaaagacatgaggacacagaaatcacatgtatttcgtgtaacctcggcaggatggggatcgttacggcgtaagcctcctgctgtctctggcaacgggaaatattttatcagaaaatgccggatttgtcaagcaattttctgatttttggggaaattcatggagcagacaaacgctttgctgctccatgatcaaacgcattagaacttggcagtattgaccttcacgccggggcccatggtggaggcaacgacgcaggagcggatatactggccctttgctgcggccggcttcgccttgacgacggcgccaagcagcgtgttcaggttctcggtcagcttctcagcgccgaaggagaccttgccgatcgggcagtggatgatgttggtcttgtcgagacgatactcgatcttaccggctttgatctccttgacggcagcggcgacgttcggggtgacggtgccggccttcggggagggcatgaggcccttcgggccgaggaccttaccaagacggccgacgatacccatcatatccggggaagcgacgacgacgtcgaagtcgaaccagttttccttcgtgatcttctccacgagctccatgccgccgacatagtcagcgccggctgccttggcctcgtcgaccttggcgtccttggcgaagacaaggaccttgcgggtcttgccggtgccgttgggcaggacgatggcgccgcggacctgctggtcagcgtggcgggagtcgacgccgagcttgatgtggatctcgacggtctcgtcgaacttggcgggggcggtcttcacgacgagcgcaagggcgtcggagacttcatactgcacggagcggtcgatctgcttcgcgctgtccttatatttcttacctctaaacaatgttatatcctccttaaagtggtgatgcggaataatcctcccacatagatgaggtcaggcgacctcggcagactcagcgatcagtcgacaacgacgatgcccatgctgcggcaggtgcctgcaacctggctcatcgcggcctcgatggtggcggcggtgaggtcgggcattttgcgctctgcgatctcgcgcacctgcgccttggtgatggttccgaccttgttcttgttgggaacgccggagcccttttcctgaccgatggccttcagaatgagggtcggggtcggaggcgtcttggtgacgaaggagaagctgcggtccgcatagaccgtgatcacgacggggatcttaaaaccggcctgatccttggtgcggtcgttgaactcgcggataaactgtgcgatattaacgccatgctggccgagagccgggccgacagggggcgaagcggtcgccttggcggccggaatctgaagtttgatataaccagtaactttctgtgccatgataagcacctccaaatagaatgtggtaatacgctgacgcgtatttctggcgggggagaacccctcccacgttttgcccggatcagtcggtggagagctccacctgatcgagctccagatcgaccggcgtttcgcggccgaacatggaaacggtgacgcgcacccggttcttttcgacgtccagctcctcgacgatgccgctgaagctcgtcagcgggccgtccatgatgcggaccgtgtcgccgaccttgtagccaacgacgatctcacgcttttcgacgccgagctgaatgacctcatcctccgtcaggggggtgggcttggtgctgccggatgtgacaaacccggtgacgccgcggacgttcttgatgatataccaggcgtcgtccgtcatgaccatcttcaccagcacatagccggggaagaccttgcggtcataggtcttcggacccttttccgtgacttcggtcacggtttccatggggatggagacctgctggatgatgtcctgcagctgacgggtctcgaccgttttttcaatggtcgccataacggtattttcataaccggaataggtatgcacaacataccattttgctgtttctgccataccgcttgtcctgacttagaacagcttgcgcagcaggccgatcagctcgcctgcgccgagatcgaacaggcagacgatgataccgacgatcagaacggcgacgagaacgacgacggtgttgttcaccagctgcttgccggagggccagacgaccttcttcagctcgctcttcatttcgcggaaccagcgggaaaggcctgtgcccatgcggacaaagatattcggcttcttgttgacttctgccattgctttcaccctttcccttacttcgtctcggtatgaaccgtgtgctttctgcagaacctgcaatacttcttcatttcaagacggtcggggtcgttcttcttgtttttcatcgtgttgtagtttctttgcttgcattcgttgcatctgagcgtgatcttgactcgcattgttcggcacctccttaaaattttgcctccctgcatgacctgcggctagaaaaatttaggggacgccgaaactacgcgggcgccgtccgcaggcaaaaagggcataacaaaaaagccctttttcacaggtagagttattctatcatacgaaacgtcgggggtcaatcctttttttcgggaaatcccggatttttgccctgttttccggacaaaaaaatgccggagcggcagaaataccgttccggcaaagtctttcagagtgtttcgtccttcacgcgcggcagattccagcggaaatgcgccgagagcaggcggatgagcaggacggccgccataccggccagcatggccacatactgcggcacgagccgccacagcacggcgcacagcaccgcgcccgccagcgaggcgcaggcgtaaacgtgcttgacgaggatatagggcatgtttccggccagcacatcgcgcatgacaccgccgccgacgccagtcagcaggccgacgaacacgagaagataggtgctgcggtccggcgagaagtccatggcattccagatacccatgacggtgaacacgccgagaccgacagagtccatgagcagcagggaaacgtcaaacagacggtggttgtgcatgaggctgtggcggatccacgggatgcacagcaggagcgacacgccgacggccacgagcgtgcatgtcgggtcgcggaaggcgaggggaggcgtgatgccgaggatgacgtcgcgcaggatgccgccgccgacggaggtgatgacgccgagcacgatgacaccgagcaggtccatatggcggcgcatggcggtcagcgcgccggaggccgcaaaggccaccgtgccgatgagttcgagaagaaatacgaatttatccataggtatcgctgagaggtccttttcaaatcataaaaatgctccgccgcgggaaatgccgcggcggagcagaaaatacgctggaatacgcttcagactgctgcggggacggccgtcccatccggaacgctgacacggcggatctccgcgccaatcgcggtgagcttgccgatgaggttttcgtagccgcgctcaatgtattcaatgtcctcgatcgttgtcgtgcggtcggcggcaagtccggcgatgaccatggcagcgcccgcgcgcaggtcgcaggcgcggacggtgcagccgtgcagcttttccacgcccgtgatgatggcgaccttcgtgtcgaccttgatggacgcgcccatgcggttgagctcggcgcaatagccgaagcgcgtgtcatagatgctctccgtaatgacgctcacgccggaggccagagacatgcacacggcgatctgcggctgcatgtccgtcgggaagccgggatacggcatcgtcttgacattggcccggcgcatgacgcccgtgcgctgcacgcggatggcgtcgtcgtattcggcaatcttcacgcccatctcacgcagtttggcggagatgcagtccatatgtttggggatgacgttctggatgagcacgtcgccgcccgtggccgcgacggccgccatataggtgcccgtctcgatttggtccggaatgatggagtagctgccgccgtgcaggctgcggacgccgcgaattttgatgacgtcggtacccgcgccggagaccttcgcgcccatggcgttcaggaagttcgccagatcgacgatgtgcggttcctttgcggcattttcgataacggttgtgccgttcgccagaaccgcgccgatcatgatgttcatggtcgcgccgacggagacgacgtcgagattgacacggccgcccgtcaggccgtctgccggggcggcggcgcagacgaagccatccttgaggtcaacggcggcgccgatggcctcgaagcccttgatgtgctggtcaatggggcgcgcgccgaagttgcagccgccgggcagcgccacgcgggcatggccgaagcggccgagctgcgcgccgatgaagtagtaggaggcgcggatgcggcgcaccagcgcgtcggaggcctcggaatcgcgcacatttgtgcagcagagctccagcgtgttcggactcaggcgacggatctttgcgcccatgctgtccagaatctccagcaggagccggacatcggagatatccggcacattttcgatgcggcaggtgccgtttatgagcagtgctgccggaaggatcgccacggcggcgttttttgcgccgctgacggttacgacgccggacagcggatggccgccctggataatgtatttattcatgtcataccctctcacgatcggagtatatgcaatatgtcgcaaaacaacagcgccaatttcaggcagccgacaatccttcccaccgagacgttcagttggaaagccctttcgacggtctagtatagcatagtttgaacattctgtaaagagagaaccggaaattgggcgagaaaacgccaatgaagccgttagcgcagacggcgcaggccctttggatactgattctttagaatgccgtccgcgccgcgtacccagccgagtgaaagcccgccggccgtcagcagcgtccagccgcgctgcgtgccgtgcagcgtctcgccgcgcagataggcggcgatctccgggccgccggccgggaaatccgccgtctgcgggtaggcgtgcagccagagcgccagcgcgtgggcgggggagaagcggtcacggcgcagttcaccaagctccagaccggcgcgcagcacgcgcaggccggaaagggcgggcgtctctgtcggggccagatagcacacggagccgaagcagacgggcacgccgtccggcaggggctgcgtgcagttgcgcaggaagtctgcggcggctgccgggagctgagcggggcgttccgtgggaacatcctgccgtgcgccgtccgcatggctgcgcaggacggcggcaaagtggccctcgccgcgcagacaatgcggccagaggcggaaggcatgctccagaccaggcgcgggatcgtcgatccagtccggccgcgccggagagaaccagggagcctcgaccggctcgacggaaaacgccggatgcgcgtgcagaaaggcggagatgactccctcgttttcctcgggcgagaacgtgcaggtggaatagacgagccgcccgccgggggccagcatttcggctgcggaggcgaggatctcctgctgccgcgcggcgcacatggccacggtcgcctcgctccagtccgttacggcggcctcctccttccggaacatgccctcgccggagcagggggcgtcgacaaggatgcggtcaaaatagccggggaagcgctgggccagctttgccggatgctcgctgagcacaagggcgttcggaatgccgagccgctcgatgtttgaggcgagcacctgcgcgcggcgcggatggatctcattgcaaacgagcaggccacggccctgcatggcggcggcaagctgtgtcgtcttgccgccgggcgcggcgcagaggtcgagtacccgctcgccgggctgcgcgtccagcaggcgcgccggggccatggcactcggctcctgcagatagtatgcgcctgcgtcgtgccacgggtgcaggccggggcggctgccctcgcagacgtaatagccgttcggctcccacgggacctgcgcctcgcagaacgggagagaagcgccatccggcaggggcttgcgcggattcagacgcagcccggcgctccgcgggcgctcataggaggcgagaaattcggcgaattccgcttcgccgagcaggtgcagcattcgttccgggaagccctgcggcagcatgacagaccaactccttgcacggtttcagatcgggggtatcatagcatggatcgggccaaaacgcaagcgccgggaggacctgcggcggccagacggaaaaataaatcgaaatatctcaaaaaagtggttgacaaaacggcgcgaactcgctataataaccatgcttgtttgagacgccggtatagctcagccggtagagcagctgatttgtaatcagcaggtcgggggttcgaatccgtctaccggctccacagtgttttcaaacggacaagttcatatttgggggaattcccgagtggccaaagggggcagactgtaaatctgttagcagtgctttcggtggttcgaatccaccttcccccaccagaaaaaagcacttgctttcgcaagtgcttttttcaacgaaatccaccctttcgggtgggtgaaatactgcttcgcggtgtgatatacgcctgcggcgtgtgaaatcgctgcggcggtgggtggatttcatatcactttctgcgaagcagaaaatatcacaaacgcgagagcgtttctttcatagtttgcgccagcaaaatatttcacaaaggctattcgcgtgccccatctataacagcctattaacataaatccgcccaaatcctgccagtgatgaccggcaggatttttctttctggtttgattcgtgaataggaattgcgaaaatggtcgtacttcgctataatagaaaagaacgcatgcttaagcacgggcgtcctccagcgtgctccatgcgctttccgcaagaaagcgggcggcggggagcagaacggaagagtccggacagaacgcggcgctgtgcaggcccaccgggctgccgacgccgagcagggcgcagcagatcgggacctcgcttccgtagcaggcgaagtcctcggagatcatctgcggctcgatctgcacgcagccgcttttgccgaacacggagacggcggcgtgctccattgccgctgcaagtccggcatcgttgcacagggcgggcgttccgtccgtccagccgactgctgcggtgcagccccacgcgaccgcgataccggccgtgagggcctccagccgcgcctttgcctgtgcccgcgtccgtgcggagaacgtgcggatcgtcccgagcaggatacagcggtccggaatgacattgttgcaggtcccggcctgaatgcacgtcacggccgtgacggctggctctgcctgtggcaggtcgttggcgcggagcgttgtgagggccgaagccagcgcagcgcccgcggggatggggttgcaggcccgctccggtgcggagccgtggccgccgcgccccgtgacggtgatctcaaagctgtccacggcggagaggatcgcgccggaccggatgccgagctgcccctgcgccagaccgggccagacgtgcagcgccagcatgcccgccatcggaacgcggcggaacagcccctgctccagcacctgcatggcgcccgttgcggcctcctcggcgggctggaacaggaacaggacgttcccggccagctgctcccgccgcgctgcaagcaggcgggctgcgccgagcagggcggccatatggatatcatgtccgcaggcgtgcatgacgccgggaacgcgggaggaaaattccgctccggtgcgctccgtgatcggcagggcgtccagatcggcgcgcaggccgacggtggggccgggcagggcgccgcgcaggagcgcggcagtgccggtcggcagaccgagcgggaccggctcgaggcagagagcctccagctcctggcggacgagccgggtggtccggtgctcctgccacgaaagctccgggtcttcgtggagctgcgtgcggagcttatgcaggtgcgcctgcagtgccgcatcttcgggcggtgaaatgatgtatgacatgaatgattcctttccgcacaccggctgtgccgggtgcatgggcggagtaaaatttcaggaaggcggcacttgaggtgagtaactactatattctgacgaacctgctctcggacgatgagcgccgggtgatcaccagcatcgtccggcatatcgagctcggtgggaataaggtcggcattcagcagatcgcaagtgagaactacgtttcaacggcttttatcatgaagctgtgcaagcggctgggctttgcgggctacagcgagctttattacaatctggcacagtccagcggcgagggccaccgctccagcgatccggacccgctgtgcggccttatcgacggctatacgccggagcaggccgagcagttctgcaaaatgctgatgcagtacaaggaacgcaaaattttcgtcgtcggcgagggctttgccgaggaggtcgccaactacatcgtcaagcggcttgccatctgcggcttcatggtgttcaaccatgtccatttctatgactacatgctcttccgcgaggaggcgaaccgccagatcacgagcaacgtggagtcctcactcatcatcgctatctcgcagagcggcgagacggaggccatcatcaacgacgtgcgcgaggcggagagcaagggcttttccgccatctgcttcacgcgccgctcggattccaagctggcgcgaatgtcggacctgacgtttctcgtcgacgcctccaaccagacgctcatcagcgccgtgccgaaccagtttttcggcaaggtcatcctcgcgttcgaggaattgatgggacggcttttccgataagaagatgcatatgtttcatttgagccgctgcggtgcgccgcagcggctctttgcgtcattccggtgtgcggggactgcgctgcgaattcgccggagcattccgggaacagaaggtcctctgctgcgagattgccacgtcgcttcgctcctcgcaatgacaaatctatggccttttccgtgcgctcaatagggcgcgtggttgttttccggttcgccggtctcgtgcaggcgcgggtagtctgcgaccgtgagtacgccgagggactttgcataggcgctgacggcttcgtgatagtggcggccggtcggtttccaggcgatctgcccggcaatggctccggtgtcattgccgccggaggccatataggcgctgaccgtgacgctgaggcgctcgtccggcgcaatgggcgtaccgtccggccgcgtgacagagagaaccttctgcccgccggggcgggtatggtccactgcggcgtggaagccggagaaggcgatggcagcattattgccgaagcgctccggctcatagacggcctcgagcagggcatggagctgcgcgcccgtgatgatcccagtgaacatttcgtcgtcgaatgcggcgcagtagagcagctcctcgcgcgtgatctcacccggaagcagctcgccgcaggcgctggtcgtgttcatgtaggacagctccgtctgcccgccatagcgcaggcagtccgccagaaagtcgccgagcttcgactcgtgcgccagcgtcatgcgccagcgctcgttcagggatccgaggggctcccggaaatacggctcgaacgggtcggtgacggagcggatataccgggtgatctccggatcggcctgcccgttcgggtccgtctgcacgacggcgcagctgcggtccagaatgcggtgcgatgcggcgtccagtgtcaggcggacatgcgcgatgcttgccccgccgaacccggccttgacgacgcaggctccgctgcggacctgcgcgcagtcgccggggatgtgcccgccgatccagacgtccgcagcgggcgaagcatcgatcagttccggcagctcacccgtgagcgtgccgtccgccgcctgataaaacggcatgtgcgtcagcacgacgacgacgtccgcgcccgcggcgcgcattgccgggatatggcgcgtggctgcttcggcggcggaggtcatttcaaacggggcaaacgcgcttttctccaccatgtagggcgtgtattccgtggtcagaccgagcacgccgatgcgaatgccgcagcgctcgagcaggacccacggcttcgtgccggggacgggcgcaccatccgctttccggcgcacattggcgcagaggaccgggaagggacaggcgctgatgcagctgtccagaaaggcggggccgcggtcaaattcgtggttgccgagcgtcatgacgtccgttttgctgcggatcatggcgccgacgagcggcaggccgggccaatagttcgtgctgaaggcgtcaccggcgtcgagcaggagcgttcctgccggattctgcgcgcgcagctttgcgatttcggcggaaaaggccgggaagccgatatcctcacgggaggggcggatgcggccggagaaatcggcatggcagagcaggtcgaggacgatctctctcatggcgcttaccccttcaggccgccgcgcgacacgccggtgacgatgctcttgcggcagaagatgaacagcaggatcatcggcaccacgacgatggttgaggcggccatcaggcgctcatagcggatgccgctggaggtcatgaaggcgtaaaggccgaacggcagcgtgcggacctccttcgtgttcgtggcgatgacggtccacagaaaggagttccagcaggcaatggcgtcgagcaggccaatcgtcacgagggcagggcgggacatgggcaccatgacgcgccagaggtagcgccagttgctcgcgccgtcgacgcgcgcggaataatagaggctgtccggaatggccaggaagaaattccgcaggatgtaggtgtagaagatgctggaggtgaacggcaggatcagcgcgatgagcgtgtcgttcagtccgagctttacgatggtcgtgtagttcgtgatgatgagcatctcgaacgggatcatcatcagcgaaagcagcagagaaaacagcaggtcgcgccccgggaacttcagccgggagaaggcgaaggccgcgaggatggttgtgaacatggtgcaggcaacgcagacgatggtcacgagcagggagttgcagaaataacgcaggaacggggccttctcaaaggcgtagacatagttttcaaatacaagctccttcggccagaacgtcggcggcgtcgtgttgacctctgcggccgttttcagcgaggagatgatcatccagaagaacggcagcaccatgatgagcgcgccgatgatcagaacgagataggcaaaggatttttttgcagttttcatggcggtacctcaataattcttccacttgcgctggatgaagagctgcagcatggtgaagatcaaaacgatgacgaacagcacgacggcgctggccgcagccgggccgagctgccactgcttgtagaacatgtcgaacaggtaatatacgacggtatacagcgagtaggccgagccgggattgccgttgaacagcgggaatagctccgagaagaccttcgaagccgaaatgacgttcacgatcatcgtcaggcccagcgtcggggccagcagcggcacggtgatgcggcggaaaatgcgcccggaggacgcaccgtcgatgcgcgcagccgtgtaatactgcgggttgatgttctggaagccggagagcagcagaatgatcgtgaacggcagcatgctccagatgccgtagatgatgagggcggcaagattgtagtgcgggtcgttcagccagttcacgggggaaacgccgaacagcgacagcgcatagttgatcaggccgtaatcgtagttgaacatccatttccacacgaggccgaccgccgtgacggacgtgaccatcggcaggaaatagcacgtctggaacagaccctgcagcttcgtgcacgagttgagcagcgaagcaaggaacagggacagcaccgtgacgatcggcacgacaaacagaacgtacagcgccgtgttgcgcagaccgttgaggaaattcgcgtcatggaagatctcagcatagtttccaaggccgatgccggagaattcgccggtcatcaggctgtagtcctgccggaacgacagcagaatgacattgatgaacggatagacggtgaagaccagaagaccgatgagaaacgggagcaggaacagccccggctccgcaaaggtgcggaaggtcacgcgctcgccgtctgcgcgcgtgcgcagcttgcggcggctcataagtaccgcacccccgtcttggcgtcaaacaggaacacgccgcgctttttcaggccgacggccagctccgcaccgggcagaatctccagctcggccgggacaagaccgcgaagctcggcagggccggcctgcaggcggacgagctcgtccttgccgagggaatagcgctccagcacagtcgtgcggaaggcgggcgtatcaccctgcggcaggatgctttcggcgcggacggccagaacgatctcctgcccctctgcaagaccgtccggcagcgccagcgcagcggggatgccgccgtccagcacaaggcggccgttctgcacgacgccgtgcagctggttgatgggaggcgtgccgaggaagtctgcggcaaagaggttgaccgggttttcatagagaccgcgggcggtgtcctcctgctggagcacgccgtcacgcagcaggacgacgcggtcggcgatgctgctggcctcctcctgatcgtgcgtgacaaagacggtcgtgatgccggcctcacgctggatgcggcggatctcctcgcgcatctccacgcggagcttggcgtcgaggttggacagcggctcgtcgagcagcagcacgtccggccgtttggacagggcgcgcgcaatggcgacgcgctgctgctggccgccggagagctccgcgggcttgcgcttgagatacggagtgatgtgtaccatctccgccagctcttcggctcggcggatgcgctccttcttggggatgcgctgaatttccatcgggaagcagatgttctgcaggaccgtcatgtggggatagagcgcgtagttctggaagacaaggccgatgccgcgcttctccggcggcaggctcgtcacgtcgcggtcgtcaaagaaaatgctgccgccgctcacggggagaatgccggagatcatattcagcgttgtagtcttgccgcagccgctcggaccgagcagggcgatgagcttgccgctttccagtgtgatggaaaggtcgtttacggcaacggtgtcgccgaaacgcttggtcagatgttcgagtttgatctgcatgtccgtatcacctcaatatttcgaaaatgggtgcgccgtcgacatcgggcatcgtcagcccgagcatggcggccatggtgggcgcttcgtcgaccatggagcggctgccgtgcaccgtgccgggccgcacatccggtccggcggcgaagaatgttgtgacctcctcgcgggccgggctgccgccgtgagtcgccacgccggtcttcttgtcgcccggctgacagctgcgccagagcgtgtcgccggccgggtattcgccgaacgcaatgggaaggctgctctccacgacaaagtcgaacgggccggacaggccgtagcgcgcctgcgcctcggcggcgtccagcaccatgctgagctgtacgtccgggtcatgccgcagggcctcgagcgcctcgcgcacgcgtgccatcagtgcagcatcgtccgggtcgcgcacctcgatgagggcggcaaggccggtggagtggcagacggcgtcgaacgaggcaatctttccgtccgcatcgacggtcagaaggccgagacggcggaagtagacgttcatcaggaaggcatcgcggatatcggtctggccgtgatcgccgaggacgatgatgttcgtctcgtccagcgtgcccttgcggcgcaggcattccagaatagcgccgagctgctcatcgtgcatgcgcagctgcgtttcggcctgctcactttccacgccgtaggtgtgccgggcggagtcgaggtcgcacagcttgacgagcatgatgtccggctgcgggccgtcctccaggatgtccagcgccagcgccatggtgaacaggtcaaggctgcgcgtcggtcccatcaggtagcggccgtgtttatagaagtaacgatccatcaggtttgcagtggccgtgtgctccagccattgctggggctggtagccctgatagctgtatggaacgatcatcggcatattcatggtatagtccgcgccgccggagacgggccagctcagagagcaggtcgtcaggccgttttcgcgggcgatgtccagcagcgttttgccgcggacgtccgatttcatgcagtaccacggcgcgtcaagatggccgccgcgggtcattttttcattgtgcacgatcccgtgccgcccggcgtaggtgccggtcaggatcgaggtatggcaggtgtaggtcagggccgggagcaccggctcgatcttttcgacgagcgcaccgcgctccaggatctgcgcgaagtgcggcatgcggcgcatgcgcgcgacgtcggaggcacagagggcatcgatacagaatacaaggactttcgacataggttctccttcctgttggaacggcggcgggtgcgggcccggccggaatgcgctggtctgcgtacaggcggacgtccgccgggacgtccgcctgttggaatgggcggtatttactttgcgagagcttcgcggcaggcggtctcaaaggccgcataggcggtgtcggcgtcgctgacgttgagggcaacgctctggaccatcttgtcgatctccgtgcgcatggccgctgcgccgggaacgctggcgagcatgccgatgtcgtcggcttcctcggtcagggccttgacggcgatgttcgtctcggcgaactgctggaactcggcgctctcgcgggcttccttatagatggggacggtgccgaaggcctcggcccactgcacgatgttctcggtggacgtgaggaacttcaggaacatgtaagcgccgcgggcatgatcctcatcggtgctgaggcaggcgaagttgttgccccaggaggagatgtagcggacggggccttcctgcgggatgggcacgcagccgatctcgaaggcatcgtttacggccagctcgacatagctgacaccggcgctcgagccgatgtaggaggcgacggcctggctgccgaacgggccggagaagaagacgtcctcgccgacaaggcggaagtcgccggacttcacaaggtctgcgaaccagttgagcttttccttggcgatggtctcgtcgatggcatagttgccgtcctcgtcgatgtagccgctgccggcctgcatgatgaggcactgataggtgtccacgagggagtcggtgccgaagccggggatgccttccttctcgtgaatgattttactgcattctgcgagctctgtccaggtcttcggggcctcgaggccatatttgtcgaacatggtcttgttgtagaacaggacctcgcccgccgtggtgcacgggaaaacatagatgccgtcgccccactgggtgatctcgctgtactgaccggcgggaacgttatccttgaagttcgggatgccgatctccgggtcgttgatgtaaacggacaggtcgacaaggcggccctcgttcagatagttgacggcgtcagacggatacatgttcacaaggtcagggccggtgccgttgcggaccgcctgcatggtcttgctgtcgatctcgctgtacggctgctgctcggcgacgagctcgtactcgtcctgcgaggcattgaaggcggctgcgagctcgaggaacttctcttcgtgctggtcggtgtaggcgtgccagtagacgatcttcgtcttctcggtctttgcgggcttcgtgtcttcggtggtcttgctgtcatcggtggtctgcgaggctccggtactggcgcccgaagcgtctgtctttcctgcgctgcatgccgcgaacaggctcgcgaccatgaccagagcaagcagaagggcaagaatgcgtgctttcatgtgttttctcctccattgtctcgtgtttttatcggaacgtcggatgacgctcactgctcaggaaatggtgtccagaaatgcggcaagctccgcaagcgtgtggacgcaccaggtatattccggctcgtggatgcccggataggggtcgatccagagcgtctgcccgccgatggcggaaatgggcatcagatcgttgaaggcgtggtcgccgatgctgatcagggcttcgggccgcgccagcagcgcgggatcgagggcctgcaggctcgcgatcatgccgtagggcttgttcgcactgctgcagatctcgcggaacgctccggcaaagccaagctgccgcaggaactcccgcacggtctcttcgtaggaattgctcagcaggacgacacggcagcgctgctccagccgcatgatggcctcataaagcccgcggtcaccgtgcatcccggcctgctccatctgcaggcgggtcaggcgatagacctcgtttgcgcggtcgccgtccagacagccgagcgcatcgccaaggtaggccagaacggcccacgcgtcgccgagatagaccacatcgtccgcgtgcagcgcctcggcataggtcatgccgggcagcacccgcttccgcagggcctgcacgagctccggcacggtggcggcctctgcacgcccacggcggtaaaaacggttcatgtccagctcacgcccggcgaagatggcctctgccagccggacaaggtccgcctccagcggctcggcccacgtcccggcaacaagcgtccgcagatagccgcggtgaaagacgctgttctgataaatggttccgtcgagatcgaagatgacgatccggttttgcatggcgggcctccctttgtgcggcggttggcaggctcgtgcggatgatccggaccgcgcccctgctgccgtaacttgattatatcacagatttggccgaaaaattttttcgtttgcgtgaaaatatgtcttttcgtcagaaaagctcggaaaaacatgaaaaaaagacgattttacatgaaatttatgcggatttaacacgaagccggctggaatgaaaaagaaaagcacttgtcagaagcacgccgtgccgttatactggaaatagaaaccaggtgcgcaccgcgcacgaaaggagaacaacgatgctgctgatccgcaacgcaaatatcaagaccatggccgggccggacctgaaaaacggctgcctgctcctcgaaaacgggaagatcgccgccgtcggccagacggtcgacgcgccggagggcgttgagactctcgatgcgcagggccgcctgctcacgcccggctgcgtcgaggcgcactgccatatcggcctcgacaacgagggcatgcgctgggagggcatggattataatgagatcgtcgagccgctgacgccgcagctgcgcgccatcgactccatcaatccgcaggacgaggccttcgggctggccctgcgcggcggcgtgacgacggcctgcaccggacctggcagcgcaaacgtcgtcggcggcacgttcgtcatcgtaaagctggccggaaagcgcgtcgaccggatgattctgcgcgcacccgccgcgatgaagtgcgccttcggcgagaatcccaagggctgctacggccacgacaagcgccagagccccatgacgcgcatggcggtcgccgccctgctgcgcgagctgctgctgcgcacgctccgctaccgcgacgacaaggaggcgggcaagaatccggcgttcgacatgaagctcgaggccatgctgcccgtagtcaacggcgagatcccgctcaagtgccacgcccaccgcgcggatgatatcctgacggccgtgcgcatcgcgcgcgagtttggcctgaagctcacgctggaccactgtacggacggcgagctgatcgccgacgagctggcaaaggagcaggtcccggtcttcgtcggaccgtcgctcggcggcaagacgaaggtcgagctgcgcaacaagagcttcacaacggcgggcacgctgtaccgcgcgggcctgacggtcagcatcatcacggatgcgccggtcattccgctgcagtatctgccgctggcggcagggctggcggcttcggccggtctgccgatggaggaggcgtggcatgccatcaccatcaacccggcccgcagcctcggcatcgacgcgcgtgtcggcagtcttgaaccgggcaaggatgcggacctcgtcctctggacggcggacccgcttacgacgatcggcggcgaggcgtggatgacgtttgtgaacggcgaggtcgtgtaccgcgcggagtaagagaatataaatcgtaaaaaatccagccaaggtgggatcactcccaaccctggctggatcatttttatgcgttcagggccgtatccctgcgcttacttcagcgcagccagacgggccgtgatggcggcaaactgggcgcgcgtcgcgctctcacgcggggcgagctcgttgttgcccatgccgaggatgatgccgttgccgacagcccaggtcatgggctcagtggcatagctctgcacgctggaggcatcagtgaagttgctcagatcgccggtcgtcgtcgtgtccatgttctgggaggcggcgaagcgatagagcatcgtgaccatttcctcgcgggtgacgtcgtcatccggacggaacaggcccttgtcatcgccgatgacaaccttggcctcctgtgcccatgcgacggcgtcagcataccagtcatccttgaggtcggggaaggtgctcgtgccggtgacggcagggctgcccgcctgacggtacaggacggtggcgaccatggcgcggctcagcgcggcttccggacggaacgtgccatcgccgtagccgacgaacaggccgttgaccagagcgaagtggacgctctcggcgtaccaggcgtttgcatcgaggtcggtgtactgctcgcagggatcctcttccacaagctcgaccttcacgcagcgctcggtcaggtccagcggcagcttgccgttgttggccttgccgatggcgcgcagagcttcgatggcgctgatgttgtcaatgggagcctcgttcacgttctgcacgggagtcttgttctcaaagacggagccgggcagggtggcgcagtactcgttgacggcaacgcggtaggtcttcgtgttgtccttgatgtcgacgacggtgccgtcatcgagcacgatggacacgacggtgcgggcaccgcggaccggtcggccgttttcatccttgccgtccggctctgccgtgtactttacgaccatgccggagaactgatcgccgtaattgctgttcttgaaggaattctcaacggtagcggcaagctccgcgccggtgaggtcataggtgtagaggcggttgccgaacggggtgatggcgtagatatcgccgacggtgacggtgcgggtcgtctcgccctcgttggccagaaggtcgcagcggatgccgccgctgttcgtgaaggcgacgacggtgttgagctccttcgtagcctcgagcatcaggccggtcagccagttgcccgcgatggtgctgctgctgttgccgatgggtgcacggcgggtgatgctctggtctgcaacgccgaggacctcggacatgtcgtccttcaccgcatcccaggaggcatggctgatggcgagaacggtcgggtcaagcttcgtgttgccctcggtgtcaaagaggttctgcgtgttgtcgcggccggtagtgttcacatagctcgggttcacgaccgtgacttccttcgtctcggtgttgaactggatcttggcgttggcatagcccttcgcctggcagttgccctggatgtaggccacgccgttgtcggcgacgccgtaggaaacgctgtgggagtggccgccgacgacgaggtcgacaagctcggagttgacgctgtttgcaaggccgcgcgggctggcgtgcgccacaacgacgacgacgtcagggttctcggctgcaacgatggactcgatcttcgcattgagcttctcaatgctcgggtcgatgtcatacggggcgatcttggcggtcatgatatccatggagtagtcggggatgtagccgacaagtgcgaccttcacaccggccttgtcaacgatgacatagtccttgacaaaggaggcgcggttcgtcgtacctgcatcatagagattataggccagaacggggatattgctgtcgcccttgaactcaccgatctcataggcgggcatggtgccgtcctcatcggcggcataggccttgacgtcccagtcgaactcgtggttgccgagggagacggcatcatagcccatggcgtcgaaggcggcgcgcagagcgttgccgtaggtcaggttcgaaacgggagtgccctgatagatgtcgccgccgtcaagcaggagaacggcgtcgttttcggcattggcacgggcctcgttcacgacattggcgatgtaggccatgcggtactggaacgtggactcgttgccggaggatgtgtcgacaaggtagccgtgcacgtcggtggtctcaaagacctcgatggtcttcacgggatttgcttctgcgtggacggcccatttcgtttcacggcccggggtgatgtccttgccctcggcggtcatttccttgatgtattcgccaatgatgaggggcacggagccgccgacgttgttgaagcgctcggagatggtggcatcccacagaacctcgtcgctgctggaggtgatgccggtggaggcaaaccagccgtaggcgtcggagtccttcgtcgcgctcagacggtaggagctgaggcaggcgtagatcgtgtcgtcatccttcacggccgtgccgtccgcgtaggtgatgttctgcacgcgctggttgtcgggattgccgacatagacgtcgtagttcacgccgtagaacgtgtcgcagccgaaaccgccgccgccaagctgaccgtcgtctttgacacggt

SEQ ID NO: 11101 - DNA, 70889 bp, Unknown
  gut microbiota DNA sequence
gggtttcctcccaagacggcgcttttctgttgtggatcagagcgaacactttacggcgaagccgccgatgaagaaataggtgttcgtccgaaccttgtttggtggaggcggggagagtcgaactcccgtccgaaagcaacttgactggaacttctccgggcgcagtccgttatttacattccctcatccggacgggaacggacaccctgccggatttggtagcttcatgatgcatggtgcgggcaaagcttaccgcacgcacggtctccactcaaatcacacccgagcccggctcgtggaccttccggggcggatgggcgcctaattaggcagccagtgcgtactgattgttgtcagttaattttaaaaagttgcccgttttatcgtggccaggcgccacggcccgctattccagcctcactacccccgtcgaaaccggtacgcccccggatcgagaaaatatgggctgcgcgggaggcaggggagagcctgcctcctgcgaaagcttacaaattaaaatctgccgtagggatctttgagcttcttcggctccggataggtctcaccctttgtatcgacgcggacggacttcatcttctgctcggtctccgggcggtcattgcggtccgtcttgacctggcagatggcgtcgacgacctccatgccggagagcaccttgccgaacgcagcatactgcttatcgagatgcggcgcgtcctgatgcatgatgaagaactgcgaaccggcggagttcggagactgcgcgcgcgccatggacagcacgccgcgcttatgcttcagcttattgtccacgccgttgaacaggaactcgcccttgatgcagtagccgggaccgcccatgccggtgccctcggggcagccgccctggatcatgaagccgggaatgacgcggtggaagatgaggccgtcataaaagccgctgtttgccagcgagatgaagttatagaccgactgcggcgcgacatccgggtagagctcggcggtgatgatgccgccgttttccatttcaatggtcacaacaggattttccatggtcagtgattcctttctttcatcgcgcggtcgatctgacggcgcgcgtccttattggcggcgtcctgccgcttgtcatagagctttttgcccttgcacagcgcgacctcgaccttgacgcgggagtttttcaaataaacggagagcggaacgatggcgtagccgtcgagctggaccttggaggccagccgctggatctcacgcttgtgcatgagcaggcggcgcgggcggatagggtccttattgaagatgttgcccttttcataggggctgatatgcatctgccgcacccagagctctccgtccttcacgctgcaccaggcgtccttgaggttcagggtgccaagccggatggacttgacctccgtgccgaacagctcaatgcccgcctcgaagcgctcctcgacgaaatattcatgaaacgcctttgaatttttggcaacgatcttgacgccggtcttctccatctgttcaccccgctttcctattattttctattatatcatatttgtcaagcaccaaacagcagcggctcgagctcctgcacggtctcgagataaaaatcgctgaagcggcgcagaaaagcgcggatctcggggtcgtcgtgcgaccagcccgcgcaggcgaacggcacgccgcaggcgtgggccatgtcatagccgggcttgagatcatccaccatcaatagctcatccggacgcaggtcatacagccgcatgatctcctgcagggcgtagggcgatggcttgcggcggtcctcgccgaggtcccagtcgaaaatctgatccggctccagatcgaagtgcagccggtaatcgcgcaggatgttttcacgcgcggagtgcgacgagacgcacagcaggccgccctcctgcttccagcgcgtcaggatggggcgcaggccgtcataggggggcgggatatgtgtggcgacatagcttcgccacatgtcgtactgcacgtcgatctcctcgggcgtcaggccgatatagtcgctgcaaagggcggaaaagccgggggagaagcaccagcgggtgaattcctcccgcgtgatggtcctgccggggcgaagcaccttcagggcttcgagaaagctgggataattaacggtctcctcgctgcgcacgacggtatcgtcgtgatcgagcacgagacagcgatagttcagcataggttcctccagaaaggatttcgatataaatgggaaagaccgagagccggtgtgcggcggtgagcgcccggtaggggaacattcaatggccgaagggcacccgttgcattatcctgacgtgtcattgcgaggagcgaagcgacgcagcgatctcataggacgaggttggatagcaggcagcctttggcgaaaacgtgaccgggacatccgcgtattcttttccatcgttattttagcagaatttcccgcaaaatgcaaattcttccccatggatttctgccttgatttacgaacaaatgtttgatataatgagagcagaaatcagcggaggtgagcacatggaggatatcgtgaaccggcagattgagatgatctccgtctgcgcagcggacggtgcactgacgccgatccgcttccgcatggaggacggcgagcatatgctgcgcaccgtcccgatccggcaggtcgtctgctcccggcccatctcctatgccggggtggaggcaatccagtacctctgcaagacgcagctggggcagcaggaggcgctgctggagctgcgctataccgtgcggacgcatcgctggacgcttttccgggtggtgtacggatgtccagggtgatctttcatgtggatgtgaacagcgcgttcctgtcgtggtcggcggcctaccgcgtgcgggttctgggcgaaagggaggacctgcgcgacattccctccgccgtggccggggagcgtgcagaacggcacggcatcattctggccaagagcattccagcgaaaaagtgcggcgtgaaaacaggcgagcagatctttctggcgcagcaaaaatgtccggggctgaagctcgtgccgccggactatgcgctgtatgtagaggcctcgcggcgcttcgtcgccctgctgcgggaattcgcgccggtcgtggagcagtattccatcgacgaggcgtgggccgacctgagcggcacggaggggctttatggctcgccggtcgcggcggcggagctgctgcgcacacgcatccgcgaggagctgggctttacggtgaatatcggcatctcgtccaataagctgctggccaaaatggcgggggagtttgaaaagccggacaaggtccacacgctgttcccggaggaggtgccgcagaagctctggccgctgccggtgcgggagctgtttatgctcggacctgccacggagcgcaggctcaaccgcattggaatccatacgatcggcgagctggcgcaggcagacccggagctggtgctgcactatctgaacaagccggggctggcactgtggcactcggcaaacggcaggtgcagcgaggagctgctggcgcagccggaggcaaacaagggctatggcaattccacaacactgcccgccgatgtcacaacggaggcaggggcgcagcgtgtgctgctgtcgctctgcgaaacggtcgccatgcgcctgcggcgtgacggcaaggcggcgcggtgcatttccgtgagcctgcggagcgcggatttcgtcacgttttctcaccagacgatgctgcgggaggccgtgcacgggacggaggagctgttccgctgcgcctgccgggtctttgccgaggcatgggacgggcagacgccgctgcgccagctcggcgtgcaggccacaaggctggaggagccgcagccgcgccagcttgacctgtttgccgtgggcggcgcgcagcagtatgcccgcaaggcgatcctggatgggaccgtggatgccctgcgtgagaaatatggcgagggcgtcatccggcgggcgcgctttaccggcgcgaacaccgtgctggcaggcggactgtccagggagcggcggacgggcatcacaaagccgctggatgcggagtaaaagacatgaaacggatgcagatacgccacagcattgtcaaggataaggcaggttatcggagaacctgcgcggcccccaattttggaggaaagaaatgcaatgacgtaatgccgcccgatgtacccgcgcaccgtggcttattcgcactctatgatcggaggaatgaagcgctctattgcacggcgcagcttggggtggcgaatgacgaaatgaatgcacggcgctttattctttgataccattgcccatttcccttcgtgaatcaggatattgagattgctgaacggctgaaaatgcaccaattccagggaatagttcggctggcactttccaaaattttccgtcagacggagatgctccagatattccttgtagctatagaggaaatcgtgctccggaaacaggccggaaaccggaagagagacggaggtctcctcaaattcagcttgtgtcagcagtggaagttcatccttgacgtgattgtcctgcagcacgcggaggaagaggatgcgctgctgttctgcaaaagaaagaattttccgctgctccgcctccggtatgtggcgaactgtcagaaatgtcgtcagaaattcgggcgttgccgtatagataggcggtgcagacagaagatttcgacggttcccggcggtttcgctgtctgccgccagaaaggcattcagttcattttgcgacgtctctcgataaatgtccatcaggggcttcgctttctgcagcagatcatctgcacgcttccggtaataggccagatcacgctttccccttgaaaggcgatacattccgtcttcatgacagcctgcaatacactcgccagaaagcgcggcggagccggaaaccttcagaaagtggcaaaaaacagtgttcggtgcgctctgaagatagtaaggagagatctgcccggtcatatagagcgggatgtggctttccaatcccagcatcatctcctgaaacggacggttgaggctgtgaatgatgttcagatgcaggccctttttcagcaggagggccagcccgagcatatatttcttggaaaaatccagatcagctgccatatcctccatcggcatatcgctgtagaggaatacaggctcagtcgatttggaaaggacggtcgccttgaaaaagtccaattctccctttttcatctcctccaggccgtgataggttctggcagtctggaggagaaacggcacgttgggaacacatagctcgtcgaagtgaatcgcccggatgtactcattcagatcaaagctgttcattgcgttcaggaaggcggaaacagaggagctctccgcgtcttctgccgcagcgctgcccataagccagtctgcgacggtacgaaaatattcagtctcgccggagagagagccgaacggaacgccgagcatatgcgctacggccgaacgaccgctttccccatcaaaccggcggacaacaaaccttgcaacatcggcggcaaagcgcttgggatcggcaggtgcccgctgcccgctgcgaatgcgggaaagaaaggaagggtcataggaaatagccttcgccagctccgccgaagaaatatgcagagcggtcagaagccggttgatttttgtacgcagtatctccgggtcggaccgctgcagatccatgcagtctgtgcactgcgcatagagcgagtccggtgaaagctgctttcccttacatgcggcgatggtgcaaagtccctgaagcaggagcttaagaccctcctgatcgggagtgcgttccccggagcgaaagcggctcagcgttgcggcagacagaccgcatgcctcagacagctcctttgcggtacagtctgccagctccatccattcgttgagtctttcggaaaatctcatagaggataccttcctttcacgcatttcgtccgtccgtagcttttgactgggcaggttttgaccgtttgacaacgttatcatagtacatgggtttccgaaatgtcaatgacaaaaatgaaagacttttcaaaaacggtggcgtctatgatatagtaaaaaaagaatcagaccatcgaactatcgaagaacctaagcgagcccaaatcccggcaggaccttttcgaccggctgctttcggattaccggtcaggaacgaaaatcatgcagaaaggatctgtagtatcatgaaacggattattttgtccctgctgctcaccctgtccctgacgctttccctgcttccggcggtgaatgcggcgggcatccccggcgaggaaaagctgcccggcgacgcgggctacggctttacctacgcattcgtctcaccgacgaccattgagatcaccgcctattacggctacgaggcggaggtcaccgtcccctcgaccatcgacggctataccgtcgtgggtatccaaagcttccacaacgaggagggctacagcaaccccaatatctttgtccgcaaggttgtcctgcccgaaacggtgacgtacatcgcagacggtgcattctacgacaacgacgactggtcagcgaagacccactttgagctgcgcgagatcgtcctgccgcagagcctgaaaaccatcggcaaaaatgcgttttaccacaactactacctgcaaaagatcgacattcccgccggcgtgacggagatcggcgcgggtgccttcgcaaagtgccagaatctgtccgacatcaccatccgcggcgagaacaccctcctgcatggcggcgcgttcggcgagaagagcggctacagcgtcggcgcctttgccggaaagctcagcgagctgcaccagcagtggctgtatgacgacagcgcctcggacttcttcatctggcaggggcagctcttggactacaggggcacgagcaagatgcccgtcatccctgacaccgtgaaggtcatcggcgcggcggcgttctggcggtcggacattaccggcgtgaccatcccgtcgagcgtcaagctgatcggcgcgtcggcgttctatgagtgcgcctccctgacctctgtggacatccccggcagcgttgagcgcattgacaacaacgccttctgcgactgcaccggcatgacctccgtcaagctgaacaaggggctgaaggtcatcggcgagggcggcttcaacgactgtgatgggctgacgagccttgtcctgcccgaggggctgaccacgctggaggagcgggcgttttacgactgcgagaacatcgaaagcttcaccttccccaagtcgctgaccgatatggaagactccagcatctacacctcgaagtggtatgaggggcttgccgacggtacggagctgtactgcggcagcgtgtttctcggctgcaaggggcaaaaatatccctccaagctgaccgtccgtcccggcacgaagatggtgcgcatcgagcgggactatttggacggcgtgaacgagctgatcctgcccgacgggctggaatcgctcagcatcacggaaggcggcggcagcatcaccaagcttaccgttccggagagcgtccattacatcaatctccgcaaatttgcccatctgaccgacctcaagctgccgacgacggcggttctggaggagagctgcttttccggctgttaccggatcaagaatctgaccatcccgaagggcaatacgacgctgaagggccttagcgtcggcaggacggcgcacgtggttctgcccgacgacgtgctcgaggtgcgcggcccgatctccaacggcgacccctatcgctccaacaacaaggacggcaactccaacctcaagtcgatcgacctgaagaacgtccgcattctgacggacggcgcgctcagcgactgcgttgcgctcgaaagcgtgacgctgccggattcgctcatcaccctcggcggcggcgtgttttccggctgtgcgcggctgcactcgatcaagggcggcaggaacgtccgccagatcggcgatggctgcttctccggctgcgccgcgctgacggatttcggcgagctggaaaagaacgtgacccacgtcggttcttgggccttccagaactgcggctggttccacgatcagccgaacggcgtggtctatttcggcagggccgcctatgcctataaggggtcgatggcggagggcaccgtcctgagcctcagggacggtacggtttccgtcacctatgagttccttgcgggtcagatagagctgaaccccaccttcgaccagccgaatctcgcggggctgatcctcccgcagagctgcaaatacgtagatgactacgccttcgccggtgcgaagaatatgaagttcatcgacctcggcggcgtgcagtacatcggcagggaggcattcaacaacagcgcctgcgagagcatcgtcctgccggattccgtgcgctttgtcggaaacaacgccttctccgcgccgtatatcaaggcaattcatctgaacgacggcctgcgcgtgctggacgagggcgcgttcttcacctatggcaagggcaagggcgttaccatccctgccagcgtcgcctacatcggctatcaggcgttcggatattgcccggtcgacccggagaatccgtttggcggtctgacgaagatcgacggcttcgtcatccgcggcacggcggggacggctgcgcagacctacgccgtggacaatgaattcaccttcgaaacgggcacctgcaccgcccatcagcccgtgacggaaacggtcgcgccgacctgctgcaccggcggcttcacgcgcacggtctgcgccgtctgcggcgccgtgaccgcgtcgggaaataccgcccccgtcgcgcataagcccgtcgccaacgacccgatcgaggccacctgcacccgtccgggctataccggcggcacgcactgcgccttctgcggcctgaccctgactcagccgacgcagacccccgcgctggggcacgacgaggtcgtcgctacggaggaatacgagtattctgcgtattacggcatgatccgccactactgccgccgctgcgagctgaagtggtacgacacggagggcggcgggcacgtccacgactatacctaccgcaccgacaccgtttatccgacctgcatcaacgcgggctacaccgagcacttctgcgcctgcggcgagagctatcgagacggctatattcctgcgctggggcacgattatgtcaatggtgtctgctcacgctgcgggaacaccgagggcagctgtgacggcggcgcaaactgtccctccaagccttatcacgacgtggacaccggacgctggtaccacgagggcatcgactatgccattgcgcacggcctgatgaacggcgtcggcaacggcatgtttgagccggagagcagcatgacgcgcgccatgctcgtcacggtgctctggcgctacgccggaagcccggccggatgggagaatcccttcacagacgtgccaaacggaagctggttcacgcaggccgtggcttgggcggccgaaaacggcatcgtgaacggcgtcggcaacaataaatttgaaccggacagcaatatcacccgggagcagatggcggcgattctgttccgctatgcagcaatgtccggatttgatacctcagcgcgtggaaatctggatcagtatcccgatcggggcgatgtcagcggctatgccgtggagcctctatcctgggcggtcgccgagggtctgataaagggaaccgacaatgggaatggcattctcctcgatccgcagggcaatgccacccgcgctcaggtcgcaacgatcatcatgcggtttattcgtaccgcagcaggcaagtaaaaagactgccatgaatcacgaggccaaaaacatcgacctaaagtcttgcagaaaaagcgtaaaagaaacggtccgagcgtcctttcctgtgcaattcttaccagatagaacgaagcaggtcctcccgatatgggaaggacctgcttcagcttgcttctaaaagtcccttcaggatttttcgccaagcgatataccgatattatatttacagggaaaaatccagctcgtcatattcggaaaaatcctttggcttgcggcgcttcggcacgcgtttgagcggatcgtatttgaacttccggcagtggtggcaggcagcgacaaagccgcgcttggcgcagagatacgtttcgtcgtcgagcttcccggcgtagacacagtaggagcagaatcggtcgatcttttttcggaacagcatgcgggccacctccttttttgctattataccgcagcgtggcgcaaatttccagcccgaatttttcgcagcaggggagccagcagtgcgcaagcggtcaacgctccggcagacagcagcgcggcaggacaaggcgcaaagcaggcgagggccagcacggccgagagcaggccatgcagcagttttgcggaaaagtaaccgtgcggacgaagccccgccgtctgccagaggctcatggcctgaaaatggacgcaaagcccgccccagcccatcagaagggcgcaggcggcctccgcgccggggccggagagcagcagaatgccgctggaaagctcaagcgcgccgcaggccagcgcctcggccagccggttcggcagcagggccgtcagcccggcggcgcgcagcacggcgagcatcgacgagaaaaagacgatgagcccgctgacctgcagcagggcggcgcagcttccctgcacggcttccggcagcagggaagaaagaacgggcttctcccggcgtaccgtccgcagggcagccagaggagcagagccgggcaggagaaggcccgtcatcagggcggaaagtgcatgcaggccgtagaggatcagcccacggcgcacgtctccgagcacggcagctccgatgagaccggcaaaaaagcccggcccggaattgttgcagaagcacagggcgcgctcggcctctgcctttgaaagtgcaccggcgcggtacagctccgtcacggcggccgccccggctggatagccgccgagcaggccggtcagcagggccggcaggcacgcggcgcggacgccgaacagggcacggaacagacggtccgcccgccgccccggcgtgggcagcggaagggcagtcagcatgcgggagacgacgaaaaacggcagcagcgcgggaatgacgcgcgctgcgcaggcgcgaaggccctgcagcgcgccggacgcggcggcctgcggcgcgagcaggagcccggcggccgccagaagcagcacaagcagcacagaagatcacctcaccggaatatattgccggagccggaaaggaatgcggaaagcgagcatagaatgtctccgggtgatcgaatgaaacggggaaaaaatctggcgcagcgcctgacgctgccgcaggaggtcgtgtcgcaggggccgctgaccgagctgcacggcaatacgagcgtctgcatcgaaaatcacggaggcattctggaatacacggacacccgcgtctgtatcgcggtgcagcgcggtacgctgaccgtcagcggctgcgggctgcgcatcctgcgcatgacgcagcggcgcgtggagatcggcgggacgatccgctgcgtagaggtgtcctgagatgagccggctgatccgctatctgcgcgggagcgttcgcttccgcctgaccggcgccgcgccggagcagtgtctgaacgcccttgcggctgcgcggctggaattctgggacatcgagcgcgaggatgcgctaaacctgtcgctctgtgttcctgcgcgtgaggcagagcgcctgcaaaggcttgcgctgcgctgcctgtgcacggcggaggtgacggagcattccggcctgcgggcgcagttcggcggtcttctgcggcggcccgtcctgctgctggggctgctggcggcggccgcggcaacgttcgtgctgcaggaattcgtctggacgatcgaggtcgagggaaatgacaggctcccggccgggcagatcgtgcaggcgctcgaggagctcggcatcgcgccgggaacatggggcccatccatcgattcgcccgagacacgcaaccggatgttgctgcgcatgccggagctggcatggctcgccgtgaaccgctccggcgggcgggtgcaggtgctcgtgacggagcggcagcagccgccggacacgcgcgctccctacgccgtggccaatgtggtggccgcgcgggacggcgtgctcacggaggtctccgtaacggagggcatgcggctgtgcgccgtcggcgataccgtccggcaggggcagctgctcgtctccggatatgaggactacggcctgttcatccgcccggtgtgcgcctcggccgagatctatgccaggacgtggcatacggggaccgtcgtcacgcccgcggagcggctggaaaagcgctataccggccgggagtggaagcaggtcacgctcatcgtcgggaaaaaaagaataaaattatggggaaacagtagcatttcccagcaggattgtgataaaatgatcgtggaaaaggctgtccggacctccggctatgcgtatccgctgcggctggagacggcaatcctgcgggaatatgtgctggagcctgcccccgcgccgcaggtgcagacggaaaagctgctgcaggaggcgtggcggcgcgccgtgcaggcgcagatgctagcgggcaggatcgatgccacgcaggagagcctgctgatgcagggcggcctgtgcatcctgcaggcgcagagcgactgcacggagctgatttcccgcacgctgccgctggaggcggcggactgacaaaggagaatccccatgagcgaacgaatcatcaatgccgaacgcatcgaacagatcatcaatgtgttcggctcgtttgacgaaaacatcaagcgcatcgagcagacctacggcgtgaagatcacgaaccgcggcacggagctgaagatctcgggcgaggacgaggcggcggaccgcgcaggccgtgccatcgagggcctgctcctgctggccgcaaagggcgagacgatcgacgagcagaaggtgcgctatctgatcgaccttgtttccagcgggaacgaggacaagatcggcgaaatggcgaaggacgttgtctgcatcacagcaaagggccgtcctgtcaaggcaaagacccttggacagcagcgctatatgaaggccattttgaaaaataccatcacgatcggcgtcggtccggctggtaccggcaagacatacctcgcagtggcggctgccgtggcggccttccgcgagaaggcggtcaaccgcatcatcctgacgcgccccgccgtagaggcgggcgaacggctcgggttcctgcccggcgacctgcagaacaaggtcgacccgtatctgcgcccgctgtatgacgcgctttacgatatgctcggcgcggagacgtatcagaaatatctcgagcggggcaacatcgaggtcgcgccgctggcctatatgcgcggccgcacgctcgacgacagcttcatcatcctcgacgaggcacagaacacgacgcgcgagcagatgaaaatgttcctgacgcgtctgggcttcggctcgaagatcgtcatcaccggcgacattacgcagatcgatctgccctccgacaaggtcagtggtctgaaggacgccgtgcgcattctggacaacgtaccggatatcgccatctgccgcctgacggccagcgacgtcgtgcgccacgccctggtgcagcgcatcatcgcggcctatgagacggcggagcacagtgcgaagaacggcctgccggggcagaaaaaagtatacaggagaaagctatgaagcatcagatcattgtgcgctattccaaccgcgcagaccgcagcctgccgctgacgctgcacctgcgcaagtgcatcgccgccgcgctggaggccgagcatgtgaacgttccctgcgagatcaacgtgctcgtcacggatgacgcgggcatccgcgccatcaaccgcgccatgcggaacattgaccgcgagacagatgtgctgtcttttccgatgttccagttcacgccggggcagttcccggaggacgtgcaggaggacatcgatccgcagaccggtctgctgccgctgggcgatatggctatctcgctcgagcgtgcgcgggatcaggccaagcgcttcggcaattcgctccgccgcgagacgggctatttgacaatccactccatcctgcacctgctgggctatgaccacatggacgagggcgaaatgaagcgccagatgcgcacgcgcgaggagatcatcgccgggcagctcggtctgcagcgatgagcgtcgaattccgccgcgccagcccggaggatgcgcgcctgctggccgaaacgcgccgccgcgcgtgggatacgacctaccgcggcatctatcccgatgccatgatcgacgaatatgacctcgaggcccatacggcgcgcgacgctgcccgcatcgccgacccggcgaacgcggtgttccttgccatggacggggcggaatgcgtgggctattttacatacggaccttacacctacggacgctataaggactttgcactctgcctcaactcgctgtattttttgccgggctaccggcggatgggtctcggcaggcgcgcctttgcgcagctgaccgaattctgccgcgagcgcggcatcccgaagtttttctgcggctgcaattgccacaatctgcccgcgcaggcattttaccgcgccatgggcggcgtggtcggcgcagtgcacggcggccatgcggaccgggccgaggaccaaatgtattttgaatttcagactgtcaaaaaacctgcccagtcgaaagtttcggagggaaggaaagtgtgaaagaaaccgtcagggtgtcctttcgcgttccatcacccgctgcagcggcagaattgcaaaatcatgctacaaaatttgattttgcaattctgaaagcagcttggcggaaatgtccgaaaggacattttaacaagctgattttgaatttaccataggagaagaaccatgagccagaaatctgccatgatcacgatcgtggggcggccgaacgtcggcaaatcgacgctcatcaaccacctcgttggcgaaaagatcgccattgtttcccataagccgcagacgacgcgcaaccgcatctgcggcatcgtcacgcacgatgacacgcagctcgtgttcgtcgacacgccgggcttccataagccgcgcacgcgcctcggcgactatatgaacaatgtcgtgcacgactccgtcgccgatgtggatgccgcgctgctgctcgtcgagcccatcgcgcacatcggcccgcaggaggaagagctgctcggccagctccgcgccgcgcatgcgccggtcatccttgttatcaacaagatcgacacggtcgagaaggagaatctgcttgccgtcatcgcggcctatgccgcaaaatttgagttcgacgccgtcgttccggtgtccgcgaagttcggcgatggtatccctgacctgctgcgggagtgcgcccgccacgcggccgacagcccgttcctgttcccagatgatatgacgacggatcagccggagcggcaggtcatggcggagatcatccgcgaaaagctgctgtggaacctcgagcgtgaaattccgcacggcacggccgttgagattacgaaattttcggagcgcgacagcggcgtcatcgacatcgacgcgacgatctactgcgagaaggccagccacaagggcatcatcatcggcaagaacggctccatgctgaaaaagatcagcacggaggcgcgcgaggactgcgagcgctttatgggcacgaaggtctttttgcagacgtgggtcaaggtcaaggagaactggcgcgacagtcagaccatgatccgcagcttcggctacgaataattgcgcaaagcaggcttatcctaaggacagcccgtttgcaaaaacggagcaccgatgacaggaggcctgctgcatgacgagagaacagctttggagcatattctgggagacgggcgcaccggaggcgtggctgctgtatcggcaggagccggcgcgcggcgaggcctcggcggggcggtgagccgtcccgcaaagccttgcaggaggtcggagcatgtacatcaaaacagacggcatcgtcttgcgcgaggtcgcctatcaggacagcgataagctgctgaccgtgctgacgcgcgaatacggcaagctgactgtgcgggcgcgcggcgtccgcagcagccgcagccgcagcaaggcggcctgccagctgctggcctattccgagttcacgctgctcgagcgcggcgggcgctatgtcgtcacggaggccacggcaaaggagatgtttccggagctgcggaacgatctggagcttttgtcgctggcgtcctattttgcgcaggccgcggacgtgctcagcccggagggcgaggagaatccgccgttcgtatcactgctgctcaacgctctctatgcgctcggcaggctcggcctgccgcagaagctcgtcaaggcggcctttgagctgcgcgccatgtgcctgagcggctatgagccggacctgcgcggctgcgccgtgtgcggagcgccggagccggaccgcttcaatatctcacagggcgtgctgcagtgcgctgcctgccgcacggaggaagagaacgacatccgtcttcccatgagtgccgggacgcgcgccgccctgcgctatctggactccgcgccatcttcgcgcgtattctcgttccggcttgcggagccgtcgctctccgagctggggcagatcacggagagctatctctgcacgcggctggagcgcggcttttccacgctggatttttataaatccttatttctttgaatccatatctgaggtacctgtaccatgacagaactgtacgaaaaatccctgcgcaagctcgagctggacaacgttctggctcagcttgcagactgcgcgaactccgaggacggcaaggaccgctgccgcgccctgctgccgctggacgatgcggaggagatctgcctgctccagcagcagacgacggcggcctgcggcatgatcgtccgcaagggcgcgccgggcttccatgagctcaagcccgtggcagccagcctcgagcgcgctgaccgcggtggctgcctgacgccggtggagctgctgcgcattgcgggtgtgctgcgctgcatccgcaatgtcaaggcctattacagcgaggacggcgagccgaccgtgctggacgtctattttcaggagctttcgccgaatcgctatcttgaggagaagatcacgaactccattctctccgaggaggagatcgccgatgcggccagcagcgagctggcggatatccgccgccatatgcgcatccagagcgcaaaggtcaaggattcgctgcagaagatcatctcctcgccgagcttttccaagtatttgcgtgacccgatcatcacgctgcgcggcgaccgctatgttgtgccggtcaagagcgaatacaagagtgaaattcccggtctggtccacgatgtgtcctcgacgggcagcacgttcttcatcgagccgatgtccgccgtgaacgcgaacaacgccctgcgcgagctgctgatccgtgagaaaaaggagatcgagcgcattctgaccgcactgtcggccgaggcggcctcgttccgcgagggcatctgccacagctatgagatgctcgtgcagctcgactgcatctttgcccgcgcgcgcctgtcgcacaagatggacggcatggagccggagatccgcacgaacgccagtctggagctcgtgcgggcgcgccatccgctcatcgaccgcaagaaggtcgttcccgtctcgctgcggctcggctcggatttcgacacgctcatcatcaccggcccaaacaccggcggcaagaccgtcacgctcaagaccatcggccttctgacactgatggcggagtgcggcctgcacattccggcggaccacggcagcgccatctccgtcttccggcaggtgctggcggacatcggcgacgagcagtccattgagcagtcgctgtccaccttctccgcccacatgaagaatatcgtcgacatcgtcgccgactgtgaccgcgacacgctcgtgctgttcgatgagctgggcgcgggcacggacccggccgagggtgcggcgcttgccaatgcgctcatcgagttctgccgccagtgcggcagccgcgtggctgccacgacgcactatgccgagctgaagctctatgccatgcgcacggagggcgtcatgaacgcctcgtgcgagttcgacgtggagacgctgcggccgacctaccgcctgctcatcggcatccccggcaaatcgaacgcctttgccatttcccgccgcctcggcctgccggagccgatcatcgacaaggcaaagagccttgtgaacgaaaacgaccgcaactttgaggacgtcctgaaccagctcgagcagcagcgccagcagatggaggccgcaaagctcgaggcagagcgcctgcgccaggaaacggagcagatgaaggaaaagtccgaggcctattatgccgagatcaagcgcgagcgcgaaaaagccgtgcgtgcggcccgcgccgaggcgcagagcatcatcgacgatgcccgccgcacctcgaacgaggtcgcagacgagctgaagcagctgcgcaagcagctgcgggaaaacgcggacgtgcagggctcgaacgcgaagcagaccgagctgcgccgcaggctcaacgaggcagaggaccgccttgccgggcatgacgacgcgccgaagtcccgcccgcaggccacgcgcgccattcgcgtcggcgacacagtcgagcttatccgcttcggcacccgagcgagcgtgctggccatcaacaaggacggctcttatctgctgcaggctgggatcatgaaggtcacggcgcagccggacgaggtatatctcatcgaggagacgaagcagcaggccaagaagatcatcgagcgcagccagcgcgccttccgcagcgcgggcgcctcaacggagctggacctgcgcggcatgtcggctgacgaggccattgctacgctggatatcttcctcgataacgccatgatggccaatctcgcctccgtgcgtatcatccacggcaagggcacgggcgtcctgcgcaaggccgtgcaggacgagctgaagcgcaatcgctgcgtgaagcgctaccgcctcggcgtctacggcgagggcgaggacggtgtgaccatcgccgagctggcctgacgggaaatcccggcaaacttgagaaaacagttgacaaatgcccctgttttgttatattctaagagaagcatatcacctcgcgcagcctcaaatttgaaggagtgacacaggatgtatacagaaaaatcggtggtcaagtgtgagtctggtctgcacaacagacaggctacgtttttcattcagaaggccaatgaattccgttccagcatctggatcgaggtcgacgaccggaagatcaatgccaagagcctgctgggcgtactctccatggccatcaccacgggcacggaggtcacgctgatcgccgaaggcccggacgaggaagcggcagtcaagacgctggcgcagatgctcgtcaaggatattttctgatccgctcaacatgaacggctgccccaaacgcacggaatcggcggcgtttggggcagctttctcgtcagaatggagcaagcatgacccgtgaggaattgaagcaggccgcgctgtcgctgccctatgagccgggcgtttatctgatgaaaaacgccgccgggaccgtgatctacgtcggcaaggcaaaaaaactgaaaaaccgcgtcagccagtattttcaggatacggcggcgcacaatgcaaaaacgcgcaaaatggtgtcgaatgtcgatcattttgagacgatcgccgccgcgacggagttcgaggcgctcgtgctcgaatgctcgctcatcaagcactatatgccgaaatacaacatcctgctcaaggacgataagggctatccctacctgcgcgtcgatctgcgcgaggactatcccgtcatcacgctggccacgcgcgtcacggacgacggcgcgcgctatttcggcccctacggaagccgcgggcgcacgcagcaggtcatcgacgccctgcgcacgacgttccgcctgccgggctgctccaagaaattcccgcgcgacatcggcagggaacggccctgcctgaactatcagatggagcgctgcgacggctggtgcaggccctgcatgcagcaggcggactatcacgcgcggctggagcaggccgtcctcctgcttgagggcaagcaccagagcctgtgtcaggagctgcaggagaagatggaggccgcggccgaggagctgcgctttgagcgcgcggcggaataccgcgaccgtctgcgcgccattgagctgctcgggcagaagcagctcgtcacggcaggcacgatggcggacaccgacgtcatcggctggtaccagacggaggcgaaagcctgcttcgcggtgctgcactttatcaagggcaacctcatggataaggactatgaggtcctgcctgtgccggaggagccggacgacgcgctgtcgtcgcttgtcaagcagtactatctgacgcgcaaggccgcgccgcgccgcatattcctcccggcggagatggacgacgccgcactgttcgaggagcttctgctgcaggagctcggcaagcatgtgctcatccgcacgccgcagcgcggctacggccgcaggctcgtggagctggcggagaaaaacgcccgcgaggaggccgagcgcgctacctcaaaggcagagcgcctgagcggcacgctcgtgctgctgcagggcatgctcggcctgcgcgagccgccgcgccgccttgaggcctatgatatttccaacattgccgggacggatatcgtcgcctccatgacggtgttcgaggacggcaagccgaaaaaaagcgattacaagcgctttcaggtacgcggtctgacggatcaggatgattatacttccatgcggcaggtgctctgccgccgcttccgccattatctcgacggcgacagcggctttgccgagcggccggacgctctgctcatcgacggcggcgctgtgcatgccgaaacggttcgcgccgcgctttcggaaatgggcgtgtttctgccgatcttcggcatggtcaaggataaccgccaccgcacgcgcgcccttgttacgccggacgggcaggagatcagcatccagagcaatccggcggtgtttgccctcatcggccgcatccaggaggaaacgcaccgcttcgccattacctatcagcgcaccctgcgcagccgccatgtgcgcggctcgcagctcgacgccatccccggcatcggggaaaagcgccgcaatcagctcctgcgccgcttccgctcgcttgcggccatccgtgccgccagccgggaggagctgcaggaggtgctgcccgcgccgcaggcgcaggcggtctatgaccattttcacggacaggagcaaacacagccatgagagttatcaccggaacggcgcgcggcacaaagctgaaaacgccggagggcatgctcacgcgcccgacgacggaccgcgtgaaggaagccctgttcaacatcatccagttcgacatcgcaggcgacgtgctcgacctgttcgccggaacgggccagctcggcatcgaggcgctcagccgcggagcctcacgcgccgtttttgtcgaccaccggcaggatgccgcggcccttgtgcgcgagaatctgcgccgcacgcattttgaagacaggggagaggtcgtctgcacggatttcacacaatatcttgcgcggtgcaggcggaaattccgcctgatcttcctcgacccgccctatgcagaaaaatccctcgaaacggcgattcagcgcctatcggaaattgacattttgtcggatggtggtataattatcacagaaagacccctcggcaaaccgcttgcagaggaatttccgggcttgacccgctcaaaagactatcattacggaaaaacgaccatcaccctgctccgcaagaccggggcgggcggcggcaacgattaggaggcaatatcatgaacgaacacggcattgaagaattgatcggcaccctgtatgaaatggtgcaggacgcacgctccgtgccgttcagcagcgataagtgcgctgttgagcgcgaaaaggtcctcgacctgctcgacgagatcagcaaccagctccccggcgagctgaagcaggcaaagaccatcgtggactcccgcagcgagctcattacgaacgcaaagcgcgaggccgagaatatcatgaagtccgcgcaggcacaggcccgccagctcgtctcgcaggaggccatctatctcgaggccaagaatcaggccaacgatatggtgcgcgccgcgcaggataagatcaaggagctcaagaaggtcacgaacgactacgtcgacgattccctgcgccgcacggaggaggccgtcgccgaggctctgagcgagatccgcaattcccgctcgaagttccgcgccctcgtcaatccgcaggccaagaacaactccgcgatcatcgaagacgtgtaaaccggcgccatgagccggaaccgtattctcattaccgccgtcgcggctgcgctccttgtggtctgcggcatcggcattttcttcgcatccaaccgcgaccatgcggcagagcgcgccgacgagtggaccatgcagggcatgaccctcgcaccggacggctcggccacgccgtgcaccgtgcgcatcgcgggcacgtcccgctcctatttgctcggcggcagagtcggcgcgttcgagacggggacggacggcggtatctatgtcgacggtacgcgcgtctgctccggcgttatcctgccggacgacgcctttgacccgtggctcacgatgcaggcggataccgatccgttctggatcgcagccgacggcagcacgctcgtcctgccgcttcccggcatgcagtcgctcgtcgtcgctccggcagagtcagagcaggcggcgcaggagcttttacagtcgctgcaggaagcgctcccggatgagacaaaaaacgcgatctccccttatctcaagtctcaagtgacccgtggttaacgattacccgttttatgctgaaagggaaggtgctatatgaaaaccgcagaaaacagaaagcatgcagctgccattgccgcagcctgtattgcgcttgccgcgctcgtggttctcgggaccgtgatcatttcgtattggaacacgccgattgcaaagacggaaagccggacgatgcaggcgatgcttctgcaggaggatggctccgcggagccttgtaccgtcctcatcagcggcatttcgtatcactaccttttccggaatcacgcggattcctttgaggcaaacgatccgggcggcgtattcgtaaacggcagccgcatcatggacagcctgatcctgccgtcggacatcgactcggattggatgttctggcaggacgatatgctctggtgcgacgcggccggggagcagctcattgtgctgctgcaccgcgatgcggacggcgcgtttgcagagaccggcacgccggtgctcgtcatcgccccggcggagacggagcaggaagcgcaggcccttctgcagtccctgcgggagacgcgtgcagacgatgcggaaacgcagcgcctgatcgaaccgtttttgaaataaccggacgacacagcgccccgtcccattggggcggggcgttcgtgagctttcccggtcgtgttattccgaggagcgaagcgacgtgggaatctcgtggagcaggcttcggattcgcctcggcttgccaaaatccgcagccgatcctgcgagattgccacggcccctcgcggggcctcgcaatgacaaatttgacagtctgagcttatgactttaattccatattttaggaggctgaaatgacggaactggaacgttatcagcagtggtgcgagcaggcgccgctggatgaggccgggcgcgctgcgctggccgccatgcagaacgacgagacggagcgcaagggctgcttcggcgcggagctgcagttcggcaccgcgggcatccgcggcattatgggcatcggcacgaatcgcctgaacgacttcaccgttcgccgcacggcgcagggccttgccgcatggctgacctcgacggagctgccgcagcgctgcgccatcggctatgactcccgccacaactcccgccgctatgcggagctgtgcgccgtagccctcgcggagcgcggcgtgcatgtctatgtctatcacgagctggccccgacgccgatgctctcatttgccgtgcgccagctcggctgcggctgcggcatcgtcgtttccgccagccacaacgcgggcatctataacggcatcaagtgctacggcccggacggctgccagatgacggacgagccggcggcccgcgtgtttgccgagatcgaaaaaatcccgtattttctcccggcggaaaagagctttgaggacttccttgcggagggcggcgtggaattcatcgcgccggagctgtgggagcgctactatgagaccgttctcggcgaacgccttgccactgtcccgtccgataacctgaatctgctctacacgccgctgtgcggcacgggcaacaagccggtccgcaccgtgctcggccgcatcggcgtgaacgtcgccgtcgtccccgcacaggaaaagccggacggcgatttcaagacctgcgaatatccgaacccggagacggacgccgcgctgaacgagagctacaagatcgcgcgcgagacgcacccggacctcatcctcggcacggacccggactgcgaccgcgtggccgtggccgtcccggtgggcggcggcttccgcaagctcagcggcaacgagctgggctgcctgctgctggactacatcctcggcacgatgcagaaggcgggcacgctcccggcagaccctgtcgccgtgcgcagcatcgtctcgaccccgatggcagacaagatcgccgcaagctacggcgtgaagatgcgcagggtcctcacgggcttcaagtacatcggcggcgaaattctcgcccttgagcagaagcacgaggagaaccgcttcgtcttcggctttgaggagagctgcggttacctcaagggaacgtatgcccgcgataaggacgccgtcgtcgcctccatgctgacgtgcgacctcgccgccgcgctcaagcgcgagggcacaaatttggccgagcacatgaacgcactctacagccgcttcggctggcatgaggcgcgcgtgctgagctgcgagctgcagggcccggacgccatggaaatttccgctggctttatggcgcagatgcgccgcgagctgccgaaggctgtgtgcggcatcaccgtcacgtccgtcacggactatcaggcgcgcgtcacgcacgatctcgtccacggcacggaggaagcggtcacgctgccgaagtccaatgtgctcgtgcttcagctcggcgagaagggtacggtcatcctgcgtccgtccggcacggagccgaaggtcaagatttatctgaccgccgttgacgccgaccgcgcggcagccatgaagctgctggacgatatggccgccgaaatgagcggctatctgcccaaaaacgcttgacaaccggccggttttcggctatcataaccgcatagtgaaaacgcatggaagaagaggagtatcccatccgcgcgctgcagagagggggcggctgctgaaagcccctgcgcaggtcgggagaaggtcgcttcggagcgggcgtgccgaacctgcagtaggccgcacgggtgctcccgttacagagccagagtgcccgccttcggcgggaattcaggtggtaccacggtaatctgcatcgccctgagcatattatgaagctcagggcgatttttatcgtcaaaaaggagaagactatgaaagaactgccaaagacctacgagccgcgcgacgttgaggaccggctctacaaattctgggtagacaacggctatttccatgccgagcgcgacccggacaagaagccctttaccatcgtcatgccgccccccaatgtcacaggccagctccacatgggccatgccatggacgccgccatgcaggatgtgctcatccgcttcaagcgcatgcagggctattccgccctctggatccccggcgtggaccatgccggtatcgccacgcagatccgcgtggaggaggagctgcgcaaggagggcaagacccgttatgacctcggccgcgagaagttcctcgagcgcgtctgggcctggaagcatcagtacggcgaccgtatcgtcgagcagcagaagcgcctcggcgcgtcctgcgactgggaccgtgcccgcttcacgatggacgagggctgctcgaaggccgtccgcgaggtgttcgtgaacctgtatgagcagggccttatctacaagggcagccgcatcatcaactggtgcccgcactgcgtcacggccctgtccgatgccgaggtcgaatatgtcgacaagcccggccatctgtggcatgtgcgctatccgctggcagacggctccggcgaggtcatcatcgcgacgacccggcccgagaccatgctcggcgactccggcgtgtgcgtcaacccgaacgacgagcgctacaaggacatcgtcggcaagaacgtcatcctaccgctcgtcggcaaggagatccccgtcgtggcggacgactatgccgagatggacttcggcaccggctgcgtcaagatgacgccggcacacgacccgaacgactttgaggtcggcctgcgccacaacctcgaggtcatccgcgtcctcgacgacaagggcgtcgtcaacgagaacggcggcaaatatcagggcctcgaccgctatgaggcgcgcaagcagatcgtcgccgacctcgaggagcagggctacctcgtgaaggtcgagccgtataaccacaatgtcggcacctgctaccgctgccaccgcgacgtcgagccgatcatttccgctcagtggttcgtaaagatgaagccgctggccgaagaggcgctgcgcgtcgtgaacgacggcgagacgaagttcgtgccggagcgcttcacaaaaatttatacgaactggatggagaacgtccgtgactggtgcatctcccgtcagctgtggtggggccatcagatcccggcgtggtactgcgccgactgcggccatatgaccgtttcccgcgaggatgcgacctgctgcgaaaagtgtggcagcaagcatatcacccgcgatgaggacgtgcttgacacttggttctcctcggcgctttggccgttcgagaccctcggttggccggacacgaatgcggaggattttcagtatttctatccgacggatgtgcttgtgacgggctatgatatcattttcttctgggtcgcacgcatgatcttctcggcctgcaagcaaacgggcagaccgccgttccacaccgtgctgattcacggccttgtccgcgacgacaagggccgcaagatgtccaagtccctcggcaacggcatcgatccgctcgagatgatcgaccgctacggctcggacgccctgcgcatgaacatgctcacgtccaattcgcccggcaacgacatgcgcttctatatcgagcgctgcgaggccatgcgcaactttgccaataagctctggaacgccagccgctatgtcatgatgaacctcagcatcgacaaaaacgagctgcccgccctgtccgagctcgagacgtccgacaagtggatcctctcgaagctcaatacgctcattgccgacgtcacggagaacctcgacaagtacgagctcggcgtcgccgtccagaaaatttatgactttatctgggacagctactgcgactggtatatcgagctgacaaaggcccgcctctatggtgaggatgaggcccagaagcgctctgcccagcaggtgctgctgtatgtgctcgaccagatcctgcgcctgatgcacccgttcatgccgttcatcacagaggaaatctggcaggccatcccgcacgagggtgaggcgctgatcgtcgccgcttggccgaagttccgcgaggatctctgcttccaggcggaggaggacggcatggagagcatcatgcaggccatccgcgccgtgcgcaaccgccgtgccgagatgaacgtgccgcccgcgcgccgcacgacactctatatcgtcacggagaagcaggacctgttctctgccggtatcccgttcatcacccgtctggcctatgccgagcgcgtcgtcgttctgggtgaggagccggagggccatggctccatggtgtcctgcgtgacgcacgacgccaagctgttcctgccgatggaggagcttgtggatgtggacaaggagcttgcccgtatcgccaaggagaaggagaaggtccagaagggccttgccggtgtgcaggctaaacttggcaatccgggctttgccgcaaaggcaccggagcaggtcgtccgcgcagagcaggagaaggccgaaaagtatgccgccctgctgcgtcagctcgaggagagcgaagcacggctgaaggatctctgatttttatcgaccgccatttcggggctgccgcatggatttgcggcagctccgttttttgggctttatttctggaacgagttggtgtataatttattctgaatgaatggcggcctgccgccagacaggaaggatgactttgatggagaatttcgacgcggagcagccgatggaggacctgcaggagcagactccgaagaaggaaccgaaaaatccgctctatgactgctactcgcttttgcatgaccttgtctatattctggccgcgatcacgatcgtgtttgtgtttttcgtccgtctcgtcggcgtagacggaccgtccatgatgccgacgctgcaggacggcgactatgtggcactgctgagcaatctgtttatgggcgacctcgagcagggcgacgtcatcgtcgcgcgcaaggagagctttgaaaacggcgagccgatcgtcaagcgcgtcatcgccacggagggccagaccgtggatatcctctatgacggaaacggctacggcacggtctacgtcgacggcgagccgctggacgagccctatatcttggaaccgatggtgctgccctactatgaccgcacgagcttccccctgaccgtggacgagggctgcctcgtcgtgatgggcgataaccgcaaccgctctgctgacagccgctatgcctccattgggcagatcgaggaatcacaggtcatcggcaaggtgctgtgcattctgttcccaggctgcggcgagagcagctcgcgggactttggacggatcggagcgctggacaatggatgaccgcatgaatattcagtggtatccgggccacatgacaaagacccggcgaaatatggaggctgacctcaagctcgtggacgccgtctgcgagatcgtggacgcacgcatcccgttttccagccggaacccggacattgacgctatctgcgggcagaagccccgcatgatgatcctcaaccgcatcgatctggccgatccggccgctacggacgtctggcagaattactggcaggcgcagggcatgaccgttgtgcgcacggactgcaagagccgccgcggcatcgaccgcttcgtgcccgccgtccgctccatgctggcggagaagctgcagcgctatgcggacaagggacagaccggccgcgcgctgaagctgatgatcgtcggcatcccgaacgtgggaaaatcgaccttcatcaatcagatcgccgggcgcaagggcgcaaaggcggagaaccgccccggcgtcacgcgtggcaagcagtgggtcacggtggacagcggccttctgctgctcgacacgccgggcatcctctggccgaaattcgacgatgaggaggtcggccgcaggctggcctataccggcgcggtcaaggacgacgtactggatgtggaaacgctggcctgtcatctggcggccatgctctgggcgcgttaccccgaggccatgcgcgcccgctataagctcgacccgccggaggacgcctccggctatgatctgctgaccgaggcgggccgccgccgcggcttcctgctggcgcgcggcgagatcgacacggagcgcatggcgcgtgtgctgctggaggaataccgcagctgtaagatcggccgctttacgctggaggatcctccggaaaggacagacgcatgcgctatgaactgatccgcgaaatcttcaatctctgcagcaacaaccagatgcgcgacgtgttcgtcagtgaggtggagacctcggacccggaggccgtcgcgcggacatactgccgcggtaaggacgtcacgatggaccgcacggacaacgaagacggcagcatcatattcgacgtggtggcggacggcctgcatcagcgcctgagcttcacaccggatgactaagggcaacactgcatcattctccttcggccttcgccggacatttttcgccgaatgcgcttgctgaattgtgcggtattgcttaagataaatgaggaattggcatgacggaactttggaattacgaaaaccgctgctgggaggcgggttatgagacggtctgcggcgtagacgaggccgggcgcggcccgctggccgggccggtgtgcgctgcggcagtcatcctgccgcgcgggctggacattcccggcctgaacgactcgaaaaagctgacggccaagcgccgcgaggcgctgtatgacattatcacggagcaggcgctcgcctacggcatcgcgtttgcctccgagttggagatcgacgagatcaacatcctgcaggcgacgttcctcgcgatgcgccgcgccatggaccagctccgggtgcggccggatatcgccctgatcgacggcaaccgcgagacggacttcggtcttcccgtgcagacgatcgtcaagggcgacagcctgagcgccaatatcgcggctgcgtccattctggccaaggtgacgcgggaccgcttcatgctggaaatggatgagaaatatccgcagtacggctttgccacgcacaagggctacggtacgcgcgcgcactatgccgcgctgcgcgaattcggtccgtgccccatccatcgccgcacgttcctgaagaatctccatgcggaatgatctgacgggccgctggggcgaggagactgcggcggcctatctgcgccgcaggcactataccatcgtggcggcgaattaccgctgccgcctcggcgagatcgacctgatcgcggaaaaccgcgactatctcgtctttgtcgaggtcaagctgcgcaaaagcgccgcatttgccgaagcgctggaatttgtcgaccggcacaagcaggagcgcatccgccgcacggcggagctgtacttatgtgagcacccggagcagacgaagcagccgcgcttcgatgtgatcgaggtctacgcgccgaacggcacgcagacgaagcggccggagatccggcatctggaggatgcattttcatgaagctgtttgacggacactgcgacaccgcctatgagctgttgaagcgcggcgaggggctggcgcgaaactcgtgccatatcgacctgcagaaggcggccggactggaggcctatgcccaggtctttgcgttctgcagcaacgccggccggcctagcggcgggacggagcgcctgctgacggagccgctggccctcctgtgccgcgaggtggagaagaaccgcagccgcatcggctttgccgcaaacggtgcggaggccctgcgcctgacggagcaggggaggatcgccgcgctgctgtccgtggagggctgcgaggtcatcggctgcgaaccgggcagactcgaatggctgcgggaacagggcttctgcatgctcacgctgacgtggaatgccgacaacgcgcttgcgggctggcacggctccgcgcatggcctgacgccgcgtgggcgcgactttgtccgggaggcgcagcggctcggcctgcggatcgatgtgagtcatctgtccgaagctgcgttctggcagctcatggactgcacgcaggcccccattctggccagccattccaactgccgcgctttgtgcggctatacgcggaacctgacggacgatcagctgcgcgcgctggcgcagaccggcggcacggtcggcctgaacctctatccgccgttcctcggcgggagagcggatttcgacacgctgcgcgcccatctcgagcacatgctcacgctctgcggcgaggaccatgtggccctcggcggcgacctcgacggctgcgacgagctggcgcgcggctttacggacgtctcctcgtgggcttcgttttatgcgtatttacaggctgcgggctatcccgcggacctgctcgaccggatctttttccggaaccttctgcaactgctgcaatgaaaggagcgtgagggatggccctttacgcgattggagacctgcatctttccctcggcagcgacaagccgatggacgtcttcggcggcgcgtgggtcggctatgtggacaagctccgcgaaggcctgtccgtcatcgggccggaggacacgaccatcctgctcggagacctgtcctgggcgctggacctgaacggcgcgcgcgaggattttgccatgatcgccgccattccggggcggaagattatcgtcaagggaaatcacgattactggtggacgacggccgcgaaattctaccgcttctgcgaggaaaacggctttccggacctgtatctgctgaataacaactgctatttctataacggcatcgccctgaccggcacgcgcggctggttctttgaagaggacgcgccggacggcagtcataacgataaaattttcaagcgggagctgctgcgtctggaggcctcgctccgcgcggcgggagatacgcccgaaaagctgtgctttctgcactatccgccgcgctaccgcggctacgaatgcccggaaattctggcgctcctcgagcgctacggcgtgaaggaatgctgctacggccacctgcacggcagcagccaccgccttgccatcgagggcgtgcaccacggcgtgacctaccggctctgcgctgcggattatacgaattttgccccgatccggcttcgctgaatattttccctgtaattttcctgcggaaaaaccgaaaattcacaaaatcgacttgtttttttgtgaatagtctgataaaatagtgcggattcatcaaggtatcaatgcgcgccgaccggcgcagcacataggaggatgttagaaatgaatgtcaaaagcgtagagaaagaagcgacccgcgcatccgttacggtggaactgacccgtgaggagctggagcctgccctgaaccgcgcctatctgaagtaccgcaaggatatcatgatccccggcttccgcaagggtcatgctccgcgtatggtcatcgaggctgcctatggcaagcatgtcttctttgaggacgctgtcgaggatatgttcccggatatctacaaggatgccgtcctgacgcaggacatccgtcccgtcggccgcccgagcgtttccaagatggacatcgccgacgacggcgccgtcacgctgacgatcgtgacggatctgtatcccgttgctgagcttggcgaatataagaatctcgagatcgagaaggccgaggtcgaggtcaaggagtccgaggtcgaggccgagctggaccgcatggcccagaacgttgcccgcatcaccacggtcgaccgcccggcacaggagggggacaccgccgtgatcgacttcgagggctttgagaacggcaaggcctttgcgggcggcaagggcgagaactacgagctgaagctcggttcccacaccttcatccccggctttgaggagcaggtcgccggcatgagtgccggtgaggagaaggacatcgacatcacgttcccggctgactatcacgccgaggagcttgccggtaagcccgtcgtcttcaaggtcaaggtccatgaggtcaaggagaccgtcgttcccgagaaggacgacgagtttgtcaaggatgtttccgagttcgacaccgtcgccgagctgcgcgccgacatcgagaagcgcatccgcgatgagaagcaggccgggatcgaccgcgcgttcgagaacgccgccgtcgagaaggctgccgccaacatgaccgtcgagatccccgacagcatgatcgacgaggagcttgatcaggagatggagcgcatggactatgagctccgctcccagggcgcttccctgcaggcctatgcccagatgatgggcggcgacatgaacgccatccgaaacagcctgcgcccgtccgctcaggccgctgtccgcacgaacgtcctgctggatgccgttgctgccgctgagaacatcgaggtcggcgaggaagagtgcgaggaagaatacaagaagctcgccgagagctacaagatggagttggacgacgtcaagaaggccctgaacgccgacggcctgaagagcgatctcaagctgcgcaaggctgcccgtctcatcgccgactccgctgtcgccgttgcacccaaggcccctgaggccgccgaagaggctcctgcctccgaggaataatccgcctgcagagcggttagaatgtttctgattcctgctgcggcaggcgatccgcactcccgccggtgaccccggcgggaatgcacgcagaaaggagcatgattatgagtttggttccctatgtcgtcgagcagacgagccgcggagagcgttcctatgacattttctcccgccttctgaacgaccgcatcatcttcctgtcggaggaggtcaacgacacgaccgccagcctgatcgtcgcccagcttctctatctggaggcgcaggaccccgacaaggacattcagttctacatcaacagcccgggcggcgtggtaacggccggacttgcgatttatgacaccatgcagtatatcaagtgcgatgtttccacgatctgcatcggcatggccgcgtccatgggcgcgttcctgctgtcgtccggcacgaagggcaagcgcctcgccctgccgaacgcggagatcatgatccatcagccgtccggcggcgcgcagggtcaggtcacggatatcgagatccacgcccagcgcatcgcggatgtgaagcgccgtctgaatgaaattctggcgaagaacaccggcagacccgttgaagaagtcgcccgcgactgcgagcgcgaccatttcctcacggccgagcaggcgaaggaatacggcatcgtggacaaggtgatctatcagcgctaaacccgaggaggaagacaatttggcagaaaaactcatccgatgctccttctgcggcaagacgcaggcacaggtcaagcggatcatgtccgggccgaatgcctatatctgcaacgaatgcgtggagctgtgcagcacgatcctgcacgaggagatgtatgagaccggcagctccgagctggccgttcccgatcatctgcccacgccgaaagagatcaaggaatatatggacggttatatcatcggtcaggatgaggcgaagatcgccctgtccgtggcggtgtataaccattacaagcgcattttctacggcggcgactccgatgtggagctgcagaagagcaatatcctgctcatcggcccgacgggctgcggcaaaacgctctttgcgcagacgctcgccaaaatcctgaacgttccgttcgccatcgccgatgcgaccacgctcaccgaagcgggctatgtcggcgaggatgtcgagaacattctcctgcgcctgctgcaggcggcagacttcgacgtcgagctggcggagcgcggcatcatctatatcgacgagatggataagatcgcccgcaagagcgagaacacctccatcacgcgcgacgtgtccggcgagggcgtgcagcaggcactgctgaaaattctcgagggcacgacggcgaacgtgccgccgcagggcggccgcaagcacccgcagcaggagttcatccagatcgacacgacgaacatcctcttcatctgcggcggcgcctttgacggcctcgacaagatcatcgagcgccgcgtggaccgcagcagcctcggcttcggcgcagagctgaagagccggaaggagcaggacgtcggcgagctgttccggcaggtgcagccgcacgatcttctgaaattcggcatcatcccggagctggtcggccgtctgccggtcgtcacgaccctcggcagcctgaagaaggaagagctcgtgcgcatcctgaccgagccgaagaacgcgctgtgccgccagtaccgcaagctgctcgagctggacaacgtgacgctggaatttgaaaatgcggcgctcgacgccattgcgcagaaggccatcgaccgcaagatcggtgcgcgcggtctgcgcgccgtgctggagagcgtgatgacgaaggtcatgtatgacattccctcggattccacgatttccgaggtcctgatcacacgcgcctgcgtggaggacggaagcgagccggagatccggcacaaggccggcgctgcgcgccggaagcgtccgagcgcaggataacaagacacagaagggggcgttgcggacacttgggtgtctgtgcgccccttttgtggtccgtccccgcatccggcggggaggaaggagaactatgaacgaactgattttgtctgaacggatgccggtgctcgccatgcgcgggctggtcctttttccgcaggcaaccatgcactttgatgtggggcgggagaagtccgttcgcgcgctggaggcggcgatgaacgccgaccagcacatttttctggtgacccagaaggagatcgagcaggatgatcccggcttcggcgatctctatgagatcggcacggtcgcccatgtcctgcaggtcctgaagatccccggcgacaccgtgcgtgtgctggtgcagggcgaataccgcgcccgtgccacgcagatgctgcagacggcgccgtgcatgatggcgcgcgtcgagtcgatccccgaggaggagacgccgagcattacgccgcgcacggaggccctgcttcggcaggccatcgagctgttcggcgaatatgcggagctgtcgcagcgcccgatgcaggacatcatgctccatctgctgtccgaaaaggatcccggctctgcggccgacatgacggcgcaggcggcatcctatgactataaggaaaaaatgcgcgttctgtcccagcttgcgccggtgcgccgtctggaaacggcgaaccgcctgcttgcgcgggagctggaggttctgcgcctcgaggcccagctgcaggagaagacgcagcagagcatcgacaagggccagcgcgattattatctgcgtgagcagctcaaggtcatccgcggcgagctcggcgaaaacgacgaggacgcggagatcgatgaataccgcgagaagatcgagaagctccacctgccgcaggaggccgacgagaagctccacaaggagctgcagcggctggaaaagcagccgtatggctccgccgaggccagcgtcatccgcaattacctcgacgtcgctctcgaactgccgtggaatacccgcacgcgcgagcgcacggacatccgcatcgcccgccgcatcctcgatgaggaccatttcggccttgagaaggtgaaggagcgcattctggaaattctggccgtgcgccagcttgctccggagcagccggggcagatcatctgcctcatcggccctccgggcgtcggcaagacgtccatcgccatgagcgtggcccgcgccctgaaccggaagctcgcgcgcatctcgctcggcggcgtgcatgatgaggccgagatccgcggccatcgcaagacctatatcggcgcgatgcccggccgcatcctgaccgccatgcagcaggccggaacgcacaatccgctgctgctgctcgatgagatcgacaagctcggcagcgattatcgcggcgatccgtcatccgccctgctcgaggtgctcgatgcggagcagaacgcaacgttccgggataatttcctcgaaattccgttcgacctgagcgagtgcatgttcatcacgacggccaacacggccgacaccatcccgcgtccgctcctcgaccgtatggaggtcatcgagctcggctcctatacggacgaggagaagcgcagcatcgcgcgcgaccatctgctgccgcgccagctcgcgaaaaacggcctgaagaaatcgcaggtccgcgtgacggacgatgccctgcgcgagatcatccgctgctacacgcgcgaatccggcgtgcgcaatctcgagcgcaagctcggggagctctgccgcaaatgcgccgtgcagctcctttcagacgaggccccgcgccgcgtgaccgtgacgggcacgaatctggagagcttcctcggcccgcgccgcatcctgccggataagctgccggagaccgatccgatcggtcttgtgaccggccttgcctggacttctgtcggcggtgagactctcgaggtcgagtgcaatgtcatggacggcagcggcaagctcatcctgaccggaaacctcggcgatgtgatgaaggagtccgtgcaggcggccgtgagctatctgcgcacgcgcgcggagcagctgcacatcccgtccgacttctacaagacgcgcgatatccatgtccacttcccggagggtgccgtgccgaaggacggcccgtctgccggtatcgccgtatgcacggcgttggcctccgcgctcagcgggacgccggtccgccgtgatatcgccatgacgggcgagatctccatccgcggccgcgtgcttcccatcggcggcctgaaggagaagaccatggcagcgctgcgccacggcgtgaagaccgtcattattccgcacgagaacgaaaaggatctgcaggagatcgaccagacggtgcgccgcgcgctcaacttcctgctcgtcgaccatgccgatgccgtgctggacgccgcgctcgtccgccccgtgcaggaggagcctgcggtgcgcaagaccacggagcgcgtcctcccggtcgcgcagcatgacacggcccagccgaatcaggggatccgccaatgatgaatttacagcgagtggaatttgtgaaatctgcggcgcaggccggtgcgttcctgcacgacggcctgccgcagatcgcctttgccggaaaatcaaacgtcggcaaatcctccgtgctgaactgcgtgctgcagcgcaaaaattttgcgcgcgtcggtcagaagccgggcaagaccgtccacatcaactatttccgcgtggacggcaaggcgcacttcgtcgatctgccgggatatggctatgcgcaggtcgctgaatcggaaaaggaacgctggggcaagctcatggaggcctattttgccgagccggagcccatcgccctcggcgtgatgatcgtcgatgcccgccacgcaccgacgaagctcgactgcgtcatggcggacctgttccgcagcaccgggcggccgttcctcgtcgttgccaacaagctcgataagctgaaggcacgcgagatcgagccgaaccttgcgtgcatccgcgaaacgctgcgtttgggcgagcagacaccgctgctgccgttctccgcagagaaggggacgggccgcgaggcccttgtgcgcgccatatttgacgcggtcggctaaggattgtgggttgccattttcctaaaataatggtatactctaaagtgaaaggagccggaggcgcatggaagaaccaacctatcatcttgcgggcgtcatgcacacgcgcgatgagctgcccgcagattttgacggtccgctgagcgtcatcctgcttctgctgagcaaaaacaagatcgaaattcaggacgtcagcatcacgtccattctggagcagtatctggcctatctcgacgagatgaagcggttggatatggagatcgccagcgaattcatcgccatggcgtcccatctcatgctcattaaaacaaagatgctgctctccgccgccgagcgcgaggaggccatgagcgagatggagcttcttatccgctcgctcgaggaaaagcagcgtgcggaggcctatgagcagatccgcacggctgtggccttccttgagccgcgcagcgacatcggcaacggttttttcccgcatgcgccgcagccgctccgtccggacgcgacctatcgctaccgccacgagccgcaggatcttctgcgcgccatggcggccatggcagagcgcagcgagcggcgtctgccgccgaagctctcgaattttcagggcatcgtcggcttagagccgtatcccgtgacaaaaaaggccgcacaggtcctcaagcagctgctgatgcgcggcgtggagaaattccgcgcgctgttccgcggcagccgctcgcgcagcgagatcgttgcgacgttcctcgccgtactggagctttgccgcgtgcattccgtcaggctggaggacggcgacgacgatctgaacatccgcttttgcaaaatgccggaggaaagggtagaacatggaacagacggagctggaacgggtagctgaggccatcctgtttgcggcgggcgagccggtcgagctcgaacgcattgccatggccgctgaatgcgacccggacgaggccgagcaggccgtgcgttcgctgatggaccgcctgtcctacgagcggcgcggcatccgtatcctgcgcctcgagcacgcctatcagatgtgctcctcgggggagatgtcctcctatgtgacccgagcactggaaacacgcaagccgccccggctttcgtccgcgcagctggagaccctgacggtcattgcctattatcagcccgcaacgcgggcctacatcgagcagatccgcggcgtcgacagtgcctattccgtcggcgcgctgctcaataagcacctcattgaggagtgcggcaggctgaatgtgcccggacggcccattctgtaccgcacaacaccggatttcctgcgcacgttcggtctggaatcgctggacgagctgccggagatcgaaaaaatgcagttcggcaaacaggaactgccgcagcaggaggaggaaacagaatcatgagtcagaatgtttcggagcttctcggcgcctctatggcgaaggtgcgcgagatggtcgacgccaacaccgtggtcggtacgcccatttccacgggcgacggcacgacgctcatcccgatctccaagatcagctttgccatggcttccggcggcagcgacctcaagccgaaggcagccgcctctgcgctcccgttcggcggcggcgcaggctgcggcgtgaagatcgtcccggttgcctttctggtgctgcagggcgagcgggtgcgtatgctcccgatcacggagcctgcgacctcgacggctgaccgcctcatcgagcagatcccggagctggtcgaccgcatcaacgagatgatctcgcagtaccgcgcggagaaaaaggtcgacgtcgacctcgcatgaaccgcgcctcaccgggcatactaggcccggtgaggaagaatgaaacgaatgctccgggcggcggcgcttctgatcgctgccgcccttttgtctccgtgcgcgtcggccctgtcggcctgccgcgccgccgtgctggatgcggacaccggagaggtctgctttgcacgcaatgcttcagagcacgcgcttatcgccagcacgacaaagatcatgacgggtctgctcatcgcggaggactgcgatacggatgccgttgtcaccgtgccgcaggaggcagtcgggatcgaaggctcttcgctctatctcaaggcgggggagcagctcacggtccgcgctctgctctacggcctgctgctgcactccggcaacgatgccgccgtcgcgctggctctggcgcacagcggctcggtcggggcctttgtggaggccatgaacggacgggcgcgggagcttggcctgcgggacacccattttacgaacccgaacggtctggacgcgccggagcactattccacggcgctcgaccttgcgcgcctgacgcgcgccgcgctgcaggtcccggcctttgctgaggtcgtcgccacgcggcagatcacgatcgaggggcgcagctttacgaaccacaaccgccttttgtggtctctggacggcgcgatcggcgtgaagacgggctatacccgcgcagccgggcggacgctcgtcagcgccgtggaacggaacggacggcggctcattgccgtcacgctgtgtgcgccggatgactggcaggatcatgcctgcctgtatgacgaggcgtttgccgccttttccgagcgtgaagcggtgaaggccggggcgtgcgtcgcgtccgtgccgatgctgtccggcggaagcgctgagcttatggcaggggagtccgtcacttatgcgctgcgcgacggggataccgttaccgtacggccgctctggccgcgtgtggccttttctgccggaacgcccggcgaacccgccggagagggcggcgtatttctcgggacgcgctgcatcgcgcgcatcccgctgctctggggagagtgtaccgatgagggaacgaattcagaagatcctttctgcgcgcggcgttgcctcgcggcgcgcggcggaggagctgatccggcagggccgggtcacggtggacggggtgccgtgtgcgcttggcgcatcggcggagccggactgccggaccattgcggtcgatggcgttcccatcccgcctccgccggagcacgtctatctgatgctttataagccgcgcggctatatcacaacgctgtcggatgaacgcggccgccgaacggccgcctcgctcgtagactgcggcacgcgcgtctatccggtcgggcggctggactatgattctgagggcctgctgctctttacgaacgacggcgcgctggccgaccggctgatgcacccgcgccgcgagatcagcaaggtctatgaggtcacggcccgcggtcctctggacggcgtggctgagcggctgcggcgtccgctcgtgctcgacggttatcgcatccgcccgccggaggtcgagcagaccgcgccgggccggtttctcatcacgatccacgagggcagaaatcgccagatccgccgcatgtgcgcggcggccgggctggaggttcttcggctgcggcgcattgcagagggaccgctgcagctcggaacgctcgcgcccggcgcatggcgtccgctcaccgaagcggagcttgccgcgctgcggcaggaaacagaagggggagatcctgtatgacggcagacatcctgacgaacatacataacaagctgacaacattctccaagggccagcgccgcatcgcgacctatattctggagagctatgataaggcggccttcctgacggcgggcgcgctcggcaagatcacgcaggtgtccgagtcgacggtcgtgcgctttgcggcggagctgggctatgacggctatcccgccatgcagcgcgcgctgcaggaaatggtgctcaaccgcctgacctccgtgcagcgcattgaggtcacggatgagcgcctcggcgagcaggacgtcgtctcgacgatcctgcaggcggatatggaccggctgcgccatacgaacgagcatctcgaccgcgaggccttctccggcgcggtggaggccctgctgcaagcgcgctgcatctatgtgctcggcgttcgctcctctgcggctctcgcgagctccctgagctattacctgcactatatgtttgaaaacgtccgactcatcacgacgccgtcaacgagcgaggtctttgagcagctcgtccgcatctcgccgcaggacgccgtcatcggcatcagcttcccgcgctattccacggcgacgggcaaggcgctgcagtactgccgcgaggcaggcgcgcaggtcattgccctgacggactccgaaacggcccccatcgcccgcagcgcgcactatctgctcacggccaagagcgacatggtctcgctcgtggattcgctcgtcgcgccgatgagcgttgtcaacgccctgatcgtcgcgctgacgtcccgacgcaagcacgagaccgcgcagacgctcgagcgtctggagcaggtctgggatcagtaccatgtctatgaaaaagtccacatttgacgccgtgatcgtgggcgggggagcggcagggctgtttgccgcagttcaggcctccacgcgcgggcgtaggattctcctgctcgaaaaaaacagccgctgcggcaaaaagctcctcatcaccggcaagggccgctgcaatgtcacaaatgcctgcaccgccgaagaggcgctgaaaaatattccgcgcaacgggcgcttcctctacagcgccatggcggccttcccgccggaagcggcaatggccttttttgagcagggcggctgcccgctcaaggtcgagcgcggcaaccgcgtgtttcccgtctcggaccgctccgccgatgttctgaacgtgctggagcgcgcgctgcagcgcggcggcgtcgagcggcggcagaccacggtgacgggccttttgatcgcggacggcgcgataaacggcgttctgacctcggacggcccggtcgcatgcagcacggtgctgctgtgcaccggcggcgcgtcctatccgctgaccggctcgaccggcgacggctaccgtctggcggagcaggccgggcacacgatccagccgccgtgcggctcgctcgtgccgctcgtgagcccggatgaagcctgcgccgagatgcagggcctgtccctgcgcaacacgggcgtgcagctccgcgacgaaaaggggaaaacggtctatcaggacttcggcgagctgctgttcacgcatttcggcgtctccggcccgacggtcctgtcggcctcggcgcatctgaagccggggaagtcctattccctcgtgctcgatctgaagcctgcgctggacgagggaaagcttgatgcgcgcttcctgcgcgatctcgaggcctatgccaaccgcagcatggaaaatgcgctggcagacctcttcccgcactccatgatccccgtgctgctgcggcgcgccggcatcgacccggcgctgcgcgccaattccctgaccaggcagcagcggcgcgccctgctcgaggagacgaagcgctttgtgatccccatctccggcacgcggccggtggaggaggccattatcacgcgcggcggtgtcagcacaaaggagatcgatccgcggacgatggcctcgaagctcgtgcacggcctgtattttgcaggcgagctcatcgactgcgacgcctataccggcggcttcaatctgcagatcgcatgggccacggcgcatgcggcggcacaggtactgtaatagaataatgtgcgtaaaacagggactgtgcagcgagcactgcgcggtctctgttcacttttttcagtttttccgctgcggagaccgcaatttttggacgtttagcagggaatccggcacaatttgaagttgacaagaattttattttcgagtataatatttctcagtatttgaatgggagagcaggatccaacatggaaaagcagcattacagcatcgcgatcgacggccccggcggcgcaggaaagagcaccattgcgcgcagagccgcggcggagcttggctttgtctatgtcgataccggcgcgatctaccgcgcggtggcctgcgcggccctttcccacggcatcgatccgtcggacgtggctgccgtttcggccctgctgccgtcgctgcagcttgagctccgttggacggaggacggcgtgcagcacgtctggctgaacggagccgatatttcctccgagctccgcacgcccgaagtctccacggcggcctcccgcgtttcggccctgccggtcgtgcgtcagttcctgctggagcagcagcgcgtggtcgcccgcacgcatgacgtgatcatggacgggcgcgacatcggcacggtcgttctgccggatgccgatatgaagatattcctctctgcctcgcctgaggtgcgcgcacgccgccgctggctcgagctgcaggagaaggggactcctgacacctatgaggccgtccttgccgatctgatcgcccgcgatgaacgggattccaaccgcgccattgcgccgctccgccccgcggatgacgccgtgctgttcgatacctccggcatgacgctgcaggagagcatcgacgcgatcttaaagctcattcggaagaaggtcacagtatgagcggttttccgcagaaattctaccacgcagtcttctggcccatccgcatcctcatgggctttgcgcatccgatcgtccatgtacgcggacttgaaaatattccggacggccccgccgtcatctgctgcaatcacagctcgttttccgacgcgatctgggtgatcgtctgctctcatcagaagcgcattttccgcacgatggcaaaaaaagagctgttttcgcaccgcgtgctcggctggttcattacaaagctcggcgctttcccggtcgaccgcgaggccaacgatatccatgccgtgaaaacggcgctcggcgtgctgcgcgagggggacaagctcctcatcttcccggaggggacgcgcgtgcgcgagggggatgtttcccatccgcatgtcggcgccgtgacgttcgcctgccggacggacgcaccgatcgttccggtgttcctgacgcgcaagaagcgcttctgggcgcccctgacactcgtgttcggcgaagcctatcatccgcagtttgagggtcgccgcccgtcgtccgatgagctcgagcacctgacgcaggaaatgatggataagtgctatgcactcggaggcatgcaatgtccgtccgcgtagctgcttcggccgggttctgtttcggggtcgaccgcgcggtcggtctggtggagcagaccgtgcgcgaaggaaagcgcgccgtcacgctcgggccgatcatccataaccaccacgtcgtgcagcattttgccgcgctcggcgtgcgggagatcgcctctcctgaggaggtcccggggggaagcgccgtcatcatccgctcgcacggcgtctcgcgcgccgtctatgaagcgctgcaggcgcgcgggctggagatcatcgatgcaacatgcccgttcgtcagccgcatccaccgtatcgtacaggaggctgaggcaaacggccgccagccgctcatcatcggcacaccggagcacccggaggtcgtggccatcgcaggctggtgcaggcatccgctcgtcttcccggacggcgaagccctgcagaaatggctcgatgacgacccaaaacgacacgatctgccatttaccatggtctcacagaccacaagtacgcagtttttatgggattcctgcaagaaaatcgcaaaaaaagtgtgtacaaatcttgagttttttgatacaatatgcaaagcgaccgaaaatcgacaggcagaagccgctgcgctggctgcgcagtgcgacgccatgatcgtggtcggcgaccggaaaagttccaacaccgggcgtctggcgcatatctgcgccgcgcattgcccgcaggtcttccttgtggacaacgcgtcagagctggacctgccgaagcttcggcaggccggaaccattggcatcacagcaggagcttcgacgcctgcgtggataataaaggaggtcaaccacactatgagcgaaatcaatactaccgttgatgcagctgcggaggagagctttgaggagcttctcggccagggcatcaagactttaaatacaggagataaggtgcttggcactgttaccgcaatcggaaacaccgagatccaggtagacctgggcacgaagcatgccggttacattccgtatgacgaagtcagcgcagatcctaccgtcaaggcggaggacatcctcaaggtcggcgatgagatcgaagtttttgtcgttcgcgtcaacgatcaggagggcaccgtgcagctcagcaagaagaagctggacggcatgaaggtctgggacgacgttgaagccgctgccgagaacaaggacacggtcgagggcgttatcaccgaagagaacaagggcggcctcgtggccaatgtgaagggtgttcgcgtcttcatcccggcttctcagaccggtatccccaagggcggcgacatgtccgcgctgaagggccagaccgtcaagatgaagatcaccgagttcaaccgcgcccgccgcagagtcgtcggctccatccgcatggtcaatgccgaggcccgtaaggctgccgttgagaagctctggagcgagatcgaggtcggcaagaagtatctgggcaccgtcaagtccctgacttcctacggcgcgttcgtcgacatcggcggtgtggacggcatggtccatatctccgagctgtcctggggccacatccgcacgccgggtgaggtcgtgaagcccggtgatcagattgaagtcttcgttctgaagttcgatccggagaagaagaagatctccctcggctacaagaccccggagatgaatccgtggaaccagttcctcgcgaagtactccgttggcgatgtcgtcaccgtgaagattgtcaagctggtcgacttcggcgcctttgccgagatcatgcccggcgttgacggcctgatccacatctcccagatctctgaccatcgtgtcgagaaggcttccgacgccctgcaggagggccaggaggtcgaggcgaagatcatcgacgtcgacaccgaccgcaagcgcatctctctgtccatccgcgctctgctcgttccgcagaacgacgaggactaaattattccaatatcgcattatatttggtggagcaggtttgcctgctccactttttttcaatcgggaaagcccttcggcctttcccggcaaagggctcacagtccgctgcgcgcacggctgtccgcttttgcgaacgagccgcacactggcggactgagctgtattttctccgacgtacacgccgccggagaaaatgattccacttgattcgcctcctgcgggcggcgaactctgcgagactttcggacaacacaggctaagcaggtgagcctgctccactttttttcgttttgacggagaaagacatggataattaaccacgatatgcatcttttatgagccaaccgtgcgtggaatatgcagctatctctgtgcaaaatagacaaaagtataagttttctgtccacatagcaaaaacaaatgtaccaaaaagagaagccctgtattccagcttcttccaaccgacgcttgacgaatgcatgcgcatatgctacactacaaacgtaccacgagcggccttgcgccctcggggcattcaaattcctgccggtgaggaagccggccggaaaatactttcaaaacaaaaccaggggtggcattatgattcaacttcatgagaacagcatctatctcgtagacggccgtccggaggagaaggcgtccattccccaaaacgaagcgagaaagcagaccatggcatggcagatcctgcaggcgcacaacacgtccggcgacccggagcgcctgaagatccgctttgatgccatggtttcgcacgacatcacctatgtcggtattatccagcaggcgcgcgcctcgggcatgaaggaattcccgatcccgtatgcgctgacgaactgccataacagcctctgcgcagtcggcggcaccatcaacgaggacgaccatgtcttcggcctgtccgccgcgaagaagtatggcggcatctatgtgcccgccaaccagagcgtcatccattcctatgcccgtgaagagctcgcgcgctgcggcgcgatgatcctcggctcggactcccatacgcgctacggcgcgctcggcacgatggcagtcggcgagggcggtccggagcttgccaagcagctgctcaagaacacctgggacgtcaacatgcccaaggtcgttctcgtatacatgaccggtgcgccgcgccgcggcgtcggcccgcacgacgttgccatttctcttgtgaaggaaacgttcgccagcggttttgtcaacaactgcgtgctggagttctgcggccccggcatcgcaaatctgcccatcgatttccgcaacggcatcgacgtcatgacgacggagacgacctgcctgtcctccatctgggagacggacgagatcacgcgcagcttctttgagacgcacggccgcccgcaggactatgcagagctgcatccgggcagagaagcctggtatgacaagatgatcaccatcgagctggacaaggtcgagccgatgattgccctgccgttccatccttcgaacgcctatcccatccgggaatttcttgccaatgcgaaggagctgctggagaaggtcgagcaggatgctgcccgccgcttcccgaaggcccatgtcaagctgaccgacaagctgcatgacggcggcgtctgggcagatcagggcgtgatcgcgggctgcagcggcggcctgttcgacaatatcaccgaggctgccgacattctgcgcggcggctcgaccggcaacggcgaattcagcctgaacgtctatccgacgagcgtccccgtttcgcttgcgctcacgcgcaacggcgcgacggcacagctgctcgaggccggcgcggtcatcaagccgagcttctgcggcccgtgcttcggcgcaggcgacgtccccgccaacaacggcctgtctctgcgccatacgacgcgcaacttcccgaaccgcgagggctcgaagcccggcgagggccagttcgccgccgtgtgcctcatggacgcgcgctccatcgccgcaacggctgcaaacggcggccgcatcacgcccgcgacggacatggactatgttgcggagccgcagccctatcacttcgaccgtgcggtctatgacaaccgcatttactacggcttcggcaaggccgatccctccgttgagctcgtcatgggcccgaacatcaccgactggccgaagatgtacccgctgaccgagaacctgctcgtcgagctggccgccgtcatccacgatccggtcacgacgaccgatgagctcatcccgtccggcgagacgtcatcctaccgttcgaatccgctgcgtctggcggagtttacgctcagccgccgcgtgccggaatatgtcggccatgcgaaggacatcgccgcgcaggaggccgagcggcgcgagggcaagctgccggagcacctgaaggctgttctgtctgccgtcggcgacgctgccgcactggccggaacgacgcagttcggctccgccgtctttgccaataagcccggcgacggctctgcccgcgagcaggccgcctcctgtcagaaggtcctgggcggcttcgccaacatctgctacagctatgcgacgaagcgctatcgttcgaactgcatcaactggggcatcctgccgttcacgatcgacgagggcaccccgtttgactatgccgacggcgactgcgtattcgtcccggacgtccgccgcgccgtggaggaggcccgcgaggatatccccgcgaaggtcatccgcaaggacggctccgttgaggacctgatgctgcatatccgcggcctgacgcaggatgagcgcgagatcattctggacggctgcctgatgaattattacgccgcgcgcatcgcggactgaatccataacattcataactgacaggaggagcaacagcgtggaaaagatcaaaatgacgacccctctggtggagatggacggcgacgagatgacccgtgtcctttggaagatgatcaaggacgaactcatcctgccctttgtggagctgaagaccgagtattatgacctcggcctgctgcaccgcaacgagacgaaggatcaggtgacggtcgaggccgccaacgccacccgccgcctcggcgtggccgtcaaatgcgccaccatcacgccgaacaagcagcgcatggtggagtatccgcagctcaccgaaatgtggaagagcccgaacggcacgatccgctccattctggacggcaccgtgttccgcacgcccatctgcatcgacaccatccatcccgtcgtaaagaactggaaaaagcccatcaccatcgcccgtcatgcctatggcgacgtgtataagtcggtcgacctctacacgaccgagcccggctccgccacgctgacgttcgtcggcgagagcggcgagaagaaggagcttctcgtgcagaaggtcgacggccccgccgtctggcaggccgcccacaacaaggaaaagagcatccgctcgtttgcgcgctcctgcttccagtatgccattgatacgaagcaggatctgtggttctccacgaaggacaccatcgccaagatctatgacggcgagttcaagaaggtctttgaggaggagttcgagcactatcgcgcgaagttcgaggagctcggcattacctacttctacaccctcatcgacgacgccgttgcccgcgtcatccgcagcgagggcggcttcatctgggcctgcaagaactatgacggcgacgtcatgagcgacatggtctccacggccttcggcagccttgccatgatgacgtccgtgcttgtctcgccggacggcacgacggagtatgaggccgctcacggcaccgtgacaaagcactattaccgccatctgcgcggcgaggagacctccacgaacccgatggcgaccatcttcgcctggacgggcgccctgcgcaagcgcggccagctcgacggcctgacggagctggagcagtttgccgacaagctcgaacaggcctgcttcacgaccctgaatcagggcacgatgacgaaggatctggtcggcctcgtggacgaaggcgtgcaggcgcatgccgtaacgtccgccgcgttcctcgccgccgtccgcggcaatctcgaagccagtctctgaccggctcatgcaggagggttatgcaatggatttgcgcaaagcagccacggcgggcaccatggagtccaatgacatcatggtcacgctggagccggcggaggccggcggcattcagatcgatctgaccagcaatgttctgcagcaattcggcgcacagatccgcagcgtcatcacggaaacgctcacggaatacggcgtggaaaacgccgctgtgaccgccgtggacaagggcgcgctggactgcaccattcgcgcgcgggtcacggccgcgctgttccgcagcgccggctctgccgcgtatcgttgggaggtcaagtgatgtatatcaaagacagactgcgccgcagtatgatgttcgttcccggcaataaccccggcatgatccgcgacgcgcacatctatggcgcggacagcatcatgttcgacctcgaggactccgtggcctacacggagaaggacgccgcgcgtctgctcgtcttcaatgcgctgcgctccctgaatttcggctcgcgtgagaccgtcgtccgtatcaacgatctttcgagcggcctcggcatcgaggacctcgaggccgtcgtgcgcgccggtgtgcaggtcgtccgcctgccgaagaccgactccgcacaggacgtgatcgactgtgagcgcgagatcgcccgcatcgagcgcgagtccggcatccccgtcggcacgaccggcatgatggcagctattgagagcgcaaacggcgttctgaacgcggccgagatcgcccgcgccagcaaccgtctcatcggcatcgccctcggtgcggaggactacgtcaccgatctgaagacgacccgctctgacggcatcgagctgctgtttgcccggtgcatgattctgaatgcggcccgcgccgccgggatcgccgcgctggacaccgtctattccgacgtcaacaatgaggagggcttcctcgccgaggcaatgctcatcaagaagctcggcttcgacggcaagtccgtcatcaacccgcggcagatcgagccgctgcaccgcgtcttcatgcccagcgagaaagatctgaacaaagcgcgcctcatcatggccgccattgaggaggccaacgcccgcggcagcggcgtcgccagcctcaagggcaagatgatcgacaagccggtcgtcacccgcgcgcgccgcctgctcgacctctatgaggcgggcagcaagatcgatgaagtggaggagatttgacatgccggacctgcatcaaattccgcatctggacgagatcgcgcaccacggagaatatcacggcgtgggcaagcgcgtcaccgagacgtttgccgaccgctatcaccaccagaacaaggtcgtcccctcgctggaggatgccattcgcctgacgggcctgcgcgacggcatgaccatcagcttccaccaccatttccgcaacggcgaccatatcgtcaatatggtgctcgataagcttgcagaaatgggcttccacgatcttaagcttgcagcttcgtcgctttcagccattcacgctccgctcatccgccacattcagaacggcgttatcacgcacatcgaaacgtccggtatgcgcggcgagctggcggaggccgtctcccgcggcctgatggattgcccggtcgtgttccgctctcacggcgggcgcgcctctgccatccgcacgggtgagctgcacatcgacgtcgccttcctcggcgcgccgtcgtgcgacccctacggcaatgccaacggctacagccgcgatgacgatgagggcatcgcctgcggctcgctgggctacgcccgcccggacgccgcctatgccgacgaggtcgtgatcatcacgaaccatctcgtcgcctatccgaacgctccctgggccattccggaggacgaggtcgactacgtcgtcgtcacggacgatatcggcgacccgaagggcatcatgtccggcgcaacgcgctacacgaaggacccgaaggagctgctcatcgcccgcaatgccgcaaatgtcatcgacgcggcgggctacctctatgacggcttctccatgcagatgggctccggcggcgcttcgctcgccacggcgcgtttcctccgccagaagatgctcgaccgcggcatccactgccggttcgccctcggcggcatcaccggccagatcacggccatgcacgaggagggcctcatcgaccgtattctcgacgtgcagagctttgatctcgatgcggccaagtccctgaaaaataaccacttccaccatcagatcggcgcaacgtattacgcgagctatctcgtggattccgccgtcgatcagctggactttgttgtgctctctgcgctggagatcgacacggacttcaatgtcaacgttctgaccggatcggacggcgtcatccgcggcgctatcggcggccaccccgacacggccgagggcgcgagcctgtccgtcgttgtcgctccgctgacgcgcggccgtatcccgaccatcgtgaagcacgtcaacacggtcgtcacgcccggcgacgccgtggacgtcgtcgtgacggatcagggcattgccgtcaatccgcgccgccccgacgtgaaggagaagcttgagaaggccgggctgcacgtctttaccatcgagcagctccagcagcgcgccgaaaagatcgtcggcgtgccggagccgatccgctataaggaccgcgtcgtcggcgtcgtgatgtatcgcgacaatacgatcatcgacgtcatccgccagatcgacgaggatgcctgatctgctgctttgcaccgctgtcccgcccggtctgcaggctgcccatgcgcgcctgttgaccggggccgggctgcggctcgaggaggcgggggagtgcacggcgctgctgctggcagacgacggtgcgctcctcgcctgcggcacccgcagcggcaaggtcctgcgccagatcgccgtctcgccggaggccgagggcggcggagcctgtgccgaggtcgtttcggccctgctgcaggatgccacagcccacggcgtgccgcacccatttctgtttaccgcgccgggaaagagcggcctgttccgttcactcggctttacgccgctggcgcagacgccggacatgctgatgatggagcatggccgcggtggactgcgccgttttctgtccggtatcccggtcgggccggagcggcccgtcggctgcatcgtctgccatgccaacccgttcacgctggggcaccggcatctcattgcctatgccgccgcgcgctgcgcgcaggtccttgtctttgtcctcagcgacacggacagcctgttcccaccggagctgcgcctgcggctggtgcgcgagggaactgccgatctgccgaatgtccgggcctatcccggcggcgactatctcatcagccccgcgacgttcccggcctatttcctcaaggatcaggcccgcgcgccggaggcaaaatgcgatctcgacctgacgctgttcggcagcgcgatcgcgcctgcgctccatatcacggagcgctttgtcggtcaggagccgacgtgcgccgtcacggcgcagtataaccgccgtatgcaggccattctgcccgcctatggcatccacgttacggagattccgcgtctgaacgcaatctctgccaccacagtccgcgcgcgcctgctggagggcgatgtcgccgccgtgcgcacgctggtccccaaaacaacctatgaagcctgtcgaagtctctttggagcaggtgctccttgcccgtgaaaaccgggccgggcggcagcagcggctgcttgcgcagtatggcctgccgctcgtttcgtttacgatgaatatggcagggcctgtcaaggatacgccgctgtcgcgctttgcctttcaggcaggcgtcgccgcccttacaaaacgcctcggcggaccggtttcatgctgcctgacggaagccgtgaccggctgcgaagccctgctggtatatgaccgcccggcgcaggtgctcaaggacgtctgcatggagctggagtcgacggaggtcgggcggctctacgatctggatgtgctggatgccgcgggagaaaagctctcgcggcccgaaatgcgccgctgcctcgtctgcggcggacccgttgcggcctgctcccgcagccgcgcgcatgggctggatgccatctgcgccgagacggcccgcaggctcgcagaatttgcctgcacaacgctcggcgatcttgcggcggatgcccttcgcgaggaggcggcgctttccccgaagcccggccttgtcgacgcacgcacgaatggcgcacacacggatatggaccttctgctcatgctccgcagcgcagagacgctccggccgtggttttgccggatggtccgcctcgggctggacggcgctgcacctgcgcagctgcagaatgcaggacggcaggcagaggcagagatgctgcaggcgaccggcggcgtgaacacgcacaagggcgcgctgtatgcgctctcgctgctgctggcggcgatgggcaggcatctgagcggcgcgcaggagtccatattttcgcttgccgcagccgatgccgcagcgctggctccgcctgtcggaacgcatggctcgcaggtccggcggcgctacggccgccccggcgcgcgtgaggaggccatggatggctttccttcgctgcaggccctgctgcaggccacgcgcagccagccgccgctcggtgtgctgctgtggagcatggcgcatctgtctgacagcaacctgctctaccgcggtggagaggccggtctggcctttgcgcaaaatgaagcggagcgcattctccggctcccgcagacacagtgggagggcgagctcacggcactggacgccgaaatgacgcgccgcaacctcagccccggcggcagcgccgatctgctggccttgacgctgtttttccgcagtctggatttctggacagagctgtccgtataaaaatcgctcccttcccgcatttccgggaggggagcgattttcgtgatcagtttttgccgagatagcggtcacatacgcgccgggcgttttcggccgtttttgcctcatcgacaccggtcagtttgccgtgtgcgacggtaatgcggccgttcaccacagtatagtccaccggagcgcgcaggccgaccgtgccgaagacgtttttgggatcatagcacgcgccgacgagctcgagccgccgagaatcgacgaggaacaggtccgcgcacttgccgactgcaaggcagccgatgtcgtcgcgcccgagcagggaggcggagccgcgcgtggcgagcttcagcacgtcgtagccgctcggcgcagcggcagagcaatgcaggcgatggagcagatagcagatgcggatctcctcgagctgatcggagccgtcctgcgaggctgagccgtcgacggcgaggccgacgtggatgccgcgctgcagcatctcggggatgcgcgccacgccggaggagagcttcatgttggaaacggggcagtgcgccacgcccgttccggtctctgcgagaaggtcgagctccgcgtctgtaaagtggatgccgtgcgcgaaccagacgtccgggccgacccagccgagcgactcgagataggcgaggggacgcaggccgtagcggtcaagcgtgtagcgctcctcgtccttcgtctcggcaaggtgtgtgtgcaggcggacatgatactgccgcgccagcttcgcactctgcagcagcagctcgcgcgaaacggagaacggcgagcacggagccagcgcgatctgccgcatggagccataggacggatcgtgccagcgctcgatcagcgcggcgctgtcctccagaatggcgtccacgctctgcacgacgctgtcgggcggcaggccgccgtccttcacggacaggtccatgctgccgcgcgaggcgaccatgcgcatgccgagctcgtcggccgccgcaaactgcgcgccgagcagatcaccgcacccggcagggaagacatagtggtgatcgaagcaggtcgtgcagccgtttttcatcagctcgcccatgccggtcagcgaagaagcgtgcacgacctcggtatcgaggtttttccagatctcatagagcgccttgagccaggggaacagttcaagattctgtacctccggcagattgcgcgagaactgctgataaagatggtggtgcgtattaatgaggccgggatagcacagcagatgggagccgtccagcacttcgtcggcctgaacggcaagatcagggccgatggcgcggatacgtccgtcctcgcagtacaggtcgacgtgccggagcacgctgtccgcatcgtcgcaggtgaccacggtgtcaagatcgcgaatgagcagggaagccatgcgggttcctcctttgtccggcgcgggaagcgccgccttttctcttattttagcatagtttgaagataaagccaatgctgatttgaagcggaatcgaaagaaacttccagccaagttgatttcccttgtcctgtacataaaagcatgctataataaaagaaaagcaccgcataattcagcaagagaactccgagaaattttttgtcgtgacaagacttgaaaggcgcagatgtactttgtgtccctcaaccttttcaagccgatggatcggcgaaaaaaatccggcgtaggctgaagctgcaattgtgcagtgttggtaaagtaaaaaaccacggaggcaccatgagagttcttgccattgactacggcgacgcccggacggggatcgccatttccgatgcgagcggcagcatcgtcggccgcacgaccgtcatccacagccgccgcccgcagcagacagcggaagccattgccgcgcttgtgcaggagagcggcgcggagcggctcgtgatgggcttcccgcgcaacatggacggcacagagggcccgcgcgcggcgctgtatcgcgagatggccgccacgatccaggctgcctgcggcatggaggtcgtgctctgggacgaacggcggacgaccgttgaggcacaccagatcctgagcgactgcaattatcacgggaaaaagcgcaaaaataccgtcgacgccgtcgccgcctcgctgatcctcgagggctatctggcgttcttgtcgcgctgctgacggaaaaacagctcgcgcaggccggtgagcagcaggaagccgccgaacaggcggcgcagcagcgagacgtccagccccgtggcgatccatgcggcgatcgccgcagtcacgcagccgcccaatgcggccgggagcacgatatcccagcggatcagcctgttgcgaatatgaaagaacagcgcgcaggcagccgacggcagaaaatacagcagattaatgccctgcgcggtctgctgcgggagggctgcaacgccggtcatccagaccatgagcagcgtgccgccgccgatgccgaggccggagagcaggccgcagactgcgcctgcgagagctgcggcccaccacgcattcatcgcagcaggaggcgcagtccgccccaaacgatcagcgcgccgagcgcgcggtgcagccacacggcggacaggcggcgcagcaggagtcctgccgcgatgccgcccagcgcgccgcccgcaagataggggagggccgcagtcagaaattcaccgccgcgcagccagtagacaacaagagaaacgatggacagcggcagcatcgtgcagacgctgcaggcaaaggcctcatgctcccgcagatcggtcaggcgatggagcaggggaagcagcagcatgccgcctccggcgccgaataaaccgtttactgccccggccgccgcgccggtcagcccggcccgaagccatgttcctcgtttctgcattcgcgatccctccggatgattcaaatcgggacagaaaaagcccgcaacggaagtgtttccgctgcgggctggttttatgtgcgtttatactagaatctgataaaaagctttaaaagctttttatagcgccgagggcgcgtcagattctgcatgagacggcgcagcgtgcgtcagcacgatgcgagtgtgcgtagcacacgggattcctgatgaaatattttaatcaggaatcagtattagttgctgctggaggagctgccgtagatgttggcgatcgtcaggccgagatttgcgtgcttggcggcgtctgcatcataggtgtaggtcgcggcagaggtgacctcgtcgtaccactcggtcttcagcttgttcgtgacgagcaggtcgcggtaggtctcggcgaagtcctggaagaagaacacataggtgccgccgttgtcatcgacgaattccttcgtgtcgccggccttgcggctggaatcgaacagccaggtgcgggcgacttccggcgtgatgctgcggtgcgcgccgttcgtgatggtgtaggaggaggtgttatccgcataggtcttgatgtactcgcggaacttctcctcggaggaatcctccttcagggcagcctcaagctcggagacgcgctcgtcggaggtcttctcgccgtccttgtattccttgtcggaagcatccttcgcgatgtagagctgcagggcgttgacggtctgatagttgttgtcgttgatgctcgtgagctggaggacatagaacgtgttgtccttctcaaagagcttcgcctcgccgggcttcgcctcggtgtagagccagttggcggcatcctcggagatggaggacgtgacctcgctcttggagcgctccgtcatgacggagacattctcgtcatcggtcttgaaatcggagaccatggcgttggcagcctcacgggcggcggcaatggcttcctcggacggctccgtggaggtcgtggcctcggtgctgtcagtgctgctgtcggacttcgtctcaaaatcggaggccttgacggcgtagctgtaataggtgacggtgtcgaactcggtcgtgtcctgctcataacgggcattgcgctcgtcttccgtataggtcagggactcaatgtaagcgtcgtgcagcttggagacctcaagatagtggcgataattcttctcgttgcagcccttgccgaacatggcctcgatgtactcatccagatccatgctgtagacgccggcataggtcttcagggtgttgatctcgttgtcgatagaggccttgtcgtcgtcgctcagggagaagcctgcctcgacggccttgtcatagacggtgtaggcatccacagcagaggtcttggcgctgtccgccaggaaatcggcccaagtgtcatactcgtcgctgccggcatagctctgctcgtcgagcggggtgctcgtgtcgatgccgagcagggagatgtagctgccgtaggtgctgtagatcgaattcagtgcgccgcgatagaaatagttgaattccgtcgtggagaccttatgatcgccgacagacacaacggtcgcattgcgccaggatgcctgcacgccgaagatgacgccgaaaacgatcacggggatcagaatgacgataatggcaaagatccagccctcagagagcttcttcttggtcttctttgcctgctgcggagcggcctgctccgactctaccatgcgctttttgcgctcgcgggatgcactcatagtctgtttacctctcattcgtgggaatcgcggggcgcacgccccggaaaataacaggtcttattatactaaggatttgcgcttgttgcaagagcattctggaaatttgacgaaaaaagtttctgtttcttaacaaactcgttaagaaaatgataccgctctgcgcgataatgccagagaaatgctgggaagacgcacaagatccccgctttggccgtgtagctccgtttataacctgcacgaaacgggcaggtgggtcgcctctccgattcttagctgcttccaacttccatccacggtcagagccaggacgggaggcctgcaatccgaagcgaacgtccggcgtcccgaaaaaatgatgtgggtttaaagggaactatcacgcaccaagcagggatcttgcttgatgactatttaattatgagaaagggcggtcattcttcctcgtcttctgcttcctcttcgtcctcatagagggactgcatcagcagatcgtagacggcagccagctcatcttcgtcttccacggcaacgagtaggtcctcgccgtcctccgtgacggacttcaggatgctgacctcgagctcctcgctcgcttcgtcctcctctgcggggacaagggcaagatattccgcgccctggtattcgatggtcgagaggacctccagctcgtattccttgccgtcctcatccgtgatcgaaataaagtcgcttccgtattgctgctccatggggcacctcctgtctgtctggctttattttaaccgctgctgccgggaaaatcaagtggaaatctgacgaaccgccggaaaatccgttttctgccctttcagccaccgtaaaaagtctcgttgcgtatctacaagcagagaaatcctgccgcagaaaattttcattcggaatgtgccggagtgattgacaggcatgatataattaaaaaatagagaatgaaggatcatggatttttgcgcctgtccgtaggatgcggcgcttcccgaagaacggaggaattgtcatggcaagacaaccgaagcaggaaaagcagccgcatctggcctggcgcatcacgcggaccgtgctcgacgtgttgggcaagatcatccttgtgctgttgatcgccgtcggcaccgttgcgctcatcgccgcgatcgccggttcgatcttcctgtcgaaattcaagagctatgtcgagttggatatcatcccgaaggccgaggaatatgccgaagggctggagctggacaatatttcactggcacagacctcgatcatctattataccgaccccaagacgggggaataccgtgagctgcagcagctttatggcacagagaaccgtatctgggtctcctatgacgatattccccttgatctcgtccacgcggccatttccatcgaggacaagcgcttccccacgcacaagggcgtggactggatccgcacactggcagccgtgaagggctttgcgggcggcagctcatcgttcggcggctcgactatcacacagcagctcatcaagaacctgtcacaggaggatgaggtcacggtcgaccgcaaggtacaggagatcttccgcgccctggaggtcgaaaagcgctatacgaagtccgagatcatggagtggtatctcaacacgatctacctcggtgagggctgctacggtgtccagagtgcggcgcgcgtctactttggcaagaaggtctccgacctgacgacggccgagtgcgccagcctcatcgccatcacgaacaatccctcgctctacgatccctatatccgcgaggagaacaaccgcgagcgtcagctcacgatcctgaaggaaatgtacgctcagggctatattgagacggaggaggcctatcaggccgccgtcgatcaggaaatggtcttccgcaacggaacgtatgacgaggaggaatacacctgtgcgagctgcggcttcaccggtacgcgcgcggagtacacggagacggacggcgagtatttctgcccgcagtgcggcgaggtgaacaacgccgtcgacaagaaccactattactcttattttgtcgatacggtatggcgcgatgtcgttgatgcgcttgtggagcgctacggctacagtgagcttgccgcagagcagaagctcctgacgggcggctataagatctatgcaacgatcgatcccgaggtccaggctattgtggacaaggtctacgagaaccttgacaacgtgccgaagaccgtgagcgttcagcagctgcagtccgccatcgttgtgacggacaacaagaccggcgacatcgtcgccatggcgggcggtgtcggcgacaagggcggcagcctgacgctcaaccgcgccacgcagagcaagcagcctgcgggctcgtcattcaagcctgtggcagtctatgcgcccgcgctggacgccgggatcattacgcccgcgacggtctacgaggactctccgctgaacgaagaccgcaactggccgcaaaacgatgccagaacctacagcggcctttgcaatgtgctgcgcggtctgacgcgttcgctcaacaccatctccgtcaaggtcctcaatgacctcggcgtggagaacagctaccagttcctgacgcagaagctcggctttacgaccctcgtggacgagctgcagatcggcgaccactcctatacggatatcgcccttgctccgctcggcctcggccagctcacgcgcggcgtcaccgtgcgcgagatgacgcaggcctacggcaccttcccgaacggcggcacgttccgcgaggcccgcacgttcacaaaggtcgtcgaccccgagggaaacgtcatcctcgacaatgcacaggagagccacaccgccatcggcgagaaggccgacttctatatcaactatatgctgcagaatgccgtgcttgccggtaccggctccgccgcggccatggacaacatcgccgtagccggtaagaccggtacgtccaacgacaaccagacgcgctggtttgcgggctacacgccgtactacacggccgtcgtctggtgcggttatgacgagccggagcagatcattctcgacggtgactggacgaaccccgccatttccatgtggaatcaggtcatgcgtccgctgcacgaagggctggagtccgcctcattctcgcagcctgagaacgtcggctactattccgtatgcgctgactgtggcggcaagcccatcgaggcctgcaagaaggacgtgcgcgagaatggcagcaaccgcgttgtgacggtgcgtctgttctatgaagatgcgcccacaaaggagtgcacctgccatactatggtcaaaatctgcaaggaaagcggcaaaattgccaacgaatactgtgaaaaggccgatggaaatacggttgaagaagtcggcaagctgatttataataagaattggaaagtcaacaaggatgcagacttcgtctacaatcccgaggataaggagcaggtctgcaccatccacactgctgaatccgttaagccgaccgagccgacggagggcccgaccgatccgacgctcccgacggagccgacggaaccgacggaatcgactgagccgcccacgcccgcacgcacaccgatgcccgcagcccgcaaaaagacagacaggagctgaaagcccatgtggaaagccgatcaatggaaggattatgaggtgctcgatacctccgacggagaaaagctcgagcgctggggcagcttctatctcgtgcggccggaccctcaggtcatctggagcacgccgcggcaggacccgcgctggaagcgctttgacgcgcgctacgcccgctcaagcaccggcggcggccactggtccgcacatcatctgccggagcactggtgcattcattaccgtgagctgacgttccaggtcaagccgatgaacttcaagcacacgggcgtgttcccggagcaggcggcaaactgggattttatcgatgaccagatccgccgcgcggggcggcccgtcagcgtgctgaacctgtttgcctacaccggaggcgcgacactcgcagccgctgcggcaggcgcatccgtctgccatgtggacgccgcaaagggcatggtcgcctgggcccgcgaaaatgcggctgcctccggtctgtccggcgcccccatccgctggatcatcgacgactgcgccaagttcgtcgagcgcgagatcaagcgcggccgccgctacgacgccgtcatcatggacccgccgtcctacgggcgcggcccgtccggcgagatctggaagctcgaaaaggaccttttcccgttcctgaagctcgtctccggcgtgttgtcggaagatccgctgtttttcatcatcaattcctacacgacaggcctcgcgccgtccgttctgacatgcctcctcgacagcgtggtaacgccgcgcttcggcggcgggacggtctcggatgagcttggccttcccgtgaccgattccggccttgtgctcccgtgcggcgcaacagggcgctggacaagagagggcagagcatgaccgaggccatccggacagaacatttgaagttctcctatgacgcccagagcgaaagcggcggcgtcacggtttttgacgatctaaatttatccatcgaggagggcagctttgtcgccgtcctcggccacaacggctgcggaaaatccacgctggcaaagcattttaacgcggtcctcctgccggagggcggcagtgtgcatgtattcggcatggacacgtccgacgagtctcttttggtcgacatccgccgcacggtcggcatggtgttccagaatcccgataatcagatggtcgccaacgtcgtagaagaggatgttgcctttgcgccggagaacctcggcgttccctcggaggaaatccgcagacgcgtggacgaggcactgaagctcgtcgggatgtatgactaccgtctgcacgcgccgcacctgctctccggcgggcagaagcagcgcgttgccattgcgggagtcatcgccatgcggccgcgctgcatcgtactcgatgagccgaccgccatgctcgacccccacgggcgcgaggaggtcatttcgaccatcgagcgtctgaaccgggaaatgggcatcaccgtggtgctcatcacccatcatatgaccgaagcgatccgcgcccagcgcgtgatcgttatggacgcggggcgcattctcgcggacggaacaccgaaggaggtcttcccgcaggtcgaactgctggaatccgtaggcctgaccgtaccggcgacgacgaaggtgctctatgcgctgaatcaggcgggctttgacctgccgctcgacgcgctttccacggaggaatgtgcgcaggtacttcttgccgcgattagggcgaagacctgacaaacgatttggaggaaagaccattggccgcaaccatcgaggtcagagacctctcgcatacctacagcgccggaacaccgtttcagcacgatgccgtcaagcacatgagcttctccgtggaaaagggggagttcctcggcatcatcgggcacaccggctccggcaaatcgacgctcatccagcatctgaacggcctgctgcgcccgacgtccggcgagatcctgctggacgggacgaacatctggcaggacaagaaaacaacgcgggagagccgcttccgtgtcgggctggtgttccagtatccggagtatcagctgtttgaagagaccgtttaccgcgatatcgcgttcggtccgaagaacatgggcctgagtgaagaggagatccgtacgcgcgtgctgcgcgcggccggattcgcgggcgtggacgagtccctgctggaaaagtcgccgttcgacctctccggcgggcagaagcgccgcgtcgccattgcgggcgtcatcgccatggagccggaggttgtcatttttgacgagccgacagccgggctggaccccgcaggctgcgccagcatcctcggcaatatccgcgactatcagaaggtgtcgcacgccaccatcctcatggtcacgcattccatggatgaggtcgcgcagctggccgaccgtatgctcgtcctgaacgagggaacgatcgagatgtccggcacgccgcgcgaggtgttctcccatgcggcgcgtctggcagagatcggcctgtccgtgccgcaggtcacggcgctgttcctgcgcctgcgggagctgggcgtggacgttgacccgacgacctttaccgtggagcaggctgtgccgcagctccgcgcgctgctggagggccgtgcccatgcttaaagacatcacgctcggccagtattttcccggcgacaccgtcgtccaccggcttgacccgcgcacaaagctgctgatggtcatcgtctacatcgtggcgctgttccttgcaaagtgggtcatttcctacgcagtcatgctcgcgtttctcgtcaccgcagtcgcgctgtcgcgcattcgcccgcgcgcgctgttcaagggcctgaagccgctgctgtttatcatcatttttaccgctatcatcaacgtattttataccaagggcgatgtgctggtgcagttctggatctttaagatcacgagggagggccttgtcaacgcgggcttcctggtgctgcgcatcgtcatgctcgtgacgggcacgttccttctgacctacacgacgtctcccatcgcgctgacagacggtctggagtccctgctctcgccgctgaaggccatccatttcccggtgcacgagctggctctcatgatgagcattgccctgcgcttcatcccgacgctcatcgaggagacggataagatcatttcggcccagaaggcccgcggcgcggattttgaaacgggaaatctgttccaccgcgccaaggcccttgtgccgatcctcgtgccgctgttcatcagcgcgttccggcgcgccgacgagctggccacggccatggagtgccgctgctaccgcggcggctccggccgcacgaagctgaagcagctccgctttcagcttcgcgatattctgacgtttgcgctcggcgctgccgtgctggccggcgtcatcgtcctgcggagctatggactgtaacggctgggaggaagcatgcggaatctcgcactctttctgaaatatgacggaacggcctatcacggctggcaggtgcagaaaaacgcctgctccgtcgcgcagacgctggaggaggccgcggcggatgtcgtcggccatccggtgcatatgaccggctgcggccggacggacgccggggtccacgcgcgcacctatgtggccaatttccgcacggagtcccgcatccccgtcgaccgcgtggcctatgcgctcaacacgcatctgcccgccgacatcgtcgtgaccggcgcgcgggaggtcccgctgggcttcaacgccatcggctcctgcgtgcggaaggagtatacctatcagatctataactcccgcatccgcgacccgttctttgtgaaccgggcatggttctatcccaagcatctggacgaagccgtcatgcaggaggccgccgcgcagttcgtcggaacgcatgatttcgctgccgtccgctccgtcggaacggacgtgaagtccacggtccgcacggtgtattatttcgacgtggagcgcaggggagagctgatcctcctgcgcgtgtgcgcaaacggatttctctacaatatggtgcgcgccatgaccggaacggtcgtctacgctgcggagggaaaaatccgcccgcaggacatcggccgcattctggagagcggcaaccgtaccgctgccggtccgaccgtgccgcccggcggcctgtacatgacgcacctttggtatgacgacggggaggtgacgttcgatgcctgaccatatcaagccgctcccggatccggagccgcagaagccgcgccgccgctggccgctctatctgctggctgtgctgatcgttctggcgcttctcgcagccttcctgctgacgaagacccatgtgctcgacgggctgaagcgctcgctgcgctaccttgggaaaaacggggaaaactacggctccgtcagctttgaaacccttggcaacacggcctatggccagctgaacggtggcctcggcgttgccactggaagcagcgtgaccctgttttccgaggagggcaagcagctcggctccgagcagcatgccatgaccgctcccgtcatctgcacagggcaggaccgcctgctgtgctatgacgcgggcgggaactacctgaccgttctggacaagagcggcagcgccgtcttttcgcagaccccggaacagacgatctttgatgccgacctgtcctccggcggctacagcgccatgctgacggcaggggacagcggccgctcgctgctgcaggtctatgacccgaacggcagcctgctgtataagcgcagcacaaagtcgcattatctcagcgcctgcgccgtctcgccggacggcagccatgcagcggcggtcgcgctcgggcaggcggacatcacattttct

SEQ ID NO: 11102 - DNA, 4368 bp, Unknown
  gut microbiota DNA sequence
cgacgaaattcgtgcagcaggtaataacatcgagatttcaatccacccgccccttgcggggcgggacagcgatcttgcacaaaaaaactgtgcaaaacatcgcatattgcacaaaaagtgcatttaccctggccgtattgagcggttttctggctttgatgcggccatttttctgccaaacgtgcacaaatttcggtgcgaaccttccgaagaatcgctgctcactccccgttcgcacgcttataccatcaggaccccctccggctgatagccggcattgatgccgaagtgttctaccttggcttcatagcgattgcccagataataaaaccgcaggctgtccttctccttgtccatcagggaacagagcttatgctgaagctgcctgcactgcgcagcatccaatatgcactcgaacacggaattctggacgcgctgcccatagttcacgcattgctttgcaatcaggcggagccgcctccttcctgccgcatcctgtgtgttcacatcataagagatcagaaccagcataggctcacttccagagaaacggcggataggcatccagatcgcggcgcagataccgcgccagcagcagggcctgcatgtagggaaccagtccccacgggagcttttctcccagatagggatgcgttatcgtctcctgcttgcgctcctgccagcttttcaggatttttcggcggcccatatccgtcataagcactgcgccgttctctgccgtttcaaaatcctccgcccgcatgacctgattgttgatgagcgtcagcacgaaccggtccgccatgcacggccgcagctcctccataaggtccagcgcaagcgatgttctgccgggacgatcccggtgcagaaagccgacataggcatccagaccgacgctctccagcgcggaagcgcagcttccggccagcagactgtaggaaaaggagagcattgcattgacattgtccagcggcggccgccggtttcggccgcgataatagaacgtctccttgctgcgcaggatcatatcgtcgaatacctcaaagtaaaccgacgcagccgcgccctccagaccacgcagagaatcgagtgaacccgcctccatgacctgcggcaggatatcgcggatcgctgcagaggcattttcgaaccgctccgcatcgatgcgcagcttatggtcgcgcttggtccgctcaatgctccaccggccgttatacagcttaccccagatcatgagctttgcgatctggcagctggcggccggatcatccgctatccggtactgctctctgcgcagcagcacattcccggtttccacgcccgccgtccgcgccagaaatctgccgctcggcgtgcagaagctcaggccgatattgcgtttggtacaggcccccatcagagcgggcgaagccccggcataggagaagctgacgatctcttccagattgtgcagaggaaaccgccctgcctcctccttttcccggcggacaacgatattttcgccgtcgagtgtcagataggcatcctccgaggtgacaaacagagtgttgagcagtcgtctcatggtatttcctccatatgtctctgcaggtagcttttcacggaaccgcagcgcgacattctcggcaggcacaggtctttcagggaacaggcattgcaggacttcgtcggcttcaccttcggcgtatggccgcgccggtagaggctgtgcatttccttcatggtatccaccacctcccggcgcagctccggcgtgaactctacctcgatccggtgccgcatttcgccgaaatacagcgcgcccttttggatatcgcagcaaagcatttcttccagacacatcgcctgcccgcagagctgcagctcattggccaggtcttcccgcggcgagccgtgcttgtactcgaccggatagggccggaagcggccctcctcgcccggaagcgggatcccgtcagccgactttcggaactccacgacatcgcatgccccggaggcgcccagcgtcggagacgagatcgccagatcgcgcgtcacgatcacgccggcgcgcttttcccgcaggccggagtcgtgcgcccgttcgtgcataagctccccgtccacggtcctgacattctccgcccacagattttcgatatggatcaaagcccactgtctgcggcagaaccggaaatgctggatcccggaaagctggagatactcgtcctcgttatacgccatctatgatctccggaacaaggccgggcagctcatcgagcgtgatctcatagtcgttcacacatgtcgggatcccttccggattcttgggcgtgacatggacgcttcgatgcacctttgcggacgaatactgtccctccttgcagttatgttcccaccagaagagctttacgacctccatggagccctccggccgcgcggcggaggcgtcgttcacgaagagcgtgcggaggcattccttcacaacggctgcatcctcctgcgagaagccggtcttttccgccaactgcacgttgatcgcgcccttgatcttgtagaggccaaagcggacaaagcactttgttcccatggtgtccgacgagcgtttttttcccggctcaccgttgacgctcttggtgatctgcatttcttcgatcctgaccggcgaaatactgatcgcctgatggaccgaaacagggccgcggacaccgacagagacgccgtcgtcattgtcattgccgctcttaaatgcaaacacctgtccgaagctccgcacatccatccactttttacacgcggtctctgcgtagagttccttgcccgtaattcccgtttctttgatccaatcggtcgcggcggctgcacgctcactcaggcttccgaacttatcatcgtggtcacgtcgatcctcagattgcacgaaaatcaagttgcccatatcctgcatccggttccggatcttccgtttgatgcacacggtcgaaatttcgcccataccgttataatccgtccgggggcggttgccgctcagcgggtctccgttgccgtttgcgttcgtcaccgagatcagcgccacaaaatcaatcttatgctccagctttgtcattgtttattcctcctctgtatgatttgtcgtatccttcttggtgaaaaaagcgttccgctgcagttcatagcccatgagatacaggtcctccagcggctgattcagctcgttctccggaaactcgcgcagaatactgagaatttctcccacaagctgattgtaacgattggcttgccacttatcgatgcgatccagataggcatgtttcagaagacagttgattcgttcagttgttgaaaaggggcgctgccggaaatcatagatataccggattgcatttgtctgccttgcttcttcctccttttccccagcatatttccttttgtagtaggcttcctccgcccattccatagtagccagcagcctgccatattggaagctgcggttttttgtatccagttcccaagccatttcattgcctccctgttttgtgtcataccggtatttttggagagcggcacaggccgcgtgcacgatttttctccagtttgcttcatcaaaggcctgcggagaggacgcccgttgcgtcagtgctttcagaatatcccgcgggaaaatgccgccgttcaccttgcagttcaacaagttctgcaaatagcggcgctgtatctgctcatccgtctctaacttatttatttccttttcttcccagtctttctttcctttttttactctcttgtgttcttttacctgtcttccaaacgcacagtccacaatctggagcaaatctggagcctcaatcccatttgctcccatgtgccagcagcaatgtgcgtcccagtcctgcatccgctccaggaaggtcttgagagtgatctcgttgtaatacgtcaccgcaaggcggccggtcgttgctgcatcaaaacttgccagaatagcgcaatctgtatcctgcagctgatgatcctttcggaagctcagcagtgtgctcttcaactgttccttataatcacttggcttctggagcggttcagcatccgcattccgcatccgccgcatcggtcttgggagcgtttttccggcagggttccagcagagaaacaccttcttcgcatgggactctgtccccaccctctcttggattccctgttcagatatcagccaacgcagggcattgtgcgctttctgtgaagcgatatagccgactgtagatgcctgccacttatccgtgaaccgcccccgccagacaaagccatttggatcattgcaggagatcagttttgcttttccatttttagggataatactttggggatgcttcttaacaaatacatctattt

SEQ ID NO: 11103 - DNA, 37671 bp, Unknown
  gut microbiota DNA sequence
taatcgtcaccgccgtcacttgcatgtttacatcctgttatttccagcccggaagcagcatcggtaacaaattcctcgccgtttccgtcaaccttgttatagttacaattgatttgagcagttgcccaattgatattcgaagtggcgtatttggtaactccaaagaaaaacgtatagtctgtaaattcaatatcttccgtgcatgtaatactgccgccaatacggtaactggcggtcggttccccatcactcagcagcacgatgctcttattctgcccggtggattccgcagagttcagcagggtacgggctgtatgaaggccaagctgcgtaaaggtgccgccttcgtcttcgttttgctcgatggcattgatctgctgcttcagcgctgccctgttcgcgtaggcataaaagcctgtgtgcgtctccttgagattgtagacgaccagcgcgatgcgcgtggtgctgtcctcagtcagcagcgtgtccacgaaggcatttgcggcggccttcgtttttgtcatacggtcttctttgaatgtcttgctaggatacatgctgttcgaattatcgatgaccagcacgacgtcggaggtcgtcttataatttttgccctgaataccgagcgtgacctcccatgtgttttcctttccctcgacagcggcagcgcttttgctgagctggatcgcgccctcttcgggccagacgggctgctcactgttgtctgcgaagacggcttcgccgagcagggccagcgtcaggacgacgatgagcagagcagcaagcgttcgtttgatgcgtttcatggtgtttcctcctctaacgactcttcggcaggtgagtgccgcaaattttctgcgttctgtaacgcaattggcattttttgtttttgagaatagcgtataacgcgatgaatggtgctgcagttttgcgttcgaaaagaatcggataaaatgttaaacaatttatccgatgtaaatatctatatctgaaatagaggaaaacggaacataacttttgaccatagtttactacatatgaaagacttttgcaagccctttctggcaaaattatgtgaaaaaatatcgcgttccatattaaacgatatttcgatagatttcgaggtttcgccccagactgtgcagtttcagaacgaaatacggcatataacagcagactctttttgatatccttcaaaactccgcattcttgaccaaaagtgttacagacactaacatgcttgtaacgtttatttgcggaagtatttgtgcaatactgccaaaattctcgacaaaaatttggtcggatttgcctccgaaaaagccttgcgggaactgggagcgttgtgtataatagaattacaatttcagattgatagctgtaacgaagtgctgcgcgcacgggcttccgactatcactcagggattcttgagtggagatgttgaacgaatggttctgcatccccatttttgttttattcacgccatggaaatcacaaacaggaggtacacgagcatgtatattcttggaaacggcagactgatcacccgcagtcaggcccttccgtatctggagaacggcgccgtctgcattgacgggacaaagatcaaagcggtcggcgagaccgctgcgctccgcgccagatatcccgaggcggagttcgtcgatgcgcgcggcggcgtcatcatgccggcgttcatcaacgcccacacgcatatttattccgcactggcccgcggtctttccatcaagggcaacaaccccacgaatttctatgaggtgctcgacggtacctggtgggctattgaccgcaagctgacgctcaagggcacaaaggcctcggccgacgctctgtacatcgactgcatcaagcagggcgtaacgacgatcttcgatcaccacgcctcctactgcgagatccccggcagtctgttccagatcgcggagtcggcaaagcagttcggcatccgctcctgcctgtgctacgaggtctccgaccgcgacggcgaggagaagtgcctgcaggccatccaggagaatgccgacttcatcacctggtgcgagaaggagaaggaccccatgctcgccgccatgttcggtggacatgccctgttcaccatctccgacaagacgttcgaccgtatggtcgcggcgaacaacggccgcaccggctatcacatccacgtttccgagggcatgaacgatgtctacgacagcctgcagaactatggccgccgtcccgtgcagcgcctgcaggaccacggcatcctcggcccgaaaacgatcctcggccactgcatccatgtcaatacggcggagatcgagcttattaagaataccgacaccatggtcgtgaacaatccggagtccaacatgggcaacgccgtcggcatctgcccggtgctgccgctgtccaaggcgggcatcctcctcggcatgggcacggatgcctacacgaatgatatgctcgagtctctgaaggtagccctctgctcgcagcggagcaatgcctgtgcgccaaatgtcgcgtggtgcgaggtcacggacatgctcttcaagaacaacgcgaagatcggcgcgcgctacttcgacgcgcccctcggcgtgctggagccgggcgcggcggcggacgtcatcgtcatggactacaagccgttcacaccgttctccgatgcgaacatcgacggccatatgatcttcggcatgaccggccgccagtgccagacgacgatcgccaacggcaagctccttatgaaggaccgcgagctcatcggtatcgacgaagaggccattaatgcgcacattctcgaggagtccaagaagctctggggcgcgctgaacgactgcacctactaatttataattcatttccgtcaaatatgatcctgcgccgcgcctgccttacccggggtgcgcgcggcgccgcaacaagcatcacaggaggatgatcccatgtctgagaaaatgtatcccattccgttccgcagcctgatgaactggatcctcgcagagcgggagaagaccggcgacgtcttcggcgtgcacaagcgctggatcgccgacccggccaagacgcttcccatcttcggtgagaagatcgaaagcccgttcggccccgctgcaggcccgaacagccagctggcgcagaatatcatcgccgcctacgtcgcaggcgcgcgcttctttgaggtcaagaccgttcagaagatggacggcgcggagcttgccgcctgtgtgccgcgtccctgcatccttgcagacgacgagggctacaaccaggagtggtccacggagctggaggtcggtcaggcgctcgacgagtatgtcaaggcgtggttcgctctgaagatcatggcgaaggtctggcattacggcgacccggacggctttgtgttcaacatgtccgtcggctatgacctcgagggaatccgtggcccgaagatcgaccactatatcgaatccatgaaggatgcctcgcagctgccggtgtttgccgagtgccgcaaggtcctgacggagctgttcccggaggaggcggcgttcatcgcctccatctcgccgcatgtctcccacagcatcacactctcgacgctgcacggctgcccgcccgatgagatcgagcgcatcgcgtcctacctgctgaccgagaagcatgtgcacacgttcgtcaagtgcaatccgacgatcctcggctatcacgacgcccgcacgatcctcgattcaatgggctatgactacatcgtcttcgacgatcaccatttcaatgaggatctgcagtggaaggacgccgtcccgatgtttgagcgtctgcaggcgctggcggaccgcgagaagctgcagttcggcctgaagctttcgaacacgttcccggtcgacacgacgcgcggcgagctgccgaacgacgagatgtatatgtccggccgctccctgttcccgctgaccatcgaaatgtgccgccgcatctccgcgcagttcggcggcaagatgaagatctcgttcgcgggcggcgcagacttcttcaactgcgacaagctgctggcggccgggatctggcccgtcaccgtcgccacgacgatcctgaagccgggcggctataaccgcctgactcagatggcggagaagacggccggtatgccgttccgcccgttcgacggcacggacaccgaggccattgcggctctgtccgccgcctgccgcacggacccgcaccactgcaagcccgtcaagccgctgcccacgcgcaagtccgaggaaaaggtgccttggttcgactgctactccgctccctgccgcggcggctgccccatcgcacaggacatccccgagtatctcgagctgtgccgcaagggcctgtataacgaggcgctggccctcatcacggagcgcaacgccctgccgttcatcaccggcacgatctgcgcgcaccgctgcatgggcaagtgcacccgcaatttctatgaggatcccgtccagatccgcgcggccaagctgctggcggccgagaagggcatcgatgccagaatggcatccatcgtccgcccggctcccgttcccggcaagcgcgctgccatcatcggcggcggcccgaccggcattgctgcggcctacttcctcggccgtgcaggcgtggcctgcaccatctttgagcgcaccggcaagctcggcggcatcgtccgccatgtcatcccggcgttccgcatctcggacgaggccattgaccgcgatatcgcccttatgcaggcctacggcgcggaggtccgcctgaataccgaggctccctccgtcgaagagctgcacaaaatgggctatacccacattctctatgccaccggcgcatggaagcccggcaagctgaacatccccggcaacgtccgcggtgtcatcggctggatgcaggagcgcaaggccggtgcgaacgagccgctcggccatgtcgccgtcgtcggcggcggcaacaccgccatggatgctgcccgcgtggcaaagcgcggcggcgcggcgtccgtaacgctcgtctaccgcagaacgcgccgctttatgcctgccgatgcgcaggagctggagcttgccatgcaggacggcgtggacttcctcgagctggctgcgcccgtcaagcaggaaaacggcgtcctgacgtgtgagaagatgcgcctcggcgagccggatgcctccggacgccgcagcccggttccgaccggcgaaacggtcgagctgccgtgcgacctcgtgatctccgccgtcggcgagcaggtcgaggagcaggtgttcacggacaacggcatcacgctcagtgcgaagggccgtcctgccttctgcacgaacgttcccggcgtctatgctgccggtgatgcgctgcgcggcccggctacggtcgtggaaggcatcgcagacgcagcccgctttgcggaggccgtcatcggcgcgccgcacacctatgacatcccggcggaggcccatcccacagaggccgaggctatcgcccgcaagggcatcctgcgcgcaccgggcaaggtctgctgcgagggcgagcgctgcctgagctgcgacaccgtctgccagaactgcgtggacgtctgcccgaaccgcgccaacgtcgccgttcgcctgccggacggccgcacggagatcgtgcacgtcgacaaaatgtgcaacgagtgcggcaactgcacggccttctgcccgtatgcctccgagccgtgcaaggataagctgacgctgttccagacgacggaggacatggacgattccaagaacttcggcttctgcttccttccggatggcaaggtccgcgcacgcctgacgacggagaccgtcggtgatccggacgagctgcctgccgatgccgccctgctcgtgcgcacgatccgcgacagctattcttatctctatcgttaacattacaaatgaacccccggagcttcggctccgggggaacttgcggtcaggagacagcatggaattatacgagatcgtcaatcgctatcatatcggaacgaactacagctgcgcggaatccatcctgctgggctgtgaagaatattatcatctgaatttgccggagcaggcgcggaagctgttcacgctgctgggcagcggcatgcagacaggcctttcctgctgcggcgcgctgacggcggggaccgcgatcctcggcctgatgacaacgggaaacggcgaatggaacagcgacaatccggtcggcgccgcgctcgtggaggagctgacgaacgtgttcgggcagtttgaaacgctctggtgcgatgagctgcgcgggctggagatcgacggctatgaggacccgtgctactgcgtggttgagaccgttgccaaaaagctgcaggagctgctcgcgcgctgtgaggaggagatcccccatgcagaatgaggaatggaacgtctctgccgtatcgctctcgccggagctggtgcgcctcgcgcagcagaagcaggcccggctcgatgcctgccttcaggcggcggagaacggcaatgaagccgccatcacggagcttggcatcaactatttttatgggatcaacggtgtcccggaagacccggacgccgcattctactggctcagccggacctcgccggagaatgcggcaggccgctgcttccttggggcctgctatgtgatcggcaagggaacaaagcaggatgagcggactgcggctgagctgtttcgggacagtgccgccctcggctttccgcctgcacagtatgagctgggactctgctatgagcacggcatcggactggaacggaacatggcccgggcggtcgagctgtatgcgctggcggcggagcaggaggatgcacaggcccagtgcgccctcggaaacctgtactttaccgggaacggtgtggagcaggaccgggcgcgtgccgcggagctttatacgcgcgcagcggagcagggcgacgtgcaggcactgagctgccttgcggaatgctatgaggcgggctgcggcgtcccgtgcgatctggaccgggccattgcgctgtacgatcaggctgctgccctcggcgacggctatgcgcacgaggaggcgagccgcctgcggctgctgcgtaataaccggcggcggaagtggaattttggaaatcctgaaccataaagagctccctttggggcggcgggcattaccgaccgactccaaagggagctgttttacactgttttattcgacgggctttgctgcctcgtcacgaatctccggccacttctcctgatccagcatggcgctgaacgggacgatctcgccggacttcaccttctcgtaaagcgcagtcagagaatcacggatctcctgcgggacgagacgctcatactgctcgttctccacgaggccgacaccatgctcattgaggccgagcgagagcgtcgtgccgccgggataggtgccggcgacgagctggtcaaacgcttcgaggatcacattggcgtactccttgcagaacgaggtgacgatgttggccgtcaggctctcgtcgccgatcacgtcgacctgatcgacgtccacgccgaaggcgtagcggcccgtttccgttgcggcgcggaacacaccgataccggcgctgcctgcgacctgccacacgacgtcgcagccgtcattgtaaagctccattgcgctggagtagccagcctcctgatcgctgaagctgttgcagtagacgatcgttgcctgaacaccattgtcgatgcaggcctggcagaagctgccgacaaagtcattcagatcgggaatgtccatgccgaccactgcgccgaccttcttgtcagcattggcgagcggcatgttgctgaccgtgatctgcgaagcaaggtaaccggcaaggtagcccatgtcgtaggccttgtagtacacgccataaatgttggtcaattcattgccgaacgtatcctgatagtcaaaatcaaagaatttctggtcagggtagttcgttgcggcttctacgagcgcgttggtgcactcgccgccgcctgtgatgatcaggtcatactgtttcccggcgcaggcctcctcaaagaaggagggatagtttgccattgcttcttcgccttcgcccatggtgatgacttcagtcgtaacatgatcgtacttcgatttgatcaggtccagaccggcggcagcaccgtcaaagtaggatttgtcgccgaccttcggaacgagcagaagaacattgtagctgtcgctttcgggctctgtgggcgcttccgtcggtgcttcggtgggagcttcggtctcaggcgcctccgtcggggcggccgtgggagcggggtctgatgcgcagccggccatggcgaccagaagcagagaaagcgcgaggatcattgcgaatgcctttttcatagagagtctcctttttcattttccggacaatacttctgtggcagcaaaaatattgacaggttctgccaataagtgtacaatatttgttccgggtgtcaagtagtatcttccaggataccgcagacggcggaaatatcggatcgatttggagaacactatggaaaagtccaaatttggcgtttgcccactctttacatttgaaaaaatcatttccggaaaatggatgctgccggtcctgcgctgtctggagcagaacgacggtatccgcttcggtgcgctgcttcgctgtttcccggagatcacaaaggctacgctgacaaagcagctcaggcggttggaggaggtcggttttgtgctccgggaagagacggagggctacccgcgcaatgttgcgtatcgactgacggatgtcgggcacgagttcctccatgttttcaataaggtggaggcgtggtgcgagatatacctggcagacaaagcagaacgcaaggcccatgcggcagcgcttgcagaataaaattttggagcactcgcatgacgcgggtgctccattttttgagctgatcagcccagaagagcggcaaggtccgcctctggggtggtgatgggcgcaatggcatagtgctccacgaggtactgcagcacgttgggcgacaggaaggccgggagcgtcgggccgaggcggatattccggatgccgagatgcaggagcgtcagcaggatgcagacggccttctgctcataccacgacagcaccatggaaagcggcaggtcgttcacaccgcactggaaggcctccgccagcgccagtgcgatctgaatggcactgtaggcgtcgttacactgaccgatgtccagcaggcgcggcaggcctgcgacggtgccgaggtccatgtcgtggaagcggtatttcccgcaggcgagcgtcagcacgacggtgtccggcggggtctggcggacgaattccgtgtagtaattccgtcctgcgcgcgcgccgtcacagccgccgaccaggaagaagtggcggatcgcgccggagcgcacggcctcgacgatctgcgcggcgtttgccagcacggcgtcgtgcgcaaagcccgtggtcgtgcccgtgccgccgttcaggccggtgcggtgctgtgtctccgcatagccgcccaactccagcgcccgctcgatgacgggcgtgaagtccttttccgcgccgatgtgcgggagatcggggtaggcgacgacagccgtggtgaacacgcggtcggcgtaggacgggcgcggcggcatgaggcagttcgtcgtgaacaggatcggcgcgggcaggtctgcaaattccttctgctggttctgccatgccgtgccgaaattccccttgagatggggatactttttcagctccgggtaggcgtgcgccgggagcatctcgccgtgcgtgtagaccgcaataccgcggccagccgtctgctccagcaggagcttcaggtcgtgcagatcatggccggacacaatgatgaacgggccgggctccacggaaaacggtacatggaccggggaaggcttgccaaagcattcggtgttggctttgtccagcagcgccatgcagcgcaggttgacctcgcccagctccagcacgagcgggagaagctcctccatgctccagtcttcgccgacggcgaacagagctttagaaagaaagcgttcgacggactcgtcccggtagccgagcaccatggcgtgataggcataggctgccatgccgcggctgccgaacagcagcagggacttcaggctgcggatgtcctcctgtgcgccccagagctgcgccagatcatagtcgcccgtccggccgcagggcgcggtgcagacggcacagtccggcacaaggcgctgcttctcggcccggacgcgcccggccagggcgttcaggctgtccggatcgaaattgacgttcgtcagcgtggcgaacaggccctcgatcatcagctgccaggtctccggaccggcatccgggctggtgtccgccgcgcgcgccagaccgatcagtgcgccggtcaggcggtcctgcgcctgcgcagtctgcgcgtccttgccgcagacgccgcggctcgtgcagccggtgcagcctgcggtctgctcacattgaaagcaaaacatgttgtggtccatgggaaaactccttcttgtggtttggggttcacttcatggacacatcataccaaatgacagcacgcaaatatgttggtatgccaacataacggacgcgattttcgttccaaattcagggaagcataaattcggcggggatcgatacgccgttcatgaaaacggcaaggcagatatagtttccatccgtcgtgatgctggcattgtccttccatgccgcggtgatcgcctcgtctgtgccctcgctctcgacggcaccctcgtccacggccttctgcaggatgtccacgaccttctgcacgtcggcgctgttctcaacctcaagcagaacgacctcgtccggcgcgccggtcacgggggagaggccgccgctgacctgccggaacgaaatttcctccagtccggggaacaggggactcagctccgaaatgtccgagaccgggaacaggaccggcgcgtccgcgcccatggcggtgatgccgctctgatagagcatctgcagatcgcgcgatgaggttggctcggtcggcgcgggttccgtcggggcgggcttgctgccgcaggccgcaagcagcacgagaacacagaccagtgcgaggagcaggaacgtcttcttcataaaaaatgcctcccttttctgtatggatccggtcagcctgctgcgctgacccccttgtatccatcaagacggcgcccgggaagaattgtttcgcgaattgcaatccataaaaaagtatggtatcataaactcaacgcaggttatccctttattaatggaaaagggtcaaaaaacgaagtgactgcaggccctctgtggtccaatataaaaaatatgatacgaaaggagaagcggacatggaacggatcaaaaagaacttcggttttggctttatgcgccttccgatgcaggacggcgaggtcgatatcgcggaaacgaaccgcatggtagacgcatttctggacgcaggcttcaactattttgacacggcgcacggctatctgcagggcaagagcgaaaagacgctcaagacctgcctgacgagccgttatctgcgcgaccgctacatcctgacggacaagctgacggagaactttttcaagatcgaggcggacatccgcccggtgttcgagagccagctcgaggcctgcggtgtcgattattttgatttctacctcatgcattcgcagtgctcggagaactatggccatttcaaggcctgccgcgcttatgagacggcgtttgctctgaaggaagagggcaaggtccgccacgtcggcatttcgtttcatggccgccccgagctgctcgagcagatcctgacagagtatcccgcgatcgaagtcgtgcagattcagttcaattatgttgactatgacgatccctccgtccagagccgcaagtgctatgaggtctgccggaagttcaacaagccggtcatcgtcatggagccggtcaagggtggaaaccttgtcaagctgccggacgatgcacgcgctgttctggatgccctgcatggcggcagcctggccagctatgccatccgcttcgctgcgggcttccccggcatgctgatggtgctctccggtatgagcacgccagagcaggtgcaggacaatatctcgttcatgaaggacttcaagccgctgggcgaaacggagcttgctgccatcgcgaaggtgcaggaaatcttccgcagcaagaacctcatcccgtgcaccggctgccgctactgcacggacggctgcccgaagcagatcgccatcccggaactgttcgccacgatgaacgcgaagcagatctaccacgactggcatacggattattactacaatgccgtctacgcactgcccggtcataaggcctcggactgcgtgaagtgcggcaagtgcgagtccgtctgcccgcagcatctgcccatccgccagctgctggagaatgtggcgaaggagttcgaaaagaaggaagcgtaagggaaactgaaacccaaatatgatgcaaaaattcgcagccgctgcggtcgtttggccgcggcggctgagcttgtcaaaaaaggatttttgacaagctctcaaacgagacccgtttcactgggctctcgtttgagaaggctgcggctcgcggcagcgcacgaagggtacacccttcgcacgtttgcgagccgagcggtattttctccgacgtacacgccgccggagaaaatgatttccactttctttgcgcttgcgagcgcaaactctgcgaggcttttttgacagtctgagccgctgcggtcgattggccgcggcggctgcctttttcctctgcccgcatcgggcgggacttgctttttcttccccggtgcgttatactctggcgcatgaagatgaatacgggaggtatgcatatgaatgcggtgatctttgatatggacggcgtgctcgtggacagcgagcgcgtggtctgggagagttttcgttatgcgggcgagaagaccggcgttcccgatgtggagcggatggcgatcatcggccttggactcaacgacgaggcgtggatcaaacggttccggcaggaattcggcgcggatgcggaccgaatcctggagcacgaggaggcctatctgcagaatttttacgccaatggagcagctccggcaaaaaaaggcgcgcagcggctgctggagcagctgtgcgcgtggaatatcccggttgcagtcgcgtcgtcgtctccggcggccgtcgtgcgcggccggctggaacgggtcggactgctgcaatattttactgcggtcatttccggcgacatggtcggccgctcgaagccggagccggacattttcctcgaggcggcgcggcagctgggaagccccgctgcgctgtgcaccgtgatcgaggattcgccgaacggcctgcgcgcgagcaggcgcgccggatgccggacgctgttcgtgccggacctctggcagccggaggaggagcatccggagctctatgacgcgcgctttgccgatctggacgccgtgcgcgaattttttgctgcggagcattaagctctgcgggttgcggcggacggaatctgcagcagctggcggtattttgccacggtgcggcgcgagatgtcgatgccctgtacctgcagccgctcggcaagcgcctgatcggacaggggagcgtgcttatcctcctgctgcacaagcacggcgatggcctgctgtgccatgacgccggagacctcaccgcctgccagctttgcggaaaacaggctgcgcagcaggcggacgccctgcggcgtctggatatacttcccactgagcgcgcggctgacggtggaggtgtgcaggccgacggcctgcgcgatgtcctgcatcgtcatcggagcgagcgcctgcccggaacggaaatacggcagctgccgcttcagaatttcctgacagcagcgcaggagcgtctcctcccgctgccggatgcagctgatgagccattccgcctgcgagacctttttgacgatatactgccgcgcctccggatcgtccgtctcgcggacgagggagcggtagaagctgctgacggacagctccggcgtgtaggccctgttgacggcgacgctgagcacgccgtctttttcctgcaggagcacgtcggggacgacatagccgtcgtcctgcgcgcggctgaattccgcgcacgggtagggcgaaaggctctggatctgccggtaggcctcctgcacggcggcaaggggaacatgctcgctcgcggcgatggccgcaaaagcgtgatgcccagcctgctcgagatagtgctccgcgatcgtgcaggccagcccggactcgccgagcgcctgcagctgcaggcagaggcattccgagagtgttcttgcgccgacgccgggcgggtcaaggcgctggatgatctggacggcggcatcgacaagcgcggccgggccgagcgcagagacatcggcgcgcagatagccgtcggcatcgagcgcatggatgacggcgagcacggcgcgctgcagctccggctccagcgacaggcgctccgcctgaaactgcagatgggtcgtcaggtcctcgccgtaggcgacggcatcctggtcggcaaaatccggctgcatgtgctccgcatcctcgcccgcggcggcatgcccgccggcggagagatcgtcaagcagactcacgcccggcgcggctccgcattccagcgtgggattttccagcagagcggtattgatataggactgcagctggcatacgtccagctgtaaaatttcaacagcggcgtacatctgcggacgctgctgctgaacgggcttctgttcctgaaagatctgcataaaaaaatcctcttccgacggtaaacgatgcgctttttgtgatattccattatatcggctcaccgggtggatgtcaaggcatccaccccgtatcaaaatttttccggttgatactactcgtagtggcatgaaatttgctataatagaaagacacagggaggtgcaaaccgatgaaacaagaaaactttgtagagaacatcccgggcatcctgctgctgtcgcacggcccgttctgccaggctctgctcgagtctgcccagatgatcggcggtgaggcagtgaacgtggtggcgctgccgctgctggagaacgcgagcattgacgaatacggcgagaaggccatgcagacgttcaagcagatgcccgagggctcgatcgttctgttcgacctggcaagcggcacaccgttcaatcagatgatgatgaagagcggcggcgaggaattccccggcctgtgcggcatgaacctgccggtcctgctggaggcgatgaccatgcgcgaggccatgaagggcagcgagctagtcgccctgctggaggaatccgccaaggcggcagtcgtcaatatcaagagctttttcgaaccgtaagcagggtacataatttctgcggaagggaggtcagtacatgcgcagagatcatgtgttacaatttgtcctggaagcggcgcagacaccggattttcagggcgtgacggcgcaggccgttgcggatgccctgagcatctggcgcaacgatgccgcagtcgagctcaataagctcgtcgcagagggaaagctgcggcgggtcggcaagaaaaacgtgcgtttcttcccagcatcggaggagacggcggacatccggccggagccggccgtgcaggaggagctgccgcaggcagaggaggagaccggacagtaccgggcgttctccggccttgtcggcgcggacagcagcctgaaatatcagctgcgggtcgccatggcggccgttgcctatcccccgaacggcctgaatatgctcatcaccggctcgaccggcagcggcaagagccattttgcccgaacgatctgggaatacgcaaaggagacgaaggcactttgcggcgcgcatgcaccgatcccctttgtggagttcaactgcgcggaatatgcggacaatccgcagctgctgctgtcccacctgttcggctataaaaagggcgcgttcacgggcgcgctcgaggataagccgggtcttgtggagcaggcgaacggcggcattctgttcctcgacgagatccacggcctgtcgtcgaccgggcaggagatgtttttctccctgctcgacacgggcgtgttccgccgcgtcggcgacaatacgcctcgcacctcgcgctttatgctcatcggcgcgacaacaaagccgctgaccgatctgctcgagacgttcctgcgccgtatgccggtgctcatctccatgccgacgctctcggaccgcccgatgaaggagcggctggagctggtggagcatttttacgcagaggaggccgcccacatcggccgcacgctgcgcatccagaagggcgcgctcaacagcattctggactattcgctgcattccaatttgggcgttctgaagaatctggtgcagctgtcctgtgccaaggcgttcctgcgcgagaacgttgcggggaaccggacgggggagatcgcggtcacgttttctgacctctcgttccagacctacaacgtctcggccgagacggaaaaatacgcgcacggcgacctgcattttgcggaggatcttgtcgtgccgaaccagcgcatccagagcagcgcggcggacgttgcctcgttcgtcgatgtctatgactttgtggaatcgcgcctgtccggcgagcaggagcagcaccatgacgccggaaatctgcagcagatcattgctgcggagatcgataattattatgtggacatggagcgggccctgcaggccccggatgtcgaccgcagcctgctcgacagcgtgctgttccccggcagcatcggcatctgcagcgagtttctcagccgggcctcttatgcgctcaaccatgtctatccgtccattgcggcgacgctgcttgccatgcatctcagccagtatgtcagccgcatgcgctcagagcagccggccttcccgctgagtgtgcggggcggcctgcagggctacggtgcggagctggacttcctgcgggagaaccggcagtggctggcgcaggctatcaaggtgcacatctcgacagacgagatgaactgccttgccgtcctgctgcgtcaggcgggcaaaaagcgggagaagccgccggtctggctgacgctggcctccggcagcgacggcgtggcggccggtatggcgcgccatctcaacgccgtctatgacacaaatcacgtccactgggtggattccacacggggcggcagcctgttccagtccctgtgcgaccatatcgcaacattccacggcgaggcgggcaacctgatcttcacggatatgaaggtgctcaccacgctagagccggagctgacgaaggcgacgggcgtgccgtgccgggtcattcccatcctggagcagcgtctgctgctcgaggcgagccgcctgacgctgcatccgtcgcagcaggacctcaatgcgctgcgcgaccagatcatagaggcctatttccggcagatgagccatctgttccagacctccgggctggatgtttcggccctgcgcgaaaaatatgcagagcagacgccggaaaaggtcattctgtcgacctgcatcaccggcatcggcagcgcccgcaccattcaggagatcctgcagaagcggcttgcctatatcccgcgcctgcacgtcgtcgcggtcagcgcgctcgacagcgtggaaaagctggccgagcagtacggaagctccctgcggctcgtggtcggcacggtggagccgaacatccccggcgtgccgttcatcacggcggaccgcgtgttcagccgggagggcatcatggccatcgcctccatcgtggacgattggggcatggacaccaagcagatgctctccgggcaggaggagacctccggcggcgagacgatcagcctgctggcgcagagcctgcgctatatcgcgccccatgttgagcagcagctggccatcgactgcatcgagaccatgacgcgccagctcgagaccggctattaccggcgggccctgccgcaggatgtgcgcgtgcggctgttcatgcacgcggcgtctatgctggagcgcatcgtcaacggcactccgctcgcgatggagccggagcacgaggaactcatccgccagaacgcggcatggtttgagcgcctgcaggccctgatcgcggcgtcgtttgcgtcgttcggtcaggagatcccgcgggccgaggcattctattttatgctgtcgctgccgcagacgctcgaatgagctgcggcacgtcaaaatacgaaaattgaaacaggagatatgaaacatggtcagtcagaaagttacagtcatgaatgcgtcgggcctgcatgcgcgcccggcaaacgcctttgtgaaggaagcggtccgtcacgcgggctgcaacatcctcatcaagaaggacggcaagacctacatgggcaagtccatcgtttccgtgctctccgcctgcgtgaagtgtggtacggagatcgagctggtcgccgatggcaacgatgaggcacaggcgctgcaggatatggtgagcgccgtgaactccggcctaggcgaataagaccgattttgtacgaatgaaacagtgaggtggcaggaacatcatgaaatggcaaggcaagggcgtgtcggagggactcgccatggcgcagatccatctgtttacgccgaagctcccggagatttcgcgccagcctgcggctgacgccgaggcggaggtcgcaaagctcgaagcaacgctggcggctgcggaggaggagctgcgcgggctctatgagaccgcaaaggagaagatgggcgagcaggaggcggagatcttcgacgcccacctgacgatcctcggcgacgaatactccgtccgggagccgatcatccagcgcatccgcgagcagaagcagaatgccgccgcagcgatcacggaccagttcgacgagctggcgcagatgttccgctccctcggcgacgagctgatggcagagcgcgccgcggacgccgaggacctcaagcagcagctgctgcgcatctgcctcggctgcgggcggcaggacctgtccgtgctgccgggcgatgtgatcgtgctggcggaggagctgacgccgtccgacaccgtgcgcatggatacggcccacgtcaagggcatcgccacgaggctcggcggcgcgacggcgcacagcgccatcattgcgcgcacgctcggcatcccggccgctgccgggatcgacggctggcagacggaggcactgaacggacatatggccatcctcgacggcgcggacggtaccctgaccgtcgacccgacggatgaggagacggcgagctatcagagccgcaaggcgcaggccgactgcgaagcacaggcgctcgaggccttccgcacctgcccctcacagacgaaggacggcgcggcgcttgagatctgcgcgaacatcggcacgccgcaggaggcgcagcaggccatgaaatacggcgcggacggcgtcggcctgttccgcagcgagttcctgtttatggaccgcgacgctcttcctacggaggacgagcagtttgaggcctatcgcacggcggcgcagacaatggcgggcaagccgctcatcatccgcacgctggatgtcggcggcgacaagaagctgccgacgctcgagctgccgcatgaggacaatcccttcctcggcttccgcgccatccgcatgacgctcagccatccggagatcttccggccgcagctgcgcgccattctccgcgcggctgcctatggcgacgtgcgcgtcatgttcccaatgatcggctccatggatcagctccgcgaggcaaaggccctgctgcgtgagcaggagcagacgctgcaggcggagggcgttccgaccggccctgtgaaggtcggcatgatggtggagatcccggcagccgccgttctggcagaggagttcgcaaaggaagttgacttcttctccatcggcacgaacgacctgacgcagtatacgcttgcggtcgagcgcggcaacgccgctgtggcacacctctatgcgccggagcatccggccgtgctgcggctcatcgccatgacggcgcaggccgctgcagagcggcacattccctgcggcatgtgcggcgaggcggctggcgacccgaagctggccccggcctttgtcggtatgggcgtgaatgagctttccatgagcccgcgccgcgttccggccgtccgcaagctcctgagcgagctgacgatggacgagtgccgtcaggccgcagaaaaacttctgcatccgtaagaaaaatgtttttccggttttctgacggaaaaatgctgaaaaatcagctgatttttgaacattccgacagaaaaattgaaccggaccgaaaaaagcccacgaattactacctgtagtggcacggaaattgcatataaaatagggcgtaggggaaagtcagaatcgggcggcacaggccgcctctgaaagtcccaagacttcagtgtgaaagggaagtgccacaatgaactatcaggatcaggtggtcgtgctgaccggcgcaagcggcggcatcggctctgcgatggcaaagaaatttacagacctcggcgcgaaggtcgcgctgctggatattacggttgaccgcgtacaggctctggccgacaagctcggcctcggcagggaccgcgccttctgcgcggcggtcgatgtttccaatgaagaatccgtcaaggcgacggtcgacgcgatcgtaaagcacttcggccggatcgacgttctggtcaatgccgccgggatccccggcccgagcgcccgcgtggaggattactccttctccgatgcaaagaaggtgctcagcgtcaatctgttcggtaccttcctgatgatgcataccgttctgcccgtcatgcaggcgcagaagcacggcgcgatcctgaacttcggttccgtgtccggtgtcgtcggctatccgtttgaaagcgcctacggcgcgagcaaggcggccatcatccatctgacgaagaacgccgccagcgagaacggcggcaacggtgtgcgcatcaatgcgatctcgccgggctgggtcaagacgaacatgatggcgaccattctggacagctataagaacgtcggcttcgacaacgccgacgagaatgttacgcttgggccgatgggccgaccgggcacgccggaggagatcgcgaacgtcgcggccttcatctgctccgaggaagcttcctatgccaacggctcgaacttcctcgtggacggcggcatgacgctgggctgatcggagggagatcctatggcagcacagaatgaaaagctccgggtcgttgtcgtcggcggtgtggccggcggcgcatcggctgcggcgcgcgtcaagcgcctgaacgtaaatgcggacgtcgtggtgtttgaaaagggcagcgacgtatcgttttccaactgcggccttccgtattatctgagcggcacggtggaggacagcgaggacctcatcatgatgaccccggcggccttccggaagaagcatgacatcgatgtgcgtgtgcattccgaggtcgtgtccatcgaccgcgagaagaagaccgtcaccgtgcgcagcacggagaccggcgagacgtatgagcagccctatgacaagctcgtcctgtcgccgggcgcaaaccccatcgttcctcctgccctgaagggcgcggaccgtgagaatgtgttcaccatccgcaatgtccgcgacatcgtcgcgctcaagacatttctggataagcccgagacgaagcgtgtcttcgtggtcggcggcggctttattggtatcgaggctgcggaaaatctgcagctggccgggaaggacgtcacgctggcggagctgtccggtcagatcctgcagccgtttgacgaggatatggtccagatcctgcacaaggagctggacgaccacggcgttaagctcctgctgcacacgaacgtgcaggcgatcacggagcagggcgtgacggtcgagcggaacggcgcgcaggagacctattctgccgacgcggtcgttctggccatcggcgtctttcccgagacgaagctcgcggctgcggccgggctcgagctcggtaagaccggtgcgatccatgtgaacgaaaattatcagacgaacgacccggatatctatgcggtcggcgatgcgatcgaggtctatgacccgcagacccatgtctggcgcaagcttgcgctggccggccctgcgcagttcgaggcgcgcgccgctgcggaccacatctgcggcatcacgagtccgaaccacggctttgctggtgccctgtgcctgcgcgtgttcggtcagaacgccgcggccgtcggcatcagcgaggcacttgccgcccgctccggcctccacgcggacagcgtgctgatcttcccgggcgataaggtcggcattatgccggattggcattatatgtccctgaagctcatctttgagcgcccgacgggcctgatcctcggcgcgcaggcgatcggggagggcgacgtcgtcggccgcatgaacgtcatcgcggcgatgatccgcatgcatgcgacggtctatgacctcaaggacatgacgctgtgctattctccggtctacagcacggcgaaggaccccgtcaatcaggcggcgctcgttgccatcaatgtgctcgagggccagctccgtcaggtccatgtgtccgaggtacgctcccttgtggagtccggcgcgtatatcgtcgatgtccgcgaggagggcgagtacgccgagggccatctcgtcggctcccataacatcccgctgacgcagctgcgcgcgcggatggaggaaattccgaaggatgttcccgtgtacctgcactgccgctcgagccagcggagctattacgcgctctgttgcctgcgcggccatggctaccacaacctgacgaacatcagcggctcgttcctcggtatcagcctctatgagtatttccatgataagtccgagggccgcaagcccatcgtgaccgcatacaactttgactgagcgggagaagctatggaaaaaacgatgacagaggcgcgtgcagacgcgctgatggaggacggcttccactgctcgcagtgtgtgttcccgtatgcggcattccgcctcggcatggaccgcgatgaggcgctccgcctgagcgcaggcctcggcggcggctgcttccacggcgactcgtgcggtgcagtgaccggcgctgccatggcactcagcatcgtgttcggctttgatcggccgaatgcggaggaagcggataagctgctgatcgagaaggtccacgaattccaaaagcgttttctggaggagaacggctcgttgctctgccgccagctgctcggcggttacgacaaggctgatcccgatgccgtcgctccggacgacgcctatgataactgtgcgcgctactgcgcgtcggcctgccggatcctggattccctgatcggcgaccgttacatccgataagagttaagaaacgaggtttttccaatggcaaaactggatttattggaaaagaaaagcatcatcggcatgatccacacgctggcattgcccggcacgatggattactgcggggatatgacgaaggtcatcgaccgcgcccttgccgatctgcatgccatgcagaatgcaggcgttgacgccgtgattgtcgagaatttctgcgaccatcccgccggaacgaagctcgagccggagcagatggctgccctgaccgccgttgccacggtcgtggcgcgcgaggcgaccatcccggtcggcattgatgcggcgttctgtgatccgatggcaagcctggccattgccgtggccgtcggcgcgacgttcatccgcgtgccggtgttcgttgacacggtcgtgacgtccgacggcatcgtcaagccctgcgccagagagctgcagcgctaccgcaagctgctcggcgcggagaacatcgctctcctgtgcgatatccagacgaagcacacgttcatgctcagcagcgccatctccattgaggagagcgcactgatggcgacggagtgcggcgcggatgccctcatcatcacgggcgcgcacaccggctccgcctctccgctcgagaccatccgccgcgtgcgcgaagtcacgaagctcccgctcatcgcgggcagcggcgtcaatgcgcagaatgcagccgaccagctgtctcttgtcgaggccgccatcgtcggctcggccatgaagccgcacggcaaggcggaggagcccattgatgaggctctggcagccaagctcatgcagagcgtcaaggcctgccgctgatccctttgcgtctttatgggcagctccgctgctctgaagcatatcccagcattcatcatgtaaggaaggaggtataaagcatgcgcaatgtcgttttgactcgtgttgacgagcgcctgatccacggtcaggtcatgacctcgtggctgaagctctgcaacgcgaatgtcattctcatcatcgatgccggttccgcctcaaacgcgttcctgaagcggatcctgtttgcggctgcacccaaggatgtggagctgcaggtcatgaatgaggcagatgccgccgcctatctgaaggaagattctcccgccggagaaaaggtccttgttctttcgaagactccgcagcctctgctggccatggtccgaagcggcatcgagatcaaggagatcatcctcggcaatatgggcggcgcgcccggcagaaagcacttcaacaagagcatttccgccagcgcggacgagatccaggcattccgtgatcttgtggacgccggcgtatacgtctactgccagatggtcccgtccgatgcgaaggaagacgtcaagaagctgttgaagtaaacggcaggtcccacgcctgaactccgctcccggagctcagaacccaaaggcggcaccgcttttgcggtgaagcccaaaatagaaataaggagagagaacttgtgaatatcagtatcctgcaaatttgcctgatctcgttgttctattgcttctcgaacatcagctggccgtttggttccatgggccagtgggcaacgatcaaccgtccgctcgttggcggtcttgtcgtcggcctgatcctcggcaacccggttcagggcacgatcatcggcgcgaccatcaacgtcatctacctcggcctcgtctccgccggcggctctctgcctgctgactccggcatggccggtatcatgggtactacattcgctctgatcggcggcctcgatacgaacaccgctctggcactggccgttcctatgggccttgtcggcgctgtgatcgaagttctgaccatgaccggccagtgcatgctcattcctctggctgacaagtggatcgagcagggcaagtccaagctcgttatctgggcaaacacctggattccgtacattgtcaagtccattatccgtttcatcatcgtctttgtcatcctgtacttcggctccaatgccctcgacagcgtgacgaatgcactgagcggccgtgtcctcgatgcactgagcgtcatgggcggcatgcttccggcagtcggcgtcggcatgatgctgctgtccatctttaagggcaatgcccgctggttcctgttcctcggcttccttgctacgagcttccttggcctgaacaccatcgctgtggcattcatcttcctcatcgtggctgtcctgatggtcggcttcacggagagcgattttgccggcttcaagagcatccagcagaataacgatctttcctatcagtatttcaccaagaaggacctgcgtcattcctggttcatgtggcactggttctgcgagtcctgctacaactacgagagaatgcagggcctcggcttctgcaccgctatgatcccgctgctgcgcaagatctacaagggcgatgatgaggccatgatcgccgctatgaagcgtcagtccatgttcttcaacaccgaccatgacttcggcggcatgatcctcggcatctgcgcctccatggaggagcagaagcgctccggcgccgacatccccgacgaggcgttcgtcgccctcaagtccggcctgatgggcccgtgcgccggtatcggcgacactctgtctcaggtcgttctgcttcccgttctgtccgttattttcatcaacctcgcaacgcagggcgctgtctgggctccgatcgcctacaccgttctgttcatggccatcttctatggtgtcggctactggatgctgaacgtcggctataagagcggcggcgaagctgttctgaagctcatggagagcggcatttttgacaaggtcgtcaaggttgcgaatatcctcggctgcgcggtctgcggcgcgctgatctgcagctacgtttccttcaactggaatgtcgtcatgatgcgcgagggcgttgaggtcttcaacctccagaccggcgtgtttgacgcgattcttcccaacatgatgccgctgcttctgacgatgggcgtctatggcctgtccaagaagggtgtcaagagctcctacatcaccttcggcacgatgctgctcggcttcgtgcttggcctactcggcgtgatcgcctaaatcaggcaaacctctggccgctgtgcccacactgctgtcggcaggaaactgccgacagcgtcggcggcccccgaattcatcaaccctgcggcgtattaccgctaaaaataaggaggatttcttatgagaatcagcaatgtcggtctgtttgtcaaggatctggaaggcgccagaaagttctttgaggacttcttcggtgcgcaggtccatgccacctacgaagaggatgacggctacaagtcttacatcatgaagttcgacgagaacccgaagctggagctgatgtccaagccgaccgtcgtcgacgagaagaaggacccgaaccgtaccggctttgtgcacatctgcatcaaggtcgactcccgcgagaagctcgacgagatcatcgcgaagttcaaggctgccaactacaccatcctctatgagccggcaacaaacggcggcaatgaggtccgcgccatcacgtttgaggacaacatcctcgaggtctgctgctaaatggcaacaccgcacaattacatcttcggccttcgccggatatttttcgccgatccttcggttcgaaaagattgaaatacacaaagtattcctgcacttttcaaaccttgcctcgacaaaaaatctctcgccgaatgcgctcgctgaattgtgcggtgctgcccaaaatcatcgaaggagaaattacaatgagcgaaaagagcaagctgttttttaatggcaagaagaaagttatcggcatggtccacctgctgccgcttcccggcaacgctgcctaccagaacaacaaggaagagatcgtgaagaacgccatcgaggatgcccacaccctcatcgactgcggcgttgacgccatcatgctcgagaacttcagcgattggccccagtacagcaccgagatccccctcgaggcctattccctgatggtcagcatcgccacccgcatccgcgagttctgcaagatcccgttcggcgtcaacatcgagatgaacgccttcgtgcaggagtgggccatggcctacgccgtcgacgccgacttcatccgctttgaggcctatgtcgacaaccgtgccggttccttcggctacatcgaagcctgctccacgccgcttgccaagatccgtcaggactatccgtccgacaccatgatctttgctgacgtccacaccgccgagacctatggcgttccgaatgtcgccatcaacgagctggccggcaatgccaagggccacgatgccgatgctgtcatcgtcaccgagaacgacctgaacaagaagatcaccccggcggacgtcaagtccatgcgcgaagagatgggcgatttccccatcatcgtcggcgcaggcgtgaagccgaacaacgttctggactacatggagtactgcgatgccgttatcgtcggccgcggcttcaagaccggcgaccgcgttgacgcgaagctcgtcaaggagttcatggagatcgtccacagcaagttcaactgatttttgccccctcattcacctttcagatcgatagaaaagcgccgccccgggagacccaccggggcggcgcgcagtttatgagaagctctcaggcactttttgacaagctgaattccaactggatttagcagaacggaatgtactctgcgctgctgaacggcttaggcgggctgcctttccttgccggcatgatcggcatttatcgggctctatgtcaatagttggggtagaggcaaagaacacaataatccaagaccgtgtcggggtgcttagccccggcgcggttttttcggtacaccgctgcagaaaaggggccgatttctgaagttccggaagttccgcatcccgaagcagacgcgcttggggaccttcgttttgttgttgcagccctcgatgaagccgttggaccaggggacatccatggagttcaggatctcctgaaaccagttgcggtacgccgtgacgcaggcctgaaattccggaagatccatactcatggtaaaggattttgtctctatgctcaaccttaaagcagtttgctctctgcacactttctatcccgcggactgcgtcagcacacatgccagtgtactttgcgacatgaacggcaggcaaatgccgctctcgcccgcgccgaccagcagctccgtgccgctcgggctgatcaggaggggatacgtttcacacagatacgtcgggccgtccgtggcaccgtagtttttaccgccaacaagcgacaggttgatcgttacataactcggcccgtccggaatggtctgaatcgtccaggaaccgctccacatctcctcaaagtccttgctgtctttgtatgcccaatccagatcgaccgagccgcccgtctcatccccgggataaaagcgcagcgagaaacaggcatagcggttggtttcccctgccatggtttctgtgatccagcccatgcctgaaggctgcgaaccggcaaggccaagcgcggtcatgcctgtccagccatcagaaagccagtcggcaaattcgggcggggcgttataccaggcatattccgtaaagtcaaacgaaagatagtcgccagcttccgatatacacggcgcaagatggctcatcgcatcgagcgatgggtaccattcgcaggtgttcccgttgttgtcggtgatgaagacctgggtgtcggcttcatatgcaatgccgtcgagatttgcaaagagcagcaccggttcgccgctctctgaccggtagagtacatccgtgacctcatcggtcttcgttttttcattccactgcacacggttgatcacaactgttgcgttttcgtcgaccggcacgatgcagtacagatgccccgcaccgccgatgatgtgctccgcatcgatctccgcgatgaaggggtattccagcagcagggccgcattggtttcccaaagccacgcgggaaaacctgcctcaaacccctcctcaaaaagtccgccgacatagccgagatatgccatcccgaacatcgtctgcgaaaaatcaatcttatcccgtagccatagcagcgagtttttgccttcctctgagccaacgtactgcgcctgctgcggttctgtggcctcgctatgctgcgcccgctgtgattccgtgatctcgctgtgctgcgtgggatcctccgattgcgtttccgaggcttgcccggcaagcgtttcaggcaatgtagcactgtcggtgcccttgagctgctggatttgcgcgcaggcacaaagcaacagcagcagagccaccgccagcaacagcgcgagtacctgcttgtgtgttgttttcatagccgctcctttcagatcagaattttccgcttcggcccgaaccgccgccgccggattcgctgcgactgcttcctccgctggaggagctgcgctcgatcttccggctggaggtcgtcttatgggtaaaacgatctgtttgctccgtaagccggagccccgcggcgacataggcgtttgcggttgttttttctgatacattgtccattttctgccatatcacagcaacgatcgcgattgccgccagcagagaaagaccgattacgacaagcatcggaaaaaacaagctcgcccggacgggcttcccgtttgctgccttttccagatagactctgcattccttgacgtaatcctcaaagccgccgtaccagtcgtcctcgccgaaattgtcgaggaagaccttttccagcttctcctgaccatagctgttgaaggcatattcgcagtgtgagccatagcagaacattgcccagtcgcggtcagccatgctgagcaggagcatgatcccatcgcggttcggccctacacccatggtgtattgatggtagatggtgtaggtcgccttatagacgccttcagaatggaagtcccgatagtcctccacggttacgatgtatacaccgaccccatacttttgggagacgctttccgccatcctttccagcagcattttttcgctttcgctgagaagtccggcagtgtccgtcacgcaagaaagctgtgcacctgtctgctcagccgcagccatgctcacgcagaatacaagcaccaacagaaacgccaacaggaggcggcatattctttttttcatatctcagccctccctagcgtaccaaaagcagcagcgcagtcacgctgattgcgataagaagtgccgcgatcgccgcaaacaggccgacgacccgtttcgtgctgacgggaagcttgcctaccagcttgcccgtctgaccgttcatggcaaagaggaaatcttttccctcccaccttgtattcaggatccagacgggcagcagcgcgtaatgcaccttgccgcgcttcaagtggatatcccggctcgtttcattgcatgaggtgtagccagaaaccgtgcgttccagcgcagacaccagcgagcctgcgcagcgcttgtccgcccgctcccggctgtcttcaacgctgacatcgtatttatccgccagaaatccgggcagatacgctgtggaaaacggctttaagtccgcatagttgaacggttcgatggagtccatgtaatcatccggcattttgctcgacgcatccaccggaattttttcaaagctgacagaaccggcgcggcgcacatcgtagtgacttatctccgtgacctcataatctcccgaggtgtacttatgtaccgtggtggcatggaactccacgcttccgctggcctcgccgtcgtacatccagaaggggacatacacgcccttgatctcctgcaaatggttggctttggagaaggtcgacggcagcagaggctttttgagatagtgcttcttcagcgcctgaatggcatcctccttgctcaacttgaagggcagcacaaaatcgggctttaagatgccgctgaactgccccggaatcacagacggatttccgcagtatgggcaggacgtggctgcggtcgttgcgtcacaaatcagctctgccccgcacgatgggcagcagtaggttttcatactgtctgcgtccgcaccccagttctcgttcaggccggaggtatcccagttagagccgtcagcggcagtctgttgctcctccgcttcggcagatttttgagccgcttccgtttcttcctgctttcgcgccgcctctgctgctttcgctacttttttcgcgtagagcgcttcaatttctgcgatattgaagcttgagccgcagtaatcgcactccagcctgccggattctcctacaaaatggagcggtgccgtacaggcgggacattgataatttgtgatttgtgttgccatgttccttcctcgtttcctgtgtcggtgccagacggcacctcaacccttctctctgcggtaagtcatcccgccgcccagtatgaccgcgttttgcgtatcgtacaggaggtgcagatccgccgctgcatggtcactgtttctcagcacgatttcctgcaggtgctctgccacatcctcaccgtattcgccgccgaaatacggcgtctgaaacgcggactcgatgcgcagctcccagccgttccacatttgctccgtcccgctgcgccacagctccgccgcgcgcagctcgctcccatctgcgtctgtggaaaacacatatttttgcaggccatcctcggagatccacgtgccctcgagcagcgcaaaaacattgcgtgtctgcgcatgctcggcgcgctcccgctctgcctgcgcctgccgctccgcgtcgctgtaataccgcgcctcgtcgcccagcgtcatcataccgtagtccagccagaaagtatccgccagccacgcaaactgcggtgagtccagatagcgcagatgatagaccgtatcgtggtctttatcctcgatcgtgagtccactgatttgttctgcaaaatccgcctgaactgtcagaacgccgtttcggaacgtatggtcaaactgatcgcccagatcttcaaaattcgcgtcgtagcagcggatgggattgtccttgaactgcccgccgcggtaatagagctccatgacgcccgggctgtaaacggtttttttgatgtgaagactgtcaaaaaggagcgcggtctccgggtactgataggtgcgcacgtcagcaccgccgcaggcggtcaggccgagcagccccatccacaggcttgccgtgatgaggaacgttttgagcttcacagcatcacctccgcttttttcgcaaataaccggattctcccgctccaaattggggcgggagacggttttcatataaattctcagaaagatgccgccattactggaacgtcatgttgttgagaatgatgtcgggcatcgttcccggaacgcagtccatattccgaagcccgatagaaagggcgctgccgttgtcaagctgtgcgatatactgaatccaatcctagccgatgtttctgtaggtgcggccgcggaacgagataccgccgatcacacggccttcgatatcctgatagttctcgaagtcgtccttgtagaaatcaattttttcaacgttctctcttacctcaaactggatggcgcccgcgccgaacgctgtgggatcgtcgttttccaccaagcagcgcttgccctcgtcatacgaccagccaaagaccgggatcttcgtcataattttgaccttaacatcgtcttttgcaaactgggtgacttccacggagaagtcctgcatctcggcgttcgcagacgctgcctagtttgcctctgcggcttccgcctttaccgtgtcaagatacctcgcaatggcctccttgccggagaagccgctggtattgaatccgcttaccgtataaacacccgacacagtttctttgaaattgacgtagatgaaatgggattcgtcgtcctcagagatccatttgtagtagcggtagtttgccttcatgtggtcgctgtactcttccttgacaaactggccttttacgccgaagtaggcagcaatatcatcataagtagcgtcgaaaatattcttattgacctcgttcatccagacatagcccttctgtacctgctcttcggttacaatgccgtctccgccggaagtttctccgccagggttcgacgtcgtagtgcccatattgccgcttccggccggagcatccgctccgatgctgtcaggcatggacttgcccgcgtcgatcagcggcagataccagtcggcatagagatatgggcggttttcctcctccacatcatcccaatagagtccccacgggcgcagatagatctcatagcggtacgtatcgtcgccgttttcgtaccggccgtcgatgcagatgatatccgcaagctcctgcaagcccgggtcgacgatccagtcggcgtgcgcgagggccacatcggtaaaccagccgccctcggatgtcagcgtgccatgctcgccagtaccggtgtcgctcaggctgacggctgccgataccatggcttcgtccttggtgtagtcctcgtcccagagcgtcacggtgcccgtgcggtctgcgtcgatctcaatcacgccgcagatatcccaccactgaccttccatgctctcatatgagccggagcagtcggtcatcttccaccagccgtaccattcaccgttccaccactcgagcagagcgtcgtcagccgttgtggaaggcagtgtgggctccgtgccggcatcgacgcctgttttccgggtgagcgtggatgggtcgatggtaatggtgccgcttttgctgccgagcagttcctcaaaggtcgcctcgatttcgccggacgcgttgttcagcacgaaggcggtctgcacctccagcgttgcacccggtgcaacttcctcaaactggttttcgatcacggtggtaaaggtatcgtaatcggtatagactgtagcgacttccagctctgtgccgttctgcatgagcgtttcatcgacgctccaaagatacgaagcattctccttgctgttgtttgtaaagtcaagcgacagaacgattgcgtcatttccgtccgaatcttccatgatgcacgcgcccttgtagagcagctcatagtcgccgagctgaatcaaattggagtctttctccttatcctttccgcaggcggtgaggctgctgagcagcatcagtgccgcaagaagcaggcatagagttttggtcttcgtctgtttcataattccctcccagtatccttcagggatgtgcaaatcggccgatcagcagaaatagcatgcggttccggcgaaaaatgtgagtgcatatctgagacatttttcgttgtttctattcgcgccggctcctgtgcagcttattttttggcaaaggtgccgctgatgccgtaaccggagttctccttcatggtaaggctgctgccgtccacggagaacgtgtaagtagacggttcgctccaagcctccagtgttaccgtaagctggtcaccgtcaatggtataggtgccatcctgcttcatgtacgcattctccatggtgcatttgccttttccgttgaacgtccatgtgatcacgccgtcatctccgagatcagcagaccatgttccggccagcgcatccttgctgccacaggcggcaagcgtcagaagtgtaaccgcaatcaggaataatgctacatactttttcattttttagttcctctttctttctgttcgtttgatggatgggtcagccattcactgcgccgccgcagtattcacagcaaccgcttgcatccggcgtggtcgtcgcgccgcagcaggggcaggtgactgccgctttgggagcggcagcctgctcgatcttttcgcgcacatccctgcggacctgcgtcagaacctgccggatttcttcgccgagctttttacaattgcggtactcaacattgctttccggattataccgggacgtcatgccaggacgcgttccaggcggcggcgtaatgtccacggaactggagttgatctggaagcgcatttcgtcgaaatagggattgttgacaaaaatggtgatataaaaatcataggagtattcatagcgcggcggattgtagctgacctccttgccgtcattgtccttgcgcttaagctccgtgctgctctcgtcaatgtcgaggttgcagccggtcacgtcggcaaagtccagaacgtccgggttggcctccgcaagatttctggcccgggtcaccatgaattttccggcatcttcgtcaagaagcacctttgtgtccgcgccgagcgttctggtcgtatggaaggccgcgaccttttcctgattctccgcccggtaggcaagctgcgcacggatctcctctacggtgctgccgcgccggtcggagaaccacggggagagctttctggcgcagtttttgcagagatttccgttttccagcttgcggtttccaagtaagccgatcttttctccgcaaatgtcgcaatactttttatcgaacagtcccatatatatctcgatctcctttgtgtctgcttgctaaattatgcgctgtagggcgcgtctgccttggcattgagcgctgcacccaagatgtacagagccggaacggccacgcccgtcacgacgctgacgatgctaaagtcgccgccattgcttaaatccagcacgatgcttaaaatgctgaacacagccacgatgacgccccaagcgatgagtttgccggctttttcgctgcgcttactgtgcttgatgcccttgattccggcaatcagctggcagatgccgccgaccaacgtcaaaaacagcgccgcccagaaggtaaacttcagtccggaggccgcacccagccccgcagcaagtgcgctgattccggcgagcaatacgcccacaatgatggaaaatgcagctgcaataatcattaaaatacccgtaactttcaaaaacacatgtcctttcataatagatcctccttacatttttttggttcattttttcgtgattccgcagggcgcacagcagtgtgccctgcgcaaaaacgtactgttgttcagcgctgcgcgcaaggggcgctcagccgccttttggagcaggcctcggcagccccgcctcaagctgcgatgtgccgtaggcctcctctgcaatgcgaagcaccaaggtctccagcgcggcggcgtcctcgccgctgcacttttcggatcgttcgccgtcctcggtgcgccagacgatggagatttcgctgccagcctcctctgcagcatcgtgcgatggcttttcgtacgcgggcagtgcagcctccgccagcgtattctgcagctcaaaccattgcacccaggtaagttgccatgggatcggggtcgaagacgcatccctcccgttttctctcgtctcgccgccatccgggctcagaaaccgtccggtcagcacgggaaggtcgttctccagataaaaatgcatcgtaaagcaacgggaagaattcgtatgggtttgctgccagcgaaattcgatcagctcttttcccgcccggtacgcatccgggttttccattctgcctccatcctgtatccggctcccgataaaataccgatacagcaaaacgcccgccagcataacaaacgcggtcgccagcatgataagtagtgcaattttccgtgattttttcacgttgatctcccttttggaacagccgctgcgttcacaggctgccgcgcagcgcgccgtttccttcgcccgtcagctccatgggtcttccgccgcaggaatacggatgccgctgagaatgctggagtattcccaaaggaaccattcgccggtcgaggccttctgccgcagcttcatgggccgcggcgaatctgcgcccgccgttttaaggaacacacgcagatagcctggctccaaatcctgtggtctggggtctgcgagcacgttcagcgcgtacggcacctgcggctgatacccgttttccggcgtcgcgccttcaaaatatgcaagcggcagatagggcttgccgcgcagtcggtcgcgcagaaactggcagtcatacggcgtcaggggcttcgggccgcgcagaaggttcattgcggcagcgccagcctccttatttcggtcaaacagcgccagcgcgcacagaaacagggcgcagatgcgctctggctgccgcccctcggcggcaagcagttcaaattccggcagattttccggaatcttttgaattacgacctgcaagatgatccctccttatgctgtaaag

SEQ ID NO: 11104 - DNA, 6132 bp, Unknown
  gut microbiota DNA sequence
tgcatgtgttaggcacgccgccagcgttcgtcctgagccaggatcaaactctctataaaatggtatcttaatcagtcccttttcagatcctgaataaaatcatgcattctataagttttgctcttagcttcactcaagaatttctcgttggctattcttcacaatctcagcttttacactgacatctcaaagaacaacttgtttaatcaaattgtccaaggtgtttgttcatgtttctcgttgtttaatttacaaggtacaccgccggccgctcgtgactcattcgctttcacgtttgtgtctctcgcagacagctccgatataataccatgcatccacctttttgtcaagcacttttttcgactaatttcaatcttttttgtgcatacaatatctggcgttttcacgcgctacacggcaccatatcttgttttgagacatgctcctgtgcagttcttctttcctacgcgggagcacgggattcaattatccgtctcactttcttcccgcgcctgcaggaccgtcgccagaaagatcgcgcgatacttcccggcaaagaggccgcccagcacgagcagtcccatggcggccagcaccgccccggccagcagatagcggttgccccagcccgtcaggaaggccgctccgaaatcgcccagcacaaaggccgcgatcacgaccgccagcgccagcacgagcagggccgtcgaaacggcagacgcccgccgataggcccgctgcgccgccgcgcagtccggctcggaatagctcgccgcctcgattcgtttccactcctcgggcttctcgcgccggaagtcctcgcaaagctccgagagcagcctgcgggaggtcttttcccccggtgcggccagcgcggcgcgcaccgcctgcggatcccactgcatagccgtcaccggtactggatcttcatgcccttgacatgaagcgggttgatcggcacgatgacgcggtcgccgggcttgcactcgatgccgcgcacgtcaactgcgatatgcagcatgccgatctggccgacgacgcggcatttatgtccgttgacctccacgagcggcagggcgcggaaaaagatcccgcgcaggccgcgcagaatgaggctcagacagtcgcggaagcgtgtgatgccgccgtcgcagcgctcgcggaagccgttgtaccagccgatggggacaatggcgaccggcgtatcctcgcgcgcagtccacatggcgccgtagcctgtctggtggcccttcggcaggacgcgcagctcctccacatgcgcctcggcatagccgacggggcgcagctttgtgtggaagggcacgcggccaagaatggccgagccgagccgtacaccgtcgcagtgcatctccggaaagcgcaggaaggcagacgaattgcagcagtgcaccgtcccggtctcgaagccggcctcgcggatggctgagaccgtcttccggaaggtctcgaattcctgatgcgtgagctttttgctgccgaaggcgcagttgaagtgcgtatagacgccgctgaccgcgatatttttctgctcgcggtagacgccgaggatgtggtccatatcctccggcaggaagccgtagcggcccatgccggtgtcgatcttcagatgggcctcgacgacgtccgcgcgctcagccgcgatggcgttgatggcgcaggccgtctcccacgagccgatggtcagaatgacccgcaggtccatcaggcggttcagctccgccgggtcgccggtggagcgcagcatcaggatcgaatcgtcctcaaagccgttttcgcgcagaagctccgcctcgcgcacctcggtcacgcagaaatggtcgatcccggcctccgccagatggcgggccagcggcagcacgccgatgccgtagccgttgcccttgagcacggcccagatggggacgccgtttgccattttctgcagcagttcgatattatgggagagggcttccttctccaccacataggccttcatgggcgcacctcactttttgcggtttttcagcagatagagcttcgcgttgagattcttatagagcacactgcccttttcggcgatgagccacgccgtgcgcttgagcacgaggtcgtactcgccgacaaattccgtgaaatctccgccgaagccttttttgaacttatacaggccatacagggggttgtcctccgagatatcgccggaaacgccgcggaaatcatagacgctgcagccggtctcaacggcccactggatcatgctccactgcagcagataattcggcatgaggttgcggtgctcgttcgagcttgcgccgtagagataccacaccttgtcgccgtaatggatggccagcgtacccgcgatgggctgaccctcgtggaaggccatatacagccgcgcgtgctcgccaaggttgtcgagcatgttggcaaaatactccggcggacgggtgacgaagccgtcgcgcacaccggtcgtgagcatgatgcgggcgaaatccggcaccatttccttgccgcagacgcgcacctccacgcccttttttacggcgaggcggatgttatagcgccacttctggtggaacgaggccatgagctcgtcctccgtgcggccgttgagccagaggcggaagacgaattttggctggatcgcctcgaaattcttgccgccgtggcgcgtgcggaagccgaagtcctcaagcatgcggcggaaatcctcgttttccacggggacgtccgggtcgatcttgatgacataggccttatattccttcgccagctcgcgggcggcggcgacaagctcgccgaacgtctcgcggtcgtcaagatcgcagacggggccgcggcaggcatagagcatcgttttgtggatatagggcatggtgcggatcaggaaggcgatgctgccccggatccggccgtccgcgccgcgcgagacgatggcgcgccacttccacgcgggcttctgcttggcccagagggagctctgcgcaaaatgtcccttcgggtggctctgtacaaatgcctcgtattccgcgagggtggattcctgaatcaattcggtcatgatacattctccgttattccataggtatacagctacagtgtagcacactccgcccggcaatgcaagcaaaaagacgatgacaaacaccggcccggcgggggaaccgccgggccgggagccttttgccttatttccaggtaacgccctcgagcgtggaggacgtgatgaccgtgcggcccgccgggaagtcatagaaccgctccgtttcgtcgctgccgggtgcaaactggcggagcgtgaacgccgtgtccgactgaatgacgacgtttccgttccggtatgtgaccgtgacctcctgcgaaccggccgcctttatggtcagcgtcgtcttgtcctcgcagccgtaatcgaataggaggctgtactccatgtcgtccccgcgcagcctgcacgactccgcgtcgatctcgaacgtcagctcaccgtcctcggcataagtcgcatccagctggcattccacggcatcgctgtgcagcaggaacttcgtggacgcactttctatgaccgggttgtactgcgaatgcagcgtcagggacgttgtgcgcgggatctcaaagcagtacgacagattggtagagtacgattccccgacctccatagtcgtggcgtcgttgtcaaagcccagctccgggtcgccctgcagacgttcccccgccgcgttcgtcaggctgtccgccgagtgttccgcaacaaagacgaccgggttgaacgcctgcttttcgccgcacccggccagcaggagcagcagcggcagcagggctgcaaatatcagaaatttacgggttttcatgcgtatttctcctttccgtctgttccttccggttatttggcaatgtgcctctcggtaaatccagaataccacattttatttttttgtcaatatttttgcagaaaatatccagttaatttcaataatatgcagaatatgcaggaaggtatgtggtgattccgtggcgcgaggcaaacaggcttgtcattccgaggagcgaagcgacgtgggaatctcgggtaggcagttgcagtccgtacaggccatcgttaaaacagcgtgcaccgattacgtctgtagcggcggtcactgcgcagccgttggcggctttgccgccttacggatgcggcgtcccctttacggggagtgaccgccatgggcagtcgcaggtattgcagtagtaattcggcggcgtaaaacaaacaggtttgtcattgcgaggaggccggaggccgacgtggcaatctcgcagaaaccagttggacaacaggcaggcctcggcgaattcggagtctggtgcgtgagattgccacggccccttcggggcctcgcaatgacaaatctggggactggtgcggtcgacgatgctaccacataacttgctggtctgcaaggcgctcagggaacgccgctacagacgcaatcggtttttaccattttaacgacagctattccaaattggaagtgcctttccgagattgcaccccaagggcacttcctcgcgcttcgcgctcagggcgccacgggcgcagagcgccctcgcaatggcaaatccgggagcagctgccatgataacaacagtctgcgccggaagggacaggtccctcccggcgcagctcgtttcatttccttattttccttcaggatacagcgtgatctccgcgccggtgcagtcggccgggacggggatcaggcagagcatgccgtttccgcgcacctctccggcagtcggcgcggacatccgcaggacgatgtccaccgtgccgtcctccgcgcggagaacgaccgggtcgagcagggtgtcgctgcccagacggcagaggtcgatcagaagcagcttctgctccgcaaagaagtccgcattgccgaaggtctccgcgggcgcgctgcaggcctcgtccgtcaggtgcagcacgccgtcgtccgcgcagctgcgcagataggagcagaccgtctgcagctcctcctgcgacgtgacccagcggccgcccgcaaggagcgcgtttgcctcccatttgacctcgacggcatccgtctttgtcaggttcagaacggtcgactttgtgacatgcgtctggtccacccacgagttgctcgtcagctgctcgacagacgcatagtacggcacgaacacgatatcggtcctgtccgtctccgtgtcctcctccgccggagtttcggcccggtggatggagatggcctgcttcggcagcatgctgagcgtggaaacgagctcctcgccctgcgtctcgggcgttgtctcctccgtcggaaccgccgccggtgcacaggccgagaggagcagcagaagtgccgcaaaaattccggataattttctcataacgcgtcctccacgctccgaatgtcagtctcttaaaccgtacaccgctccaggcggtaggtctcgccgatcgggctggcggtcaggacatcctcgatcgggaattcgatctccgtcgtgcccgtgccggtgatgcggaaatactgccgctctcgcgcgtgggaggttgtgaggatcttataggtcatttccgagccggacagtttgatatagccgtcgcggaactcaatgcgggtaacgccggtacattccgtcacggcataaaatgcatccccgatctccgcacagaaggcactgggcgacgtcgtcgtctccagcgtaaagctgtcactggccgcaacctcccacacctccatcggcagggtaccggtacaaaagccataaagatcagtgctgtaaaccaccagatcgccctccggtccgctgtcatccccctgccggacagtctgcccctccgcgttggtgatcgtgcaatcacagttcacggaaacctgaatcttcacagtatgctccggacgctccggcggctccgtcggggcctccgtctcctccggcaaagcctcggtcggctcctcggtaggggcctcagtcggaggctcggttggtgcttcggtaggggcctcggtaggagcatccgtcggcgcttcggtaggggcctccgtaggcggctcggtctgaactgccgccggtgcgcaggccgtgaggagcaggataatagcagtcaaaaacacaaat

SEQ ID NO: 11105 - DNA, 5759 bp, Unknown
  gut microbiota DNA sequence
agctcggcagtgcatgccccgcccctacaaggcctcgtcggcagccgccgcaatttcttctctttccctttggcgcgttctatggtataatggcaaaaaaggcccgcggcgcgggcggtgggaggtacctttcatggaaaactatgtggattttgccgtgcagaaggcggtggagctgctggccatcgacagtccgacgggctacactgccgaggcggaggaatttgtcctgcgcgagttccgcgcgctcggctttgcggcggagcggacggccaagggcggcattctcatcgatctcggcggcgaaagcacagatgacgccctgctgctcgaggcccacgccgatacgctcggcggcatggtcgccgagatcaagggcgacggccgcctgcgcatcgtgaacgtcggcggcatgaacgccaacaacgccgaggcagagaactgccgcgtcgtgacgaagttctccggcagctacgagggcacgctgcagcttatcaatgcctccgtccatgtcaacggcgattatgcctccacaaagcgcagctgggacaccgtggaggtcgtgctggacgaggccgtcgagtccgcggacgacgtgaaggccctcggcatctccgtcggcgactttgtctgctttgagccgcgcacccgcgtgacgaagagcggctacatcaagagccgcttccttgacgacaagctgtccgtcggtatcctgctcggctttgccaaatatctgcacgacgagggcaaaacacccgcccgccgcgtctacgcccatgtgacggtctatgaagaggtcggccatggcggctccgcctcagtcccggccggggtgacggaggccatctcggtggatatgggctgcatcggcgcaggcctgcagtgcacggagcggcaggtttccatctgcgcgaaggactccggcggcccgtactcctacgacgtcgtaaagaagctcatcgccgccgcgcagaaggagcacgcggactacgccgtggacatctatccctactacggctccgacgtcgaggccacgctccgcgcgggctatgacatccgccacggcctcatcggcgcgggcgtctatgcctcgcacggctacgagcgcagccaccgcgacggcgtgctcaacacgctgcgcgtcctgcgcggctacctgttctgatgcgcaggcgcttctggatcccaacggcggcgctgctggcgctggggctcgtattctatttcgccgtctacggcttccgcttcgcgggcgtgctgctgttccttgcggccggggtcgtgctggccttcggcatcgtggacgcactgcgcgggcgatttccccgtttttcgcgctgggcgacgcgcctcggcctgatcctcgtctgtctcggccttgtgctggccgccggaacggccggatgggtcgtctccgccgggcgcggcgcggccgacccggaggcgcagtgggtcgtggtgctcggcgcgggcgtgaacgggaccgtcccgagtcaggccctgcgcgagcggctcgaggcggcgcaggactatcttgcgcgctatcccgaggccattgccgtcctttccggcgcgcagggagacggcgaagccatcacggaggcgcagtgcatgtatgactggctgacggcccgcggcgtcgaccccgcccgcctgcggatggagacgaaggccaccacgacggaggaaaacctccgctgctcgctcgacctcatcgaggccgagaccggcacgcgcccggcgcagatcgccgtcatctcaggagaatatcacctgctgcgcgccgagctgctggcccgcagggccggggctgaagcactgggcgtcccgtcgtacacgcacgaccgcgcgttttactgcctcatgctggcgcgggaggtctgcggcgtctgggccgcgctcctattctagggaagctctgaatcagagcttccctaactgatcggagaaatctatgaatcagaagtttcgctttacggcagagccgcgctccgcgctgtgcctgctctccatggcgctgatgctgctttcggctgcggcgcgcctgtggtattacctggccgaccccgtcgcgacggccatgacgctctcgcaggcggatatcttcctgctcgtcggcctgccggtcttctcggcggccctctatcctgtgctgctggccctgttcggccggaggaccatcgtgccgctgactgcgcccgtggccggattcgtcgtgttctttctctataaggcgctgtcgttttccagcgttctgcacacggtgctgtgcagcatcctctatcttgccgtgctcgttttcttcctgctgacggcgcttggcgtgctgcgcacgcgcatctttctcctgctgctggcaggtctgccgctgctcgtgcacatcatcatggacttttcggactacgagggcttcttcctcttcctgccggagctgtccgtactgctgctcatggcctcgctgctgtgccttgccctccggctccgcccggccggaaggagggagaagacatgacgcttctttccctgcttgacgccccggagtgggcagagcgcgtctgagtccaccgcatgaaaaaggcatagcagcttgtcaaaaaagtccctttgggctttttcgccaagctgcgttcagaattgcaaaatggatttttgcagcatgattttgcaattctgccgctgcggcgggagatggaacgcgaaaggcaaccctgacggtttcctttcacacttttcttccctccgaaacttttggctgggcaggtcttttgacagtctgaaacgccgctccgaaaatcggggcggcgtttcttttgaattacgtttcaaattgtctttcatacttgcaggcgctttccggcgggtgatcgtagtaggcctcctcgatgcgggtcagccggtagccgcaggcggcgaatgtgcggcgcatggcctcattcgagagacgtgtctcgccgcagatccgcggcagcccggtcgcctgcagcagctccgtcgccgcgcgcagaagtcccgccgccagcctgcgcccgcggtacgccgggtggaccgcaaggttcatgatcttgccgtagtcccgctcgccctgccagttgtagacgaacacgtcgccaacgatgcgcccatcgtccagcagggccagatagaccgcccgctcgtccgccagcagctcccgccagtcctcctccgtccagtgatcctcgggaaagcacagccggtcaaaggcaacgatggcgtcatattccgaaagtgtgagtcgtttttgttccatattcttctccaaacaccctccccaggaaatccgtaacggccgcgaggtatctttcccggtcggccatatagctcatgccgtgcccggcggcgggaaaggtcagcagggtcttatctgcggcgcggcagcaggcatagttctcccaccccatggcgcaggggacgaagcggtcgtcctcgccgtggaggaagaggacgggcgtgtcgcagtgcgccatggccccggcggcggaggcctcctccgggtcaaagccgccgaagaggcggcagccgaggcgcagcagggcatagaccgggaagaccggcagatgggcggagcggatgacgctcttcagaatggcggacggcgcgctgtagccgcagtcggccacgatgccggtgacgtttttcggcagctccggccccgccgccatgaggacggtcgccgcgcccatggacatgccgtagagcacgatcttcgcgtccggcccggcgcggccgatcacataatcgacccagcggcggcagtcataccgctcgcggataccgagcgtgaggcagcgcccgccgcttttcccgtgggcgcgctcgtcgacgagcaggacattgcagcccatccccatgccaaacggcagcccgccgcagaaatcgcgctccgccgcgctgcggtagccgtgaaacagcaggagccacggcgcgtccggggctgtgggatagcagcggccgaacagcgtcagtccgtcgtccgagcggatcgtgaccggctcatagggaagggcgagggccgcgcggatcatgcgccgcgcctccgccgcataaggccggtactggtccgtgtccggcaggacgaacatttccttttcggtcgttttccgcgcgccgaacgccagccggaacagcaaaaacgccagcccgagcgtcaggagcacaaagcccgctgcgatcagcagcgcgatgccaatgtacttcacagccgcgcccccattcacaggcccagaatgctgatgacgccgtgccgcgcaaagctggcctctgcccacggcgcggcctcgtcgatgacggcccgccagtctgcctcgtcccggctgcgcgctgcgatgcgctcccactgcccgcgggagacgggcgtgacgccgaaatagtcaaactccggcaggacgccgccgaacagttccgtcaggcgcagtgcctcccaccgctcgtctgcaagcaggatggagccgggcagccagaaccgcccgcgccagcgccccggctggaactcaaaatagcagctcccctgccgctccgacgccgggataaaatagcgcatcagcggttcagcagcggggagacgaccggctttccgtcgcggtcgagcagcggtgtcaggccgcccgcattgccgccggcgtgaaagagatagttcacgcctgtctccttgtcgacccagatctcggtaatctgcaatgctccctgtgtgtaaacgcgctcaaagcgctgctcctttgccatgatcggtccctccgtttgttgatctctgcgttcatcgtaccacagaagcgtggattttgcaacgtgttttgtccggcagaaaacaggctcccttcgccgcatcggcaaagggagcctgttgatttgattcgtccacagtctggcgttttatgagtcttcccgctttgatctccatacgcggcacagccagaggcattccgccagcagggaggccgtgatgagcgcaccggtaacggaataattccggatgcccagcaggagcggaccgagcgagacgagggcgcagacgcccgctgcgatctgcgctgcggcggcaagtccccgctttccggtcccggcgtacagcgccagcaggaccagcaggacacaggtgccaagtgccgtaaagagcggcgcaaaattcgcatagccgaacggcgtgagatcaaaataggagtacagctcccggagcggcgctgcggccgggcgcgcaaactgcagcaccgcaccatagggcagggcctccaggatcagtgcgagcacgggaaggagcagaagcggcaggcgtttcttcatggcgggtcctcctaactatatatggaatcaaataaaataaaataaatccacgcacacccgcaggcacatttcgcgcgaagcgcatgcacaaatccggcaggatttatttcgttcaaaaagcatccggtcaagtgtattagggatgaattcccaatttgcgttatgggttcatcgtccttatacataatatttagtatattttgcatccagggaagtcctgcccgaaagtgatatatcctccggatgtgatgcgtgaaatttgatgctggcgcatcaagtgatatgaaataaatccacttacgcccgcaggcatttcacttggcgaagccatatttcacgcgcgaagcgcatttcacaaatccgacaggatttatttcgttgaaaaaaacggttgtccactggacaaccggttttttctggtgcgcgaggcgggacttgaacccgcacgtccggagtggacacta

SEQ ID NO: 11106 - DNA, 2091 bp, Unknown
  gut microbiota DNA sequence
agccccctgtttgacctctattccgccgcgcgcggcgaatatacccgcccggattattcggacggcgcgatctcgtaccgcgagtttcagcggccgtatcagccccgcgtgaaatacacggccgagccggacatcgaatacgtccgcccggacgtcgacggcctctgcagcacgctcaagtccatcggcgcatccgcgaccggcggcaaggccgctgcggccgacatcatcaatcagttcgacgcggcctatgacgactatgtgctcttcaacaccatgggcgagcttgcctacctgcgctacacccgcgacctgagcggcagctactacgaggcggagtacacctggtgcacggaccagacgacgcgcgtggaaaaggccatggaggactgctacacgaccatggccaaaagcagcctgcgcagcgcgctcgaggagcagtatttcggcgaggacttctttgcgtcctacgactcggacggcgtgtattccgacgcccggaccgtcgccctcctgcagcaggaatccgagctgcaggcgcagtatgtcgccctgcagaacgacccgtcgatcgagtggaacggcagcacacgctccgtctcggagcttctggaaaacgccgtgacggccgacctctattacgaggtcctcggcgcgtattacgacgcctacggcgcgcaggcgggcgaaatttacatcaagctcatccagacgcgccgggagcttgccgggcggctgggctacggcagctacgccgactatgcctatgacgcgctctattaccgcgactacaccccggcgcaggccgagcgctatatcgagcgcgtgcgcacggagctggcccccgtctacacggaggcggccgagccgatgcagctttccgccctttccgccgatgagacgatgcagcacctgcatgaggcggccgacacgctcggcggcgaggtgcagacggccatgggcttccttgatgcctacgagctttatgacatcacaagctccgcgaataaaatgcccggctcgtacacaacgtaccttgagtcctacgagatgccctacatctatatctcgcccgaggggacgctggcggacctgctgacggccgcgcacgaatacggccactttgtcgacggctatgtaaactgcaaccagacgttttccatcgactgctccgaggtcttctcgcaggcgctggaatatctgacgctcggcagcacgtcgctgggcttcgcccgcgcggcagagctgcggcagtacaagctctatgactcgctcgagaccttcctcacgcaggcgtgctactatgcctttgagtgcaaggcctatgctctgccggacagcgagctgacggtcgggaagctcaatgagctgtttgcggaatgctgcgtggacttcggcctgtttgacgaggcgtcggcggagcaggctgcgcgcagctggatcgacgtgcagcactttttctccgcgccgtattatgtcatcagctactgcgtttcgaacgacgctgcccttcaaatttaccagctggagcaggaaacgcccggcgcgggtctgaaagccttcagcgacctgctgtatgccgcgccggagtcgacgttcctcgccatgctgcaggacgggagcctgacctcgccgtttgacgagaaccggatgcaggatctggcggcatattttaaggaagcgctgtaatttataaatttttgcgtggacatcgatagcgcgctgtaggggcggggacagccgggcccggctgcgcactgccgagcgaaacaggcctccgttaaaatggtaaccgctcccgaattgtcattgcgaggagcgaagcgcccttggctctccctttgggagagctgtcaccgaaggtgactgagagggcattgcaggcgctgccgataggttcaggccatcgctaaaatggcacgcacctccgacttgtcattccgaggagcgaagcgacgtggcaatctcgcggtacacagccggataacagggtactcccggcgaaatcgtaactgccttcccgagattgccacgggcgcaaagcgccctcgcaatgacaaatcggggccatcctcgttttatcaacagcct

SEQ ID NO: 11107 - DNA, 4767 bp, Unknown
  gut microbiota DNA sequence
cccgcatcagcgagggtatgtcatatgaagaggcgtggaaggagaccgccaaatggaccatgccgcccggctgtagcgagcacgagaccggccttgctgtcgacatcgttgcgacggacaaccagcgcctcgacgacacgcaggagcagacgccggagacgatctggctgcatgaaaactgctggcgcttcggcttcatccttcgctatcccgcggggaaggaggacgtgaccggcatcgactatgagtcgtggcactatcgctacgtcggcatcgaggccgcgcgctacctcacggagcagcagctgaccttggatgaattttgggcttcctgaagggagaaacagacatgatccgacatatcgtattctggaaattccgcccggatgccgatccggagccgttcctgcaggcgctctctgcactgccggagcagatcgactggatccgcggcatgcatgtggcgcgcagcgcagccccgaacgccgcgtgggacgccgcgctcgaggtggactttgacacgctggaggacgtggcgcgctatcgcgacgacccgcgccacaagaaggtctccgccctgtgcaagtccatccgcaccgaccgcgtcagcatcgatatcccgctgtgagcgggtggtgggtctacatcctgcgctgcggtgacggcacgctctacaccggcatgaccgatgacccggagcgccgcctcgccgcgcaccgcagcgggcacggtgcaaagtatacgcgcggccgcggcccgctggagctggtctacagcgaggcctgtgggacccgcggggacgccctgcgccgcgaggcggccatcaagcgcctgccgcgcgcgaagaagctgcggctgatcaaagaagtcctgtgactggaaacgtcacaggactttttcgttttcgactgtaggggagcgggcagccgggcccggcggcgcaccggcgcaagaaacaggctgtcagcaaaacgaggaacgccaaaggtttgtcactgcgaggagcgaagcaacgtggcaatctcgggaaggcactgccgatttggaaaggctatcgttaaaatggcacgcgccaattgcgtctgtagcggcggtcagtgaccgccttgcaggctgcaggtttcgtgacacgatcgccgaccgcacacgccaatgtagcggcgttccctgagcgcccagtaggggagcattcaaccgtgcaagcgctctggtgcaccgctgcacccgcctgacgtgtcattccgaggagcgaagcgacgtgggaatctcgcagtacccggctggatgacaggaaagccgcggcgaaatcgtaactgcctgcacgagattgccacgtcgcttcgctcctcgcaatgacaaatctgggaacctgcatggccggcggaactgcttcaaaatttgcaactgccaatggcgctcagggagcgccgctgcagacgcaattggtttgtgcgttttttcggtagcccgtgcgaactgcaagtgccttcccgagattgccacggccccttcggggcctcgcaatgacacatcaggagaatgcggcggtgcaccagagcacttccgcggttgaatatctctgtacaaggcgctcgctccccgtaaaggggacgccgcatccgtaaggcggcaaagccgccaacggctgcgcagtgagcgccgctacagacgcaattggtttttaccgttttaacggcagcctgtacggatcgttcgtgcagcgccgggcccggctgtccgctcccctacaacgcacggcagggcacggcaggcggcctcgcagagctttccgccgatctattcagcgcagcggttcctcatagcccgcgagcttgcggcccatgagcacgcccatggcggaggccatcatcaggccgcgcgtccagccggacgaatcgccgaggcagtacaggtgcgccacgtttgtcttgaggtccggggtcatcttgaccttgttgctgtagaacttcagctccggggagtacagcagcgtctcatagctggcaaagcccggcacgacctgatccatggcctgaatgaagccgatgatgttgatcatggcgcggtagggcatgccggcggtgatgtcgcccgcgacggcgtccggcagtgtcgggcggacgttcgagaacgccagctccttcggccaggtgcgcttgccgtcgaggatatcgccgaagcgctgcacgaggatgtggccgtcggccagcatgttcgtcagctcaccgaccttctgggcataggcgatgggctggttgaacggataggtgaagttgtgcgagcacaggatggacaggttcgtgttgtcggacttcaggtccttgtagctgtggccgttcacgacggcgaggttcttgtcatagttctcctggctgacaaagccgccgggattctggcagaatgtgcgaaccttgttcttgaacggctgcggatagccgacgagcttggactcgtagaggacgctgttgacctcctccatgacctcgttgcggacctcgacgcgcacgccgatgtccacggtgcccggctggtgggcgatgtcatacttcgcgcacagggattccagccattccgcgccgcggcggcctgccgcaatgacgacgtcgtcggcatagatcgtctcgcgcgtgccgccgcgcgtcggctccacgatgacgcccttgcacagcgggccatcgagcacgagatcgacgcagctgtggccgaagagcatgtcgacgcccttggcacgcaggtcgttctccagcgcaaggtagagctcctgcgccttttcggtgccgaggtggcggatggggcagtcgacgagcttcaggcctgcgcgaatggcgcggcggcggatgatgcggatcttatcggggtcggacacgccctccacatgggggtccgcgccgaattccaggtagatctggtccgtatagtcaatgagggactgggcaaagtccgggccgacgaggttcgggaaatcgccgccgacctcgtggttcagcgagagcttgccgtcggagaacgcgcctgcgccggagaagccggtcgtgatgttgcagggctggcagttcacgcacttctgcgtcttgctcttcgggcaggagcgcttttccacgctctggcccttttcgaccatcaggatcttcttgtgtgcgccgcggcggaacagctcgacggccgtaaagatgccggcaggaccggcaccaacaatgatcagatcatacttttccatagaaactcctttgtgctgcggtattgttggtttatttgaatgttattcttccttcagaagggcctctccggccttgtagatgtcgcctgcgccgacggtcaggatcaggtcgcccttctgcgcagccccgcggagataggccgtgacctcaggaagcgtctcaaagtagacgctgccgggaatgcagcgcgccagatcgcgggaggagatgccgatggtgttgctctcgcgggcggcgtagatctcggccagaacggcgacgtccacgcgcttgagctcgcggacaaaatcgtcgaacagggccttcgtgcgcgtgtaggtgtgcggctggaacgcgaggatcacgcgctgatagcccatgtgggccacggcgtcgatgagggcgtgcagctcaccgggatggtgggcatagtcgtcatagacgtccgcgccgtggtacgtccccttgaactccatgcggcggcccgcgccgtggaacgaggcaaggcccgcggcgacatccgcgccatccacgcccatgacccatgcggcgcttgcggcggccagcgcattatagacattgtggcggccgtagacctgcaggtccacatggcagtagcgcttaccgaagcagataatgtcaaacgagcgcaggtcctcggaaagcccctcggggtggatatcgttgtgcgcatcgatgccaaaggagaggtagtgcagatccgagagcgtctgcacggtatttgcatcgtcgccgttggcgatgacatggcccgtacgcggcacgaggcccgcaaatttgcggaacgagcgcttcacggcgtcgaggtccttgaaatagtccagatggtcggcctcgatgttgttcacgatggcgacggtggggtagaaattcaggaacgagtcgcagtattcgcagctctccatgataatggtgtcgccggagccgacgcggtggcctgcgtgcagcagcgggagatagccgcccatcataacggtcgggtcgcgctgcgcctgcatgaaaatatgcgtcagcatgccggtcgtggtggtcttgccgtgtgtgccggacacgcagatggcgtttttatattcgcgcatgatcacgccccaggcctgcgcccgctcaaacacggggatgccctgcgcacgggccgcggcgacctcgggattgtcgttgtgggcggcggccgtgcggataatgcagtccgcgccctgaatattctcggcgcggtggccgatgtgcacttcgatgcccttggcgaccagctcgtcggtggagacggaggcgttcatgtccgaaccggtgaccgtgatgcccatgccgcgcagcaccagtccgagcggacgcatggaaacgccgccgatgccgatcagatggatgtgcttgccggggacaaggtagctgtccagacgtttgagattgtttgccatattccttcctcctgcttccggcgctccgtgcgggcacggcgggccggttctgagcttgttaggcagcgccgcgtcatgacacctttggccttcgctgaattgtgcggtgctgctatcaggtgctgccattagtatac

SEQ ID NO: 11108 - DNA, 21756 bp, Unknown
  gut microbiota DNA sequence
gcagctcctccggcaggcggaacgtgaggctgcgcccgtccgggtgcggcacgcgcagccgccacgcatagagctggatgccgcccggcgcggcctgcgcgccgtatttccggtcgccgcagacagggcagccgcgcgagccgagctgaacgcggatctggtgcgtccggcccgtgagcagctgcaggtgcaatgcggcgcggccgtccggcagcagacgcagcggcgtgcagatcaggcgtgcctcgcgtaccccggcccgcgtgcgctgcacgacgtaggtcttgttgcgcgcgcggtcgtggaacagcaggtcataaagctcctccggctctttgcacggcgcgccctcggccagcgcgagatattccttgccggccgtgagatgcgccgagagaaaggccgccgcctcgcgggtcttggcaaagaccatcacgccgggcacgtcgcggtcgagccggtgcaccgggaagaccgtgcgcggcgcgagcagcgcagccatgctctcctgcccggagctgtccgcggcggaaagcacgccgcgcggcttgcagcacacgacgagctgcgcatcttcatagaggatcatgtcccgtccctcccgcgtctcaaaatacgctccattttactccgaagtgttcgaaattgcaagtcctgtttttggggaagctctgcctcaatcatctgcggcgtatgacggagcttttccgctgatccatcggttcgaaaagcttgacgtacacaaagtacacctgcactttccaaacctcgactcgacgaaaaatctctcgccatccgctcttgctgattgaatcagagcttcccttagctcttgacaatcctattctgtgttcgctatactgggagaaaaagagggtgatatgcatgcagacgatgcgcgaggatgcggagacgatcctgcgcgaggccgttgcggccgcgcagccgggccggcttgtgcgggaggcgctggcagcggagcggctgacgggcaggatcgtgctccttgcggcgggaaaggcggcgtgggccatggcacaggccgcctgtgcctgtgtgcccgtctggcgggggattgtcattaccaaggacggccatctcggcggggcactcccgccgcttgagttggcggaggccgggcaccccgtgccggatgcgcgggcctttgctgcggcgcgccgcgcgctggcgctcacgcaggggctgacggcggaggacacggtcctcgtgctgctgtccggtggagccagcgccctgttcgagctgccgctcgtgccggaggcgcgcctgcgggcgatcacgcagcggctcctgcgcagcggggcggatatcgcggcgatgaacgccgtgcgcaagcgcctctccgccgtgaagggcggccgctttgcgcagcactgcgccccggcgcgcgtcgtgtccgtcctgctgtcggacgtgctgggcgaccggccggacgtcatcggctccggccccgccgtgccagatccctcgacgagcggagaggcgctggaggccgccgcgcaggcaggcctgctgccggatgccgcgctggaggccctgctccggcaggagacacccaagatgctggaaaacgcccgctggcatgtggtcggcggcgtgcggctgctgtgtgccgcggcggagaaaacgtgccgcaggctcggctatgcgccgttcgtgctgacggaccgcctgagctgcgaggcgcgggaggccgggcgcttcctttcggcggccgcgcagtatcatgcggtccgcgggaaggcgcttgccctgctggcgggcggcgagaccgtcgtccatgtgacgggcagcggcctcggcgggcggaaccaggagctggcgcttgccgctgcgccggggctggagggactttcggacgccgccgtgttcagcttcggcagcgacggcacggacgggccgacggatgccgcgggcggctatgccgacggccggacggcggccattctgcgcgctctcggccgcacggcggaggcgtggctggatgataacgacgcctggcatgcgctggcgcagaccggcggcctgctgcgtaccggcccgacgggcacgaacgtcaacgacctttctgtgctgctgatcggaaaaccgaggttgactttttgataaaatttagtaagatataggtgttcttgcttgtgaaattaaccccgggaggcttttccaatgaaaaaatggcatactgtgcaggattatctggtcatcgtgttctgcgcctgtctgcttgccctgagctaccacatcttcgtgttccccaacgagttcgcgccgtccggcctgccgggcatcgcgaccatcatccagcatgtgttccattttaaggtcggctatatgacgatcctcatcaacgtcccgctcgtcctgctgacgtattatatcgtagaccaccgctatgccgtgttgtccgcgacgtttgcagtcgtgttttccgtcgtgctgctggcgctggattatgtcaacctcgcgccgtttgagtaccatacgactaccggcacgagcacgatccttgcgcccatcgcgggcggcgtcatcagcggcttctgctatggcatggtcatgcgccgcgactccagcaccggcggcacggacctgctggcggcgctcgtccaccatgtccgcccggagatgcacatcatctggatcgtgtttgccatcaatgccatcgtcgcggccctgtcctacttcgtctatgatttcaagatcgagccggtcattctctgcctgatctactgcttcctgtccagccacgtcggcgatacgatgatcaagggcttcaaggaggccgtgaaattcgagatcgtcacggataagccggaggagctttccgccgagctgctcaagcatatgaagcacggtgtcacggagatcccggccgtcggcggcttcacgcattcgaacaagacgctgctcatctgcgtcgtgaaccgccaccagatcgtggcgttccagcgcatcatccagcagttccccggctcgtttgcctacctcagctccgtgaaggagaccatgggcaacttcgcccacatcaagcgctgaagcggaaaagaatctgcgtgccccggccccggggcacgctttttgcgtgactgccagctatgtgctgccgattcgtacagactaccgttaaaacggcgatagcctccgatttgtcattgcgagggcgctttgcgcccgtggcaatctcgggaaggcactgtcgatttataccgactgccgggcaaacgcacgcgccttgtaggggaggggacagccgggcccggcggtacgctgccgagccgaacaggctatcgttaaaatggcaaacgccaaagtatggggtgtagcggcgttctctgagcgccttgcaggccccaagtttggtggcatgatcgccgaccgcacgcgccttgtagagggcggcgttctcgacgccatgccgcgtaaagttaccgtattcgccgggagtgccctgtgatccggccggatactgcgagattgccacgtcgcttcgctcctcgcaatgacaaatctggaggctttgcgccgctgaatttgtgccgtgatcattgccagtctgcaaggcgctcgctgagcgccgctacagacgcaatcggcgtttgctattttaacgacagtcggtacaaatcagcagttggcgcgccgcctataagccataaaaacatcccggatgcggctgcatccgggatcgtgtttttcagttcagcagcaggacgctcgcaatgccgaagtagatcagcagagacagcgcgtcgacgatcgtcgtgatgaacgggcttgccatgacggccgggtcgaagccgaccttcttggccagcatcggcagcacacagccgatgaccttggccacgagcacggtcagcgccatggtggcgcatacgaccagcgcaacgaggcaggtgacatccttgttgccgagcatcagccggtcgacgagcatgatcttggcaaagcaggcggctgccagcgagatgccgcagagcacggccgtgcggatctccttccacacgacgcgcggcagatcggaaaactcgatctcgccgagcgacagcgagcggatgaccgtgacggaggactgcgagccggagttgccgcccgtgtccatgagcatggggatgaaggccgtcagtgcaacctgcgcggccagcgcgctttcaaaatgcgtgatgatcaggcccgtgaacgtggccgagaccatcagcagcatgagccaggggatgcggtgcttgaagaggtcgaacgtggacgagcggagatacgtcttgtccgacggcgtcatgccgcccatgatctccatgtcctccgtggcctcgtcttccatgacgtccatggcgtcgtcgaaggtcacgatgccgaccatgcggttctccgtgtccacgaccggcagggcaaggaagttgtatttcgagaacatgcgggcaacttcttcctgatcggtgtgcgtatggacggagatgacattcgtctccatgatcttgtcgacggtctcgtcatcgtcctgcgccagcagcaggtccttgacggagacgagaccgatgagcgtgcggttcttggtgacgtagcaggtgtagatcgtctctttgtcgacgcccgtgcggcggatgcggaggatggcctcctccacggtcatgccggggcgcagcgagacatactccgttgtcatgatggagcctgcggaattctcggggtagcgcaggatctcgttgatatccttgcgcatgtcggggtccgcctgcgagaggatgcggcgcacgacatttgcgggcatttcctccacgatatcgacggcatcgtcgacatacagctcgtcgagcacctcgcgcagctcggagtccgaaaagccgcggatgagcagctcctgtgcgtccggctccatttcgacgaacgtctcggccgccagctccttcggcagcagccggaacagcagcggcaggcgggattcctccagcccgtcaaagaccgaggcgatatccgcgggattcatcgtggatagaatgtcgcggatcgtggaatacttcttttccacgagcagcgcctcaagcgtgctctctacagttacggtgtgatctgccattttccggttccctcctgattcttcatagtacggtcagagattcggaagcgggcacggcaggccgaatatcgaatgattaacgggaacgcaccgcatggacgcgggcgtcctttttcgtacttcggcctacgccagtaccattgccactcccagcatccatgacgttccctccttttgggctgaaaatttttgaaaaggccctacctcttatcatattgccgcgcggcgcgtttgtcaagcgaaaccgtggaaaaatcccttttgtttttcgtgatcttatggtaaaatagaagaaaaaccgaaaaacggagtggaaaaccttgaacacgatccgcatctatgaaacggactcgcacgcccggcggctgcaggcgcgcgtgctctcctgcgaggagagcgaaaacggctggctcgtggagctggaccgcacgatcttttatcccacgggcggcggccagccctgcgacatgggcacgctcggcggcgcggacgtcacggagacgttcctgcgcggcgagacggtgctgcaccgctgcacggcggcactgccggccggcgcggacgtgacgggcgagatcgactgggcgcggcggctggacctcatgcagcagcactccggtgagcatctcgtctccggcctcatccacgcgcgcttcggctatgagaacgtcggcttccacctcggcgcggaccttgtgacgatcgattttaacggcgaggtggacgagcaggccctgcaggagctggagcgcgccgcaaacgaggccgtctgggccgatttcgcgccgcatatctggtatccggagccggacgagctggcgcgcctcccgtaccgcagcaaaaaagcgctgacgggcgcggtgcgcctcgtgcagttcggagacattgacctgtgcgcctgctgcggcacccatgtggcccgcacgggcgagatcggcctcatcaagctgttcagcacgacgcatttccgcggcggctcgcgcatcgagatggcctgcggcggccgtgcccttgccgtgctgaacgccctttgtgcccagaaccgcgacatctccgtccgcctgtcggcaaagcccgtgcagacggccgccgccgtggcgcggctggcttccgagcggacggaggcgcagcagcgcgccgccgcgctggaggaccgcctgtttgccctgctggcgcaggacgggcagacgctccgctttgagccgcccatgccgccggagagcgtgcgccgtctggcggatgccatggtccgggcgaacgaagcgcgcagcgcagtgtttgccgggcaggacggcgcgtggcactatgccatggccgaccgggacggcgacctgcgcggccttgtaaagcggctcaatgccgcgctgcagggcaggggcggcggaaagcccggctttgtgcagggctcgctcgccgcgtcccgcacggacatcgaggcgtttttcacggcggaaagctgcagtacgcctgacccggcctgagcgccgtgccgctgcgcgcggccagctcggaaacggtcaggaattcatagccctgcgcctgcagggcgtcaatgacacgcagcgcggccgtcacgctcgagtccgtcaggtcgtgcatcagaatcacggaccccggctccgcgtggcgcaggatatgtgccgtcacggcgtcggcatcgtgcacgcgccagtcctccggatcgacggaccagaggatgacgggaagatcggcgcaggccgtctgctgcagcacggccgtgtcatacagcccgccgggcgggcgcagcagcgtcggcgcgcggcccgttgcctccatgagcttgcggcgggcctcggaaaggtcgcggcagacctcggcgcggctcatggaagtaaaatacgaatgtgtgtcgccgtgcgtgccggtctcgtgtccctcggcggcgatgcgcgcggccagctccggatacagatcgatccggtagccgcagagaaagaacgtcgcatgcacgccgcgtgcggcaagcccctcgagcaggcgctccgtgagcgcgcccgacgggccgtcgtcaaacgtcagcgccacgcagcggggctccgccgcatggccgcgcgggagcaggacggccagcgcggcaagcaggcataacagccgtttcatgcagatccctcccggacttttgtgttccggggtagtatgtgcgaaaaccggcagaatattgagaggaaacaaccatgattcaggtgatctgccccgtttgcggggcggcgctcgcgccgcagggcgcggcatggcgctgcgtgcaggggcattgctttgatgtggcaaggcagggttatgtaaaccttctgacggtgacgcagaagcactcgcgccatcccggcgacacgcgggagatggtcgcggcgcggcgcgcgtttctggacgcggggtggtatgcgcccatcgccaaaacgctggcagaccttgtgcgccgcttctgcccggaggcggcttccgtgctggacgcgggctgcggtgagggctattacctctcgcagctcggctgggtcccggagcgctggggcatcgatatctcccgcgacgccgtgcgctatgctgccgcgcgtgaccgcagtgcccactggctcacggccacggcggcccatctgccgtttgcggacggcgggttcgactgcgtgctgtccatgttcgccctgacggccggggcggagttcttccgcgtgctgcggccgggcggcatctttgtgcaggtgctggcggggcagggccatcttccggggctgaagtccatcatctatcccgcgcatgtggagaaggaaaaaacgctccacccggcgctgccgggcttttccctgctgcacacgcagacgctgcgcttttcgttctccctgccggatgcgcagagcgtgcacaatctgctgtatatgacgccgcacgtctggcgcatcacgaagcgaggcgcggaggcgctggcgcagaccgcgcagctgacggatacggcggaggtcatcttcaacatctacggtagacaagaggccgggaatctgctagaataaggacaaggatcaaatacggagagtggagcatgctggataagctgaaacaggtcgaggaccgctatgaggagctgtgcgcccgcgcggagcagccggatttttacgccgacccgaagaaggcggcggcatggctgcgcgagcagaaggagctggctccgatcgtcacagcctaccgcgcctactgcgcggcgcagcgggatatgcaggatgccgcggagctcatgaccgggcagaccgacgctgagctgaaggccctgtgccaggaggagctggccggtgcaaagaagcgcgccgccgcactcgagcaggagctgagagttctgctgctgccccatgatccgaacgacggcaagaacgtcatcctcgagatccgccccggcgtgggcggcgaggagagcgccctgtttgcgcacagcctgttccggatgtacagcctctatgccgccgcgcgcggctggactgtggagctgctgaactataacgagacggagctcggcggcatcaaggaggcggacttcatgatctgcggcgcgggagcctattcccggctgaagttcgagtccggcgtgcaccgcgtgcagcgcgtgcccgagacggagtccggcgggcgggtgcacacgtccacggcgacggtcgccgtcctgcccgagatggagcaggccgatgtggacctccggccggaggacatcgaaatgcaggtctaccggtcgtccggcgcgggcggccagcacatcaacaagacgtcgtctgccgtgcgtctcatccacaggccgaccggcatcgtcgtggcctgtcaggaggagcgcagccagttccagaaccgcgagcgctgtatgatgatgctctcctcgaagctttaccagctcgagcaggagcgcatcgagtcggccgtctcgtccgagcgccgcagccaggtcggcagcggcatgcgcaacgaaaagatccgcacctataatttcccgcagagccgtgtgaccgatcaccgcatcggcctgacgctctatcagctggattctattctgaacggcgggcttgacccgatcctcgacgcgctcatcgcggcggatcaggccgaaaagctccgccgcagcgaaagcagtgacaaatcatgaaaacacaaatgctctcggcgcagcgtccggaggacattgccgccgcagccgggctgctgcgaaacggcaagctcgtcgccatcccgaccgagaccgtctacggcctcggggcaaacgggctcgacgagaacgccgtgctgcgcatcttcgaggcgaaggggcgtccgcaggacaatcccctcattttgcatatctccgagccgaaggagctggagtcgatctgccatgacatccccgcgcaggcgtggctgctggcggagcacttctggcccggcccgctgacgatggtgctgcccgtccgcgacctcgtgccgaagcgcacgacggcagggctggataccgtcgccgtccgctgcccgaaaacggccgcgacgcgtgagctcatccggctggcgggtgtgcctatcgccgcgccgtcggccaaccgctccggcaagccatcgaccacgacggcggcccacgttctgcatgacatggacggccgcatcgaggccatcctggacggcggcccctgcgaggtcggcgtggaatccacgatcgtcgacctgacgggcgagcgcccgcgcctgctgcgcccgggcggcgttacgccggaggagctgcgcgctctgctcggcgagctggacatcgaccgcgccgtgctcggtcagatctcgaacgacgccgtcgtgcgcgctcccggcatgaagtacaagcactatgccccgtcggcggaggtctatatcatctccggcagcagcgaggcggccgcgcgctatatccgccgccgcttcggccccggcgacgccgttctgtgctttgccgaggagctgccgctctatgacggctgcaatccgacggcctacggctccgaaaacgatgtgcgcacgctctctgccgggctgtttgccgccctgcgcgacctcgaccggccggatatccgcacgatctatgcccgctgtcccgagggcggcggcgtagcctatgccgtcggcaaccgcctgaaaaaggcggcggccttccgtgtggtcgacgcggagcacgaggtatgaaaattctcggcatcaccggcggcagcggcagcgggaaaacgacgctgctgcgcgccgtggagcggctgggcggcctcggtctcgactgcgacgccatttatcattgcctgctcgaaacggacgatgcccttgtcgccgccatcggcgcgcgttttcccggcacggtccgggacggccgggtcgaccgcccggcgctggctgccgtcgtgtttgccgatccggcggagcttgcggccctcgatgccctgacgcatgaggccgttgcgcgcgaggtacggcggaggctttggcagtcggaggcaccgtttgccgccatcgacgccatcggcctgttcgaaagcggccttgccgccctgtgcgacgagacggtctgtgtgcttgcgcctgaggaaacgcgcatcgagcggctcatccggcgcgacggcatctcccgcgagcgcgctcttgcccgcatccgggcgcagaagagcgacgaggccctgcgggcccagtgcggccatgccctgtgggcggacgcgccgacgccggaggcatttcaacaacaatgtgagcaatttctgaaaggagttttgatgatggaagaaaccaagaagttcgcaaaggagcgcgaagcgctgctttccagccccaagaacggctatgaccgcatttccgaggcggaccttgccgcgatggagtcctactgcaaggagtacatgaaattcatcagcgactgcaagatggagcgggaggccgtcaagtggacgatcgaggctgctgagaaggccggcttccgggaattgaagcccggcatgcagctgaagcccggcgaccgcgtctacggcaacaaccacaacaagagcgtgattttcgccgtcgtcggcagcgagagcctgaacgagggcacgcacatctgcgcggcccacatcgattccccgcgtctggacctgaagccgaatcccctgtatgaggatgcgggcatggcctatttcaagacgcattactacggcggcatcaagaagtatcagtggacgacgaccccgctggccatccacggcgtcgtggcgaagaaggacggcaccgtcgtcaccgtgaccgtcggcgaggagccgggtgatcccatcttctgcgtgaccgacctgctggtccacctgtccgccgaccagatgcgcaagacgctggccgagggcgtgacgggcgagaacctgcgcatcctgctcggcagccgtcccctgaaggacgacgagggtgccgaccgcgtgaagttcgccattctcatgctcctgaacgagaagtacggtctgacggaggaggacttcctctccgccgagctgaccatggtccccgcaggccctgcgcgcgaggtcggcttcgaccgcagcctcatcgccgcctacggccatgacgaccgcgtatgcgcctatgccgccttcaagccgctgctggacctcggcaccccggtcaagacggccgtgtgcgtgctggccgacaaggaggagatcggctccgtcggcatctccggcatgcagagccagtatttcgagatgttcatggaggacctgtgcgaggcgacgggcgcaagcaagcgccgctgcttcgagcattcgttctgcctgtccgcagacgtcagcaacgcgtttgacccgctgtatgccgagacctgtgatccgacgaacaacacgaagatcaactacggcaccggcatcttcaagtataccggcgcgcgcggcaagtccggcagctccgacgcagccgccgaggtcatgggctatgtgcgccgcatctttgcgaagcacgacgtcatctggcagaccggcgagctcggcaaggtcgaccagggcggcggcggcacggttgcctgctacatggcaaaccgcaacatcgagaccgtcgatgccggcgtcccggtgctgtccatgcatgccccgatggagatcgtctccaagctggatacctacatgaccttcaagggcatgaaggtcttctacgaagaaaactgatctgtcctgccccgctttggagctccaaagcggggcagcgtttttgcacgatgagtagccccgcccggctctgcaggaacaatcggtacaggttggcgttaaaatggcaccagccccgaattgtcattgcgaggaggccgcaggccgacgcggcaatctcgggaaggcattgccgattcgcactggctgccgataaaaacgcattgaccaattgcgtgcgtctgtagcggcgctcattgagcgccatgcaggctggcgatgatcacggcacaaattcagtggcgcaatgcccccggatttgtcattgcgaggccccgaaggggccgcggcaatctcgggaaggcagttacgatttcgccgaggctgccctgttatcggactgagcactgcgagattcccacgtcgcttcgctcctcggaatgacaattcgggggcattcaccattttaacgatgccgtgtaccggctgttagtgcttaccaggcggtcactgaccgccgctacagacgcaatcggtgcatgctgtttcaacggcggcctgtacaatctgcgagtgccttcccgagattgccacgtcgcttcgctcctcgcaatgacaaatttgaaagcctcatgccgccgaattatcgtcccaatacttgcagttgccaatggcgctcagggaacgccctacagacgcaatcggcttgtacgtttttatcgttgccctgtacgaactgcaaatgcctgacaccccgttttacgcggattttacgtcctgcgggcgggaaaaatacggcgctgtccgggaaaacccatatttttccgcatgttttgcggccaaaacggcgtacaatgggcggaaagcctgcaaaaagaataacatcgcaggaaaaaccgacaaacgcgccagaaatttttcggaacagttgaaatttttgtgcaatgttgtataataagcatgggcggatgattggaagggagcgctgctgcgatcagtgcccccgtatccccgcaagctgagcaaagaaggagatcaccatggaacagacgctgcataatgcattcaaacgtttctctctcggcgacgagctgcgcgcctataccttcctgggctgccatgccgcagagcgcgatggagtccacggctatgttttccgtgtctgggccccgcgggcgcagggcgtcagcgtgaccggcgactggaacttctggaacaccgaggacctgccgatgacgctcgttgaatacggcatctgggaggccttttccgcctatgcgcgcgagggcgacgcctataaattctatgtccgccgccgcgacggctccgccgtctataaatccgatccctatgccttccgcaactgtgcgctgcccgacacgtcgagccgtatctgtacgctggacggctatacctggggcgatgccgactaccgccgcaagcagggcaagcgtaagctgctcaactgcccgatgaacatctatgagatgcacttcggctcgtggcggcgcaagccggacggcagcctctatacctacgacgagctggcagatgagctcgtgccctacctgaaggacatgggctacacccacattgagctcatgccgctgtccgaatatccctatgagccgtcgtggggctatcaggtcacgggctactatgctccgacgttccgctacggcgagccgaagcagctcatgcgctttgtggacaagtgccacgaggccggcatcggcgtgctgctcgactgggtcccggcccacttcccgaaggacgagaacggcctttatgaattcgacggcacctgctgctatgagctggaagacccgctcatgaacgagcaccccgactggacgacccgcatcttcgacttcggcaagggcgaggtgcagtcgttcctcatctcgaacgccgtgtactggctggagcagtaccacatcgacggcctgcgcgtcgacgccgtggccgccatgctctacctcgactacggccgccgcgagtaccacccgaacaagttcggcggcaaggagaacctcgaggccatcgccttcctgcgcaagctcaaccgcgcggtgttctccgtgcggcgcagtgccatcacggcggccgaggagtccacggccttcccgctcgtgacgaagccggattacgacggcggtctcggcttcctgttcaagtggaacatgggctggatgaacgacatgctgcactatatgtcgctcgatccgctgttccgcaagggcagccacaacgacctgacgttctccatgacgtatgcctattccgaaaacttcattctcccgctttcgcatgacgaggtggtgcacggcaagtgctccctcatcaacaagatgccgggcgaatatgacgataagttcagcaacctgcgcgtgttctacggcttcatgatgggccaccccggcaagaagctcagcttcatgggcaacgaatttgcgcagttcatcgagtggaattacgcacagcagctcgactggctcctgctcgactatgagcgccatcgccagatgcaggactatgtgcgcgatctgaaccatttctatctggatcacagcagcctgtggaacaacgattccgactggaacggcttccggtggatctccgccgacgaccgcgacaacagcgttatcgccttccgccgcatcgatcgccgcggctgtgaactgatcgtgatctgcaacttctgcccggtcacccggacggattatcgcctgggtctgccgaagccgggcgaatacgaggcggtcttcaacagtgacgaggtccgctacggcggcaagggaacggagcttcccgttgtgacggccgaaaaggagccgctgcacggcctgcccttctccggcagcttcacgctcgcgccgctctccgtggccttctaccgcaaaaagacagccccgcgcaagaaaacggcaaaatcctgaatgacgagaaggagaaatgaccatgaacttccagaaaaagcactgcgtcgcgatgctgctggcgggcgggcaggggagccgcctgatggtgctgacggagaacacggcaaagcctgcggtcccgttcggcggtaagtatcgcatcatcgattttcctctctccaactgcgtgaattccggcattgacaccatcggcgtgctgacgcagtatcagccgctcgagctcaatgagtacatcggaaacggccagccgtggcgtctgaaccgcagccactgcggcgtgcaggtcttgccgccctatgccaagagcaagaaatccgagtggtacaagggcacggccaatgcgatctatcagaacatcgccttcatcgagcgctacgatccggacgatgtcatcatcctctccggcgaccacatctataaaatggactatgccgccatgctgcgctaccacgagcagatggaggccgactgcaccatcgccgtgcgcacggtgccgctggccgaggccagccgcttcggcatcatgaacacccgggaggacggctccatctacgaattcgaggagaagccgaagcatccgaagagcacgaacgcatccatgggcatctacatcttcaagtggagcgtgctgaaaaagttcctcatcgaggacgaggagaacccgcgttccgagaacgacttcggcaagaacgtcatccccgccattctgaacgagggctaccgcctgttcgcctatgaattccagggctactggaaggacgtcggcacgatcagctccctgtgggaggccaatatggatctgctgggcaagaaccccgccttcaacctctacggcgagaagggcaaccgcatctatgcccggaactacgccatgccgtcgagcatcatcgcccgcgagtcgaagaataagaactgcttcatcgccgagggctgcgaaatttatggcaccatcacgcactccatcatctccacgggctgcacggtcgactccggcgccatcgtggaggacagcgtcatcatgccgaacgtccatattgagtccggtgtcatcatccgccacgccatcatcggcgaggactgccgcatctgccgcggcgcggtgatcggcggctcgttcgcccccggtgaggaaaagaagatcagtgtggtcggaaaggccaagaccattgccgagaacaccgccatcaagccgggcgatatttattgagagggaggacaagaaccatgactacgatgggcatcatttttgcgaacatctatgacagctccctcggtgagctgacgaacaagcgcaccatggcgtctctgccctatggcgggcgctatcgtcagatcgatttctccctgtcgaacatgacgaattctgccattcgccatatcggtatcatcacgaagtataattatcagtcccttatgaaccacatcggctccgggcaggagtgggatctggagctcggcgaaggcggcctggaattcctgacgccgtttgccatgggccacaacggcagctaccgcggcaagctcgaggcgctggattccgccatgaatttcctgaaaatctccacggaggaatatgtcgttctggccgacagcggcgtgctgtgcgccatcaatctggaaaagatcgtcgaggcccacgccgcctcgggcgcggacgtcaccgtcgtggtgaaggacggcatctgcaacgggcagaagcagctcgatctggccgtgaaggtcgacgcggatgaccgcgtgacggacgtagcggttgactattgcgccggggagcagtatcttgcctccatgggcctgtttgtcatccgccgcgagctcctcatgcgtgaggtcacggaggccgtggcccacaaccgctaccatttcgagcgcgaccttgtcatgcacggcttcgcagagaccggcatgaaggtcaacgcctaccgctatgacggcgtggcgctgttcaacgagagcacgacggagttcttccacaacagcctcgccctcatccgcccggagatccgccatggcctgttcgcccgcgaggacctgacgatctacacgaaggtccgcgacgaagtgcctgcctactacggcgagcattccgagatcgacgactgcgtcgtggccgacggctgcgtgctcgagggctccgccgtcaattccgttctcttccgcagcgtcaagctcggcgagggcgcgtccgtgcgcaacagcgtcatcatgcagcgctgcaccatcggcgagggcgccgatctggagtgcgtcatcatggatatggacgtcgtcgtccgtccgggcgccgtgctgcgcggcacgatggatcatccgctggtgttcaagagaggagaggtcgtatgaggatcgcaatggtcgcctccgaggctgcgccatttgtcaagacgggcggcctgggcgacgtgatgcaggcgctgcccaatgcactgtccaagctgaagggcaacgagatctgcctgttcctgccgtactataagcgcatcaaggagaatccggccgtcgaaacggagcaggtcggctcgttctccatggagctggcctggcgtgagagctatgtcggcattctgcgcctgaagtcccgccgcaagaagctgcaggtctacttcatcgacaacgactactatttcggcgcgcgcagcaccgtttacggcgatttcgacgacggtgagcgcttcgcctatttctcaaaggccgtgatggctgcgctgtacttcctcgacttcaagcccgatatcctgcactgccacgactggcaggcggccatgacgcctgcgtatctgcgcgcgctgtaccatgactggtgcccgcagacgaagctcgtcttcaccatccacaacgtggagtatcagggctgggccgatgcgtcgttcttcgacaatattctcggtctgccggatgaataccgcgcgagcctgacgtttgacggcgcgatcaacatgatgaagggcgccatcgagctctcggacatcgtcacgacggtctcgaagtcctatgccgaggagctgcgctacccatactatgcccaccgtctggacggcgtgctgcgcaatgcgtggctgtggggcatcacgaacggcattgacaccgatgtctttgaccccgagacggactgcgccctgagcgcgaactattccgccgccgatatgagcggcaaatgggtcaacaagcgcgccctgcgcgaggagatgggcctgagcaccgacacggacgctcctatcctcggtatggtcacgcgtctggccgggcacaagggcatcgacctgctgtgctacatcggccagcgcctgatggagcgcgaggtccagctcgtcatcgtcggcacgggcgaaaagcagtatgagtacgctctgagcgcactggcccgccagtatcccggccgcatcgccgtccggctgtgcttcgacccggcgctcgcctcccgtgtttatgcgggctgcgacatgtatctcatgccgtcgaagtccgagccgtgcggcctgtcccagctcatcgccatgcactacggcaccgtgcccatcgtcgcctcgaccggcggcctgcgcgacaccgtcccgccctacaatcccgaaacgggtgagggccgcggctttaccttccagagctacaacgccgatgatttcctcggcgccatcgaccgcgcagcgggcctgtattacggcgaccgcgacgcatggaacaggctggcccgccatgatatggagtgtgacttcagctggcaggtcccggccaacgaatatatgcagctgtacagcgaattgctctacggcaagcagtaataaatcatgatttcaaacgctgattccggaattacggaaaactttaggaggccccatgaacaagaagcaaaattccaaacagaagatccagaagcttgcggagaatgacgcccgtcccgagcgcgccattcagcccacggagctgctcaacgacacgctgcgccgcattttcggctgcgagcttgccgacgccacccagaagcaggtctatcgcgcgctgtgcatcagcgtccgcgagctgctgacggagaagaaccgcgtcttcggcaaccgctgcgccgaaaaggagcgcaaggaagtttattatatgtcgatggagttcctggtcggcaccagcctgcgcaataacctctttaacctcgggctggaggcagagttccgcaaggcactggctgatgcaggcttcgacatcgatgagatctacgccatcgatcccgacgccggccttggaaacggcggccttggccgtctggcctcctgctatatggatgccgcgaccggcatggactacccgatgaccggcttctccatccgctatgaattcggcatcttcaagcagaagatcgtcgacggctggcagatggagttcccggacaactggctcgagatgggcgacgtgtggctgcaggcccgcgaggacgacgccgtggaggtcaagttcggcggcgaggtccgcgagtggatggacaacgaccgcttcaaggtcgcgcaggttggctacagctccgttatggccgtgccgtatgacatgtatatctccggctatgacagcgatgccgccaaccgccttgtcctgtggagcgccaagctgccgcagagctttgatatggccgccttctcccgcggcgactatgtccgcgcgctcgagcgcaacgccatggccgagaccatctcgaaggtcctctatccggcggacgatcacattcagggcaagcgcctgcgcctgaagcagcagtatctgcttgtttccgcgtcgctgcagagcatcctgaagaagcactataagaaataccgcacctacacgaacctgccggaaaaggtcgccattcatatcaacgacacccatccagctctgtgtgtgccggagctgatgcgcctgctcatcgatgagcacgacttcggctgggacgaggcgtgggacatcacctgccgcacgctgtcctatacgaaccacaccgtcatgagcgaggcgcttgagcgctggaacgtcgatctgttccgcgagcagctgccgcgcgtctactccatctgtcaggagatcaaccgccgcctcatcgagcgcctgtgcgcggtctacccgaacgactggggcaagatcaactacatggccgtcatcgcgaacaacgaggtccgcatggcgaacctctgccttgccgcctgccacaaggtcaacggcgtttccaagctgcacacggacatcctgcgcaacggcatcttccgcgactactgtcagatcacgccggagcgcttcctgaacgtgacgaacggcatcgcctatcgccgttggctgtgccagtccgatccgctgctgacggattatctcaagcagctcatcggcggcgacttcctgcgggatgcccgcgcactcgagaagctcctgccgtatcagaatgacgaaaaggtgcttgcggacctcatggccatcaagcgcaagaacaaggagcgcctcgccgctctcatcgagaaccagaacggcgtgcgcgtcgacccggattccattttcgatatccagatcaagcgcctgcatgagtacaagcgccagctgctcaacatcctgcatgttctgtatctctaccgccagatcaaggccaatccgcacggcgatttcatgccccgcacgttcatcttcgcggccaaggcctccgcgggctatatccgcgccaagcagatcatcagcctcatcgtcgctgcgtcgaagctcatcaataacgacccggacgtcaacgacaagctgaaggtcgtcttcctcgaggactacaaggtctcccttgcggagatcatcatcccggccgccgatatctccgagcagatctccatcgcgggcaaggaggcctccggcaccggcaacatgaagctcatgatcaacggcgccgtgaccatcggcacgctcgacggcgcgaacgtcgagatccacgagcaggtcggcgacgagaacatcttcctcttcggcatgaaggcccatgaggtcgaggagctgtggcagcgcggctaccatccgacggaattcgtcacgccggagctgcaggccgtgctcgatatgctcacgtccggcgtgctcggccagcgcttcgacgatctggtcgattcgctgctcacgaaccgcttcggcacagccgacccctatatgacgctggccgatttccaggattacgcccgcgcgcagcgcgatgtcgccgcggtctatcaggataagcagcactttgcccgcatgtccctcatcaacatcgccaaggccggcatcttctcctcggaccgcgccgtcaaggaatacgcggacgagatctgggatctcgactgagatgcgtatcctgtttgacagccgtcagacgcagtacaagaccccgttcggaacgctccggacgggggagtgctgcgttctgcagatccgcatcccgacggaggtcggcgcctccggcgtccgcctgatgctggaggacagcgagcacgctgtgtgcgccgagctgccgttttccttcgcctcgcgcggcgaggacggctatgagctctggcgtctggaattcacgcggcaggagaccgggctgcatttttactggttccgcatcgacaagcgcgacggcggcagcttccgcctgttccgacagggg

SEQ ID NO: 11109 - DNA, 1277 bp, Unknown
  gut microbiota DNA sequence
ccggctggtcaaaacaagggaataccgtacgtgcccggtccggaaccaataacgtatacaggaactcatcccgtcgattcaaggattgatccgccggagtaaaagtgatcgctacccggttctctcccaccgctacccaatctgaggcaatcacgatatgctcatctttcacttcatagggaatatctcctccgttcaaggttacggaggtcacttgctccggttctccgcggaaatcaataataagcggctgtttctcgtctaatcgcaaggatagctccacttttccccggatcgcctcgtcacgagattccgggatcgagaagaaaagattataacggacatttgagaaatgctccttccggaattgagctagctcaaggctcacaccgggccgggacaaaccggcctcatcttgtttaacagagctacaagcaaccagaccggacagtacgcaagctccgataaatacctttagattcatatctcgtaattattctcttaagtattctgctatacccataaaatttcgttccaacaaatacatctggctagccataaaagtgaaaaaatctccccaatgcgctctccgatgcaaatccaatccttcttttgctacatagatacgggccacttgtcggccattctcacggacaaaacaaatatcccagatcaagccttcgggaaaatcctgttccaacgtctctttataccaagtcaggcgctcaaacatttccagacgtaaatcctcgctacggtggtttacctcaagaataacgtaagccccttggcggttcgcgtcgaatttcaactcaacgccctttaccttcgtatcatataatgtccaaattttcttacgcccccgcaaatagggttgcacctcacaaaaagcggcgaagctttcccaaaactccaatttgagattcttcagttcctccttactatacattacctataaatgtctttctttgttaccttaacgatctgtccgaatttagagagtttctccatatccatactctttgaattaccgactatcgcatatatcattaaatgatcttgtatattctccctataaaaacgaaggatatcctccatagtcatccgatcgataacctccagataatccttgttcggatcgctctcgtacccttcacgccggaaaccggcgatcttcaaggaaagggagcgactagtaggatattcattattcacccaattacgaatcgtctgcttcaccgactccacccgttccggacgttccggcatatcatgca

SEQ ID NO: 11110 - DNA, 2014 bp, Unknown
  gut microbiota DNA sequence
gttgaattgccctgcacaaggcgttcactaagcgccgctgcatttttctctcgcacggcgggcttttcaaaggcattcttccgtgaaatacccctcgtgggttgcgggcggcggaaaaaatggctggcttgctgcaaggcgcgcgcactcgtccgcatccccgagcaggtgcagcagcctgtcccgctcctccgaaagctcgtccgaaaagcagcgcaggacgcgctccttttccgcagggacatgctgcaggcacagcgcggtcatcgcaagtgtctgatccgtcagcgcccactgggagaccagctccggcagtaccggggcagccattgcatacgcctcacactgaacgcataaaagaacatagtcccagagctccatgtcgttccgctcaggcgcgtaacggcgcagcgcagcggcccgttcctcgccctgcacgcagaacgcataagcaaggcggggatggaccgccccgcgctgcgcgcagagcaggtcggcggcattcgctgcgtctgcctcgcggaagcaggccgcagccgcagctttgtctcccagcccaaaatggcacacaccgagattatagagcagaacggggctttggtcggcccggtgcgcctcctgaagcgcggcaagcgccccggcgaattcgccgttttcgaaccgcagccgggcgatattctggagaatgagcggatggcgggagcgctgcaaggccttttgaatccaataacgtgcctctgcctcagagtcccgaacactaccacccatcaaaaaatagaaccagccaaggttgctgtccgctctggggtccccgctgccgcacgcctgccggaaggcgcgctccgcctgctcaatgtcgccgcggtccagcgcctgcatcgcctgcgtgttccaggttgtccagtttttgtccatagaaattccgcccttcacactgcaaaggccaacggggaacggtcacttccatccgttccgccgctgtgtttttcgtacttcaaaccagctcctgctccacgcttaccactgcgttggactcgtcatattcgatggtgatcaaatacccgtctttcgtataatgggaagatactttcggcacatcatttctgccggtatagaggaacagatattctccatccggatcgatcgctcttacttcctctaactgcatgccctgctttacgttatcgaaatcagattttagcagccgtgtgctgtagattttccccgccagccgatcgcccgaagcgtcaaacagaagcacggcaatgcttccgtctccaagataggccgcgcgatatgtatcgcttattttcctgacgcattccatggggtattttgcatggatttcgtccatcgagccctgaagcccggccagctccagaagctgcgtttcatcgtaggttccggatgccagatcgatcagacttttgtccgacggggacaccgcaattttcaaatcgcgcttcggacgggcgcagcccgtgagcaatatcagcatttcggcaagcagcacgaggcactctatgaaccgcacgcagcacgccgtataactgccagttaccgggagatggaattttgtttgatgcatgggttaccgtcctttctgccgtttgcgggatgccccttgcgcgtattgagcgcttacggcagctgtaaatatcgcagctgtgatcctgcggcgtgcagctgtcattgcgaggccccaacggggccgtggcgccctgagcgcgaagcgcgaggaagtgcccttggggtgcaatttcgcagtacctggccggataacaggaaagcctccggcgaatatggtaccgttacgcggcggggcgtcgaggacgccgccacctacaaggtgtgtgcggtcggcgatggcttgcacgagccgcaagtgccttcccgagattgccacgtcgctttgctcctcgcaatgacacatcaggcgggtgcggcggcgcaccagtgcccttctgccgttgaattgccctgcacaaggcgttcactaagcgccgctgcattt

SEQ ID NO: 11111 - DNA, 2187 bp, Unknown
  gut microbiota DNA sequence
tgccccttgcgggttgtgagcgccatgcaggctgacagtgattgcagtacgaattctatggcgtaaggctcccaagtttgtcattccgaggagcgaagcgacgtgggaatctcgcagaacccggttggatcacatggtactcccggcgaaaacgtaactgccttcccgagattgccacgtcgctttgctcctcgcaatggcacatcaggcgggtgcggcggcgcaccagtgcccttctgccgttgaattgccctgcacaaggcgttcactaagcgccgctgcatttttctctcgcacggcggacctgtacggatcgccgcagcctacggaaaaatatccgaaatttggcaataagggccagaactgtccatttttatgccacaagaatatgccattcttcacaacttgtcaagcattattttttcaaaaaaggtattgatttattcttaatatgcgttatattattcctgtgaaggcctatcaactacagactttaggaggacaaatggcaaaggataatgcacagagcagctttcagcggggcgttatgtcgctgctgatcctctcgctgctcgatcaggaggacatgtacggatatcagatcgtgcaggagatcgcggcgcgcagcggcgggaccattgtgacgcaggagggctctttgtacccggtgctctataagctgcaggatcagggcatgatctccggcgaaaaggtgctggtgggcaagcggatgacgcgcgtctactatcatctggaggagcccggccaccgccgtctgcaggagctggtgcacgagtatcaggtgatgacacggggcgtttttcaaatcattcaaagagagacagacgcgaaggaaggcggctgaacggggaatgcggcgagccgggcgcggcatcgtatgccgaacggtatatagtgtgaggcagggcaaaccgcagcatcacgaccccgcaggcactgcgcagcgcctgcgggttttttataaagcagagcaaaaaaatttcgacttattttgacttttttgaaaaaacctgtccgttttccgattctgatgtaatatagagatagaaggaaaatttgcgcagcaaaggagagcgcccatgaaaaagagacggatcgtttccctcctgctggcggccgcgatcctggccgccgccctgaccggctgcgcaaatctcagggtcgggctgatgctcctgcagcacgcgaccgggccgtatgatccgatggatcaggtcatggaagaccggttgaatgccatactggaggccgccgtggcgcaggatgccgctgcgatcaaggtgcagttcgcgccgaacgccatcgcggtgcagccggaattagatagccagatcgaggcactatttgactactacgacagcgaaaatggcgaaattgacaatatttcggggcgcgctggttccgcatcagatggcgctggcggaaaaaaccgctattatgagatgagtggaaaaatcgtatcaggtgaaatgtatcttgtctatatacgcgcaatcacagaggatacaaatgatccggataacgttggcgtttgggcgttgctcctgcgccgcaaggccgatgaagcagactatcctgatggattaagctatcatgtaaaaggtgaagaggacatgattggcgtctatgtcgggcttcctgcgtatcgctttgacctcgggctgccgactgagtaagaggaacctgctaaagataaaacttccatctttagcaggcccgccccatcccgcagaaaggaagtgaccccttgaaccagacaaaactcctgttcccactgatctttatccagcctactcgaatgtcttagaaagcgatctatctgtaacttacaggattaaattcagagatccgggaatgttctatgcttttagccgggaacattcagacgtttgggcatgcgatgcaagtacatatacaataatgtacgttttcgggtaggtggtgaaagagttatgcgtaactgttgtagaaaattattattgataatacagatagtcctaattcctgctctcctgttgagtggctgcgcagacctcaaaatttccaaggcgcttgtacagcatgctgtcgggggaatttatgatccgaccgaccagatcgcagtagaacagctgaatgccatactggacgccgttgtcgcgcaggatgccgctgcggtcaaggccc

SEQ ID NO: 11112 - DNA, 1883 bp, Unknown
  gut microbiota DNA sequence
gatgaccagatcgaggcactgttggattactacgcgggaaaatcctgggagattgacagccccggatgtatgaccatggattcttcaaatgcagatgggacgggtggtcgagccagctccttccagatgcacggaatgattttaaccgatcggttctatcgtttttccttgcgcggtatttcagtggacacaaaaaatccagacaatgtcggcatttgggcattgttcctgctccaagtggatcagcctacggactatgcgtattgtgtggctggtgaagatgacatggttggcatatatgttgacctcccagcggagcaatttgattatgaagtgactggctgaacaagccattcttgctaaagatgtaactttcgtctttagcaggtccacaccggcgcttcgaacgggctgccattaagatggcgggaacccaaagccagcctgtagcggcgctccctgagcgccttgtacggggcaattcagctgcagaagggcacgtgtacacctcgcgctctcttgacgtgtcattgcgaggagtaaaatggtatgcactcccgaattgtcattgcgaggccccaagggggccgtggcaatctcgcagtacccggtgggataacaggaaagccccggcgaaaacgtaactgccttcccgagattgcaccccaagggcacttcctcgcgcttcgcgctcagggcgctacgtcggccgttggccgcctcgcaatgacaaatttggggcttttacgccatagaatcggtgcagccatttgacggcctgtgcggaaaccatacagaaggggggatatcatgaagaaaaaatggatcattcccgccattattgcagtagtccttgttgcgattgctctttttatagctgcctatccaatcctgctctttgtcgctgcaacggatgaatcgataaagcagctgaacaattcgtacatcaacagcgactatcagggctggcacgaggtgactttctttgacaagcaccacttttccctgcctgatacatggcgcattgaagccatcgatgatacgacctattgcatttatgcggaggatgcgcgggtaatcgcctttgttggagagttgggaaaggacgcgccatatagagatacggatgcattctgtgcttcgatgttcaagagcgtggaaattgtttcgcgcacggaattacacgtcggagaacacttcgggaacggttgcaatgcatatcaggcaacagcgcttatgcaagatgcgcagcaggaagaatttatttatgtttttgcacaatatgtcctttctgctgattttgataaacgatgtgcaattctcttccaaaacgacgcattcaaccgcgatgagatatcagagtatgctattgcaattgcctactcttatcgatcgggcgactacaaggatggagaataggctgagatattatttgtaaaggattaatacctgctaaagatgaaactttcacctttagcaggttccgccccatcccccagaaaggaagtgacctcttgaaccagacaaaactcctgttcccgctgatctttatatcgctggaggacgatagcagcattgtcatcccgccgcagccgaccagtcccggcgagatcatgtccggcggcgagggcgagccggtcgaggcagacgctcctgctgaagatgaaaccgtctccccgcagggaactcacgttaccggaacacagactgttacccatgagtatctgaccctgaacggcaaggtcgcaagagagacaattaaaacgaataactccttgacagcagtccttgatttcatctatgatgaatccgggaagccgtttgcactgaagtattcgacgaatggaacgagcttccaaacatattattacgttctgaatttg

SEQ ID NO: 11113 - DNA, 106910 bp, Unknown
  gut microbiota DNA sequence
cgcggcctatgaatatgatgcatggggaaatatcgtgtccagttccggtagactggctgagatcaatcctctcagatatcgcggatactattatgattctgagacgggattctattacttgcagtctcgttattatgatcctgcgaaccggagattcatcaatgcagattgctatacaagcacgaacaactccaacgaaattgcttgtaacatgttcgcatactgttataacaatccaataacttatcatgactcttgcggcacagaaccggttgaaacaattgatatttatggaaatggttctgcatactgttatgtctatgaatacagttacagtgggaatatgtcgggaattttgggtacatctagtaatgtacaggtttctgaaagcggaaagctgtatatatacaaaggtgttacgcaagattattttgaagactcgagtaatacgcctgaaggattccgagctggggttgactttatggttggtgattttatagagagttcgaaaaataatccaaatctccaagtcagagattcttaccgctgtacaatgaaatctcaaatgaaagcaattacgtcgattctgcttgagtatgcggaggggactgagtggaaacggacgcaggattcacttataacggagtggcgagagcataatcgttatgcttgggcctctgcgcgtgcgaaacatgttgattttgataataaagaagagggaaagggcttcttttacttccttgggaaagcaatgcggtcaatttgggaaaattgacggggggggtaaattgagatgaagaaaaaagttcaatcgtatacctttcctgtatttggaagtatcctgtccctgtttattctggttttctgcacagcatgcgcttcctttgacagctatctggaaaccgctctgaatttttatgatgcgcaccagacagagctgcaagcagcgcaggtggccctgcaggagttcacggactccaacgaatgctttatgtggatcacaagcacagactctctcggggaaaattataactataataacggctatacgaaaaaatacggcggtttatactttatttcgccggagggctatcccgacgaaacataccagaacctgtatgcctttgtttctccgctgttttcggatgatctgcacagcatcgaagcatcaaaagatatgattcgattcacggtgctgctgacatcaaatatcggtacggactcatcactggtatggaccaatggtgaaaaggcgcccaccggtacatatcctaccgtgcagcggcagcggcagttggatgcacattggtatgcgatcacagcttcggattaaaataaagagctcccgtgaacctgctaaaggcgaaactttcatctttagcacgccctcacggtagcctacaggaaggaagtggtaccttgcaccgaacaaaaatctatttcccagtgatcatcctttccctttcggacagcgactacccgacggtgccgatcaaattcggctacactggcagctggcgcagagtgatcacgccgatccacacggataccacggtgtatgcagtttatacggcagtcggcggtggcggcggaggaggcggggagatcattatcccgccgcagccgaccagccccggtgagatcatgtccggcggcgagggcgaaccggtcgaggcagacgttcctgctgaagatgaagccgtctccccgcagggaactcacgttaccggaacacagactgttacccatgagtatctgactctgaacggtaaagttgcccgtgaaacgatccggacgaataataccttgacagcggtccttgatttcatctatgatgaatccggaaagccgtttgcactgaagtattcgacgaatggaacgagctttgagacgtattattacgttctcaatctccaaggcgacgtggtaaagctgatccactatatccccggctttgagtatgagtctgtcgcgacttacgagtatgatgcgtggggaaatattctctccagctccggtaaattggcggaaatcaatccgctcagatatcgtggatattactatgattccgagactggtttctactatttgcagagcagatactatgacccggagaaccataggttcattaatgcggatagttatgcgagcacagactcgagcgatgcgattgcctgcaatatgtttgcatactgcgggaacaatcctgttctaaaccttgatccaactggcgagtggagttggaagggctttttagcgggtatcgcaactgtagcagttggagttgccgctgtcgctttaacagtggttactgctggtgctgctacgcccttagccgcagcggccgttacaagtgttggaacattagcagcaagtgcgctaataacaaccggtacaactgtggcttacgccgctgcaacagattccacttcggttgtagagctcggctgtaatattggacatggccgatgcgggttgagcctagtaatggattttaatggtggagataacgacacatatgacctttattcaagaaaaggggggactacatcatcaggtgcagatattacatattcagttggtattgtgaaaggttatgataagccgggagactacgctggctcatttgtgagtgtcagtggttccgtcaagggatatggcgttgattattgccagtcgccccgtgagaaaccgggaaaaggtgcccgcgctgtaaccgcttcgtttagttttggaacaagcagttctgcctcattgagtttttcttatgacgagtatacgtggattgccagttggtaatggcgtcatttgaattaataactctatggaggatgaagatacatggttgagtatcatttcacgagagctgactatatgaaggacgccttttatgccgtgatggttggtcttgcttttgctgcattaattatattgtatacactgattaaaatgatcgtgcagatacataaatcccgttcaactggtaaactggatctgattccccttatcttccccgtggttatcactgtcatcgcagtggttggaaatatccttggtccaacctggccaaccttacaatatagcagatttctcccgttcgaatcagaggaggattccattgttctcagcgggcagatagaatcgctttcacctgtgccatatatgcgatttatcatagacggcaaaaactacggcggtgccagcaaatggcaatatgatggtgctggaccgagcatcatccgggtgaacggtgaaaatttctatattgtcacggcagcgggccttacggttggttcccggataacgattcgctatcttccaaaaagtcatatggtattagattgtgtgcaacttgaatagtatccgaaatgaaaatgacctgctaaagacgaaacttttacctttagcaggtccccaccccctcagaaaggaagtgacaccttgaaccagacaaaactcctgttcccgctgatctttatttctctggaggacgatagcgacatcatcatcccgccgcagccgaccagtcccggtgagatcatgtccggcggcgagggcgaaccggtcgaggcggacgttcctgctgaagatgaaaccgtctccccgcagggaacccatgtcaccggaacacaaacagttacccacgagtatcttacactgaacggaaaagttgccagagagacaattaaaacgaataactccttgacagccgtgctggatttcgtctatgatgaatcagggaaaccattcgcactcaaatactcgacaaacggaacgagcttccaaacatattattacgttctgaatttgcagggcgacgtggtgaagctgatccattatatccccggctttgagtatgagtctgtcgcaacctacgaatatgatgcatggggaaatatcgtgtccagctccggtagactggccgagatcaacccgctcagatatcgtggatactattatgataatgagacgggattctattatttgcagtctcgttattatgatcctgcgaaccggagattcattaatgcagattcgctctcgagcacgggacaggggttccttggtacgaacatgttcgcgtattgcaataactgtcctaccatttatcatgaccccagtggccatgctattagccccttgactaacaatcgcacagcaatccgtgaaggagattatggaaaatcaaacaagcgacccggtccgcgctcaaatgcagcaagagatgaacttatttcgtattttgagtctcttactccggcatacaatattgaggactactatggcgtcccgtctaatattaatataactgttgagtatgacggaatttacgaaaagcgaagtcgtgtcgcaggggatctagcagtgatggtggtaggcgtagcagcttctatattatcacacatatggggaccggcagctattataggagagattgctacatatgttggcgctgtgtcaaccgttacaggtttggccgactccttaccagaaggtgattacgatgcgtatgttgttacaattacatgggatattccttatgtagagcttccatcttccaataatactccaagactgatcggatattctgcacaatattatatggtttattgcgattcgtatcgtgaaccgttttggtgtatgcttgactacagcctaaccgaaatttacggctgaggggaggagaaaagcatggaacatcgtcacattcctgcctcgaaggatggcagcattcccagtgcaaaaacacgcttttggcgcggagaggacaatttcctggaagatgtatggtatggccgctgcgcgatctgtggtgagctgatttgcccgccgaaatattggcagctattgcgacgcgcagttgcaggcccagcgaatgtgccatacctgatagcggcatacttgctgatgatcaatgcgacatctgaaacagctggacgggtatacctgcttatcgttatgggtttcgccattcttgttgttattttcaagttcatattgaatgcatatttagctttcgggaaatggcaaacttttccggaagggccggaggccaagcagctacagcagcgaaacgacaggaaaagcgaaagatcgtggtggattcgtgcacttataggctgggtaattgcggccgcagtgattctgctatatctgagcctcgtcgtgcggcggcacccataatccaaattcagtaattattgtttcacaagatcagtgcgcacatttacggacatcgccctgctaaagatgaaacttccgcctttagcagggccacccaaaccgaagacgagaggagaaacgacacatggatgcaccttttcaggccacccatcagacaaagcgcatgctgtacgagatgatgctctgcgcggagcatcgcggggcatatgtcgggtacgtccgcggggaattctcgcggacgctgacgggctttttccaggaggtttcgagtgcattccggttcccgtacaccttctcctggagctgggagtcgctggacgcatgcttccgcgacctggaatggctatccttttcgcagctgctgtgggtcataagccagccggaaaagctgttcacgcaggaggaggaccacatggcccatgtgaatgccctgcagcgctctatcgcggccgccgcgtccttctggcgggaaaggcagatcccgtttgactgcgtactgaatctgtttgaatgatgatacagaaagagaggagatcactattatgaaaaagagcctttggacccggctgctttctctcctgctggcggtggtgctctgcgtcgagctgctgcctgcggtggggtctgcggtttctccttccgaagatttggagcataccgtcgaggggacggtcgaggagcccgctgaagtcgcgttcgaagaggcctcgctgcgcagtgagcgcgtcaagcacttccgtatgggggacggaagctatgtcgcggtgcagtatgacgtgccggtccatcatcaggacgcggacggccagtggcaggacatcgacaacacgctcgaaccggtcgggcagacctacgcggtggaggacggaagcgtcgccttcgcggccagtctgaacggagacgccgtcttcacggcgggcgcggacgagcaccgggtgcagctcttcctggacggtgatccggacgtcctgcccagtcacgatgcaacactggcagctccggagccgacggaggccgtcgctcttcctgaggtgacagaagaaacagcggaagaaccggcagaagagaccgaaacggcggcgtcggaagaggaacctgctgctgaaatgatggttgaaaccggggctgcagccgagctggagcctgccggtccggcgcgctcctaccacgcggcagaggccgttgtgcaggagcctttttctctgcgctcagatgacccgtttgtcccggaaaagctcagctcctcgctgctttacccggacgtttacgacggcgttgaccttgcatacacgctctacggcgaaacgatcaaagagacgatcctggtcaacaaagcgcaggccagctatctcttttctttcgtgctgcaaacgggcgatctgaccgcagaaatgcaggaagacggctctgtcctcctgctcgatgaggccggatcgcccgtttacgcgattcccgcgccctacatgctcgacgccggggggacgtactccgacgccgtgcgctacaccctcgaggagctggaccgcggcagctaccgcctgctcgtcgatgcggacgccgcgtggatcgaggaagaggcgcagttcccggtcgccatcgacccgacgatcgtcaagatttcgcagtccggctccctctcgtgggcctatgtcttctccggtaggccggacaccaacttccccgaaagcacggtgcgggtcggctatacccagcataacggcagcggcgaatatcaggccatcgcggcggtcgacaagctgcctgaactgccctccggcagcatggtcacggcggctgccatccatgcattacagtccggcttcagcaacgtttcttccgacgatttccagtacctgtacgcccaccagctgacaattgacaagacgggaaatcagaagtacagcgactggatcaagaccctgacgtggaataaaatttatgcaaacggaacgaatcattataaaaccgcgacggaggatttcatccgcctgaccagtgcgaacggctaccgctcgatggatatcacccgcgcggcccgcagctggtacagcggcgggaaatgccatgcgatcctgctgcgctcggactgcagcgcgagcaagcgcatcgtctcctcgttccagacgggtgcgtcgtatctcacggtgacctaccgcaacgacttcggcctggagagctactacacctaccagacccagagtgcgggccgcgccggcaccggctatatctccgaccacatgcagcgcctgaccttcgtcgtgccgctgctctcgtcggatagcagcgtgatgcccttcgggctgtcgctcgtgtacaactccggcctcagccgggagtccttcggtgtgcagcagaagaaaaaccccaacgagccgcccgactatacgcgcgactaccgcaatatgctgctcggctccggctggaagctctccgcgcagcaatgcgtccagtccgtccgcatcggctcggacgacgcgcagaccctctactgggtctacacggacgccgacggcacgcagcactatttctccaaggagggaggcggcggagccgaaacggacggcgtcttccgggacgaggacggcctcggcctgaagatgacgtgccaggcgaacccggacagcgacaccggccacacgaacttcaccataacggacgacaacggcaatgagaccttcttccgcgacggcatcctgacctatacaaaggacgcctacggcaacggcatttattattgttataacggcatcaacttcgacaccccggacggcaaaagctggcgcccgacaaacgaggtctttaaccgcctgacccgcatctaccgccagaacaagggcgcttcgaacgaatgcctcgccaagctgatctacgacgcggatggcaggctcctccgcgtcggcgacgaggccgggaaggagacaaagttccattacgacaacaccgcggacgtccgccagctcgattacatcctctgcccggacggcacaaagctgaactacacctacgatacgaccggcctgaacggcgcgcacgacggcgaggccaactacggcatctggtatacctaccacacggacggcaccattgacgagttctatgaattcaccctcaacggcagcacgcatgtgcccggcgacacggtcaagtgctggaacggcaaaaaccgctcgagctaccgcgcgttcggcgcggaccagctggcagaaacggatgacgacatccgccttgaggtcgtcttcgacaactggggccgcaccgtctccacctataccaccaatacggatatcacgcgcatcctcggcagctccgccgcttcctacacggacaccgcagagcgcagcaagcagaataaccgcctgacgagcgtcggctcgacgggcatgacggcggaaaacctcctgcgggacggcgggctggaatcggaggacggctggacgaacgcctcgaccggcagcggctccgcagcggcccgcacgacgatcacgaacgacgaaaaccgccgccacggcacgggtggcctgaatctctacctcccggacggcgcaggcagcggcgatgcagccgccatctcccgccccgtaacgctcaccgccggggagacctacaccctctcgggctacttctccgccagctcccacctgcgctggagcagcggcgcgcggctggaggccgtcgtgcagggcggaggcgcggagcagaccgtcctgctgacggatgcccgcccgtccgccgccatcgaaaacggctggcagcgcgtgaccgccacgttcacggccccggcggcgtcctgccgcctcgccttccgcatgagcggctgcacgggcacggcctacctcgacgatctccagctggagcaggcggaggccgcctccacctataacctcctgcagaacgcctcgttcgaattcggcgatacgggctggaacctgcagggcggctctgcggcggctgcggaaaccaaattcggcgcgaaggccatgaccatgcagggcagctacaatggcaacctccatgtcagccagcccgtcgcgctgaactgctcctcggacacgacgttcctgctctccggctgggcgcaggcggactacgccgccccgaacgccgctttggagtttggcagcggcacgcgctacttcggcctgatcgcggagatcttctatgtgggcgtggacgaccccgagcggcagagcgtcccgttcagctgggccaccgccgactggcagtgcgccgtggggaccatcgtgccgaaggagagcggcaaaacgatccggcggatcatcgtctactgcgcgttcgaccacaattccggcacggcccggttcgacaacctctccctgcggcaggagccggtgcagacctactcctataacgccgacggcaacgtcaccgccgccacgcagaccggcacgggcacggaaaaggccgggtataccggcacggacctgacctcttacacggccgcaaacggcgcaaagtacacctatacctacaatgccgcccacgacgtcacctcggcttcggtcgccgggatcaagagcgccacgacctataacgaggcgggaaacgtcaccggctccaagctgacctcgacggacaaaaacgagcagaagtacctcgagagcagcgccgtcgcgacgccggaccgcaaccacatgcagagcgtgacggacgtcaacggcaatacgacgtcttacggctacaactcgctggcagagcagcttattttgacgacggacgccctcggccgcgagacgaactatacctacgacgccaacagccgccggacggccatggtctaccgccccggcgtcgccgccatcgactacggctacgaaaacggccgccttgccaccctcgaccgcaagaccttccggagcggagccgagcagcatcagatctactccttcggctataaccagtggggccaggcgacgagcacgagcgtcggggaccgcgtcctctcgacgaacgactacgctccgcgcggcggcaacctgacgcagacgacctacgccaacggcgtggccgtgacctacagctacgacctcctcgaccggctggttgaaaagtcgtatcacgagaccggaaagccggacttcaccatccgctacacctacaacgccgaaagccagctggcccgcctgcggtacgaggaggacggcgagacggtcggctcctacgctttcgagtatgacagcctcgggcggctcatccgcagcacggccatggatgaaaacggctctgtcacgcagcgaacggagcatctttacgatgcgttcaaccgcctctccggccagagctggacgctcggcgcgcagacctactcggagcgctacgcctacagcgacggggaaaaaggcgacggcagcctgacgtccatgacggccgcgacgggcgacagcctgagcttcggctacgacgccctcaagcggctgaatcgcgttacggtgaaaaacggaagctccgtgatcctgaacacggcttacgcgtatcgtgacgtgagctggaaccgcggcagcgcgcaggtcgagttccgcaacgtccgcctcggcagcgacagcggcatgctcctcgagggcaaaaagtacgtttacgacgacgtcggaaacctgaaggaaatccgggagagcaccggcgacttcagcaagctcgtcgagtacgcctatgatagccagaaccagctgacgtcggaggcatattacaagtctggagaggcaaaagcctatctcacttattattacacctacgacacagccggaaacctgctgaccgtctcccagaaagagggagataccacgacgctgctccagacctatacctacggcgacgcgcagtggcatgacctcctgacggctgtcaacgggcaggccattacctacgacgcctccggcaacccgctgtcctacggcggttggagcttcggctggcagaacggaagacagctgaaaacggcctcgaaaacctctgacgggaagacggaaacgttagagtatgcctacgacgcagacggcatccgcacgagcaagacctataccgtcgagacgttcacgcagcttccggactataccgtgacctttacggccgatggaacgaccgtcaagaccatgaccgtcgaggacggctacacgctgaaggacagcgactaccccgccgtccccaccaaaaccggctataccggcgagtgggtgaagtatacgtcggcaattcacagcaatgtcacggtgcaggcaaagtatacggccgtcgtgacgaaatataccgttaccttcaaggccgacaatacggtcgtcaagaccatgacggtcaaagacggttacaccttaaaggccagtgactacccaaccgtgcccgcaaaaagcggctacaccggtgaatgggtgaagtacaccgcggcaattcatagtgacataacgatcaatgcggtctatgagccttcgaccgttataaagcagtacacggttgtgttccgcgcggatgccaaggtgctcaaaaccatgaaggttgaagttgggtacactctgcaggacagcgactacccggaaattccggcaaaggaggggtataccgggcactgggataaatcaacgacaaggatcataaagaatacgatcataaatgttatctattccgacaattcgtcccatgtcgttaccttcattttcgatggtgcacaaatcggcacgctgaccgttacggatgggtacgttttgaaaaacagcgactatccttcaccgtttgcgcccgttggatatatcgtgacttgggagaagtacacgttgccaatccacagtgatattactgtgacaggaaaattacagagtgatgtgactatcccgccgcagccgaccagtcccggtgagatcatgtccggcggcgagggcgaaccggtcgaggcggatgttcctgctaaagatgaaaccgtctccccgcaggggacccatgttaccggcaaacagaccgttacccatgaatatttgaccctgaacggcaaagtggcccgcgaaacgatccggaccaataataccttgacagcggtccttgatttcatctatgatgaatccggaaagccgtttgcgctcaagtattcgacgaatggaacgagcttccaaacatattattacgttctgaatttgcagggcgacgtggtaaagctgatccactacatccccggctttgagtatgagtctgttgcgacttacgagtatgatgcatggggaaatatcgtgtccagctccggtagactggctgaaatcaatcccctcagatatcgcggatattattatgataatgagacgggattctattatttgcagtctcgttattatgatcccgcaaaccggagatttatcaatgcggatacctattccagcacagaccccggtgatgcaatcggctgcaacatgtttgcctattgcgggaataatcctgtcatgcgcaacgattattccggagacgcatggtggcattgggtcgtggccacggtggccgttgttggcttggcggttgcctctgttgttacctgcggcggtgctgcagctgctgcaatgaccgcgacggcactcataagcggaacctgcacgacagtcccggcagcggcgaccattataacgggcgctgccttgggggcaggagttgcctatgccggaagcgttgtttctgctgcctcaagcgtgaaatctacggaggaatttgctgaatacggtaagagcgcactgatcagcacggtggccggtgcggtagtaggggccgtcgcaggagcgataaatgccgccacatcctgctttgtcgccggaacgcccgtgctgacagaggatggcgataagcccatagaggacgttaccgttggagattatgtctgggcttgggacgaggcgaccggcacgacagagttaaagcaggttgttgagacttatgtaaacgagacgagtgaactgatgcacatcttcgtgaacggcgaggagatcgttgcaacaccgacgcacccgttctattgcccggttaagggctggacggatgctgcacacctccgcgcgggtgatatcctcgtcctcgtcaatggcgagtatgtcgtagtcgaaaaaatccagcatgagttgctggagaacccggtcaaggtctataatttccaagtccaagattaccatacttactatgtagccgaatccggcattctagtacataatcgttgtctacctgagaattctgtggcaatgagcacagatgatgctctggatacagccagcgactaccttggccctaactatacagaagtcgagaacggccgttatgtatcctttgacggagatttgcaggtgcgcattggaaatgcggatatcttggggcaacatgcagggggaccgcatataaatcttgactggattggcgcaggaaaataccggacctttcatatttttctattagattaggggaggcgatatatatgcaattggaagaaattcagatccctgtctattttggcggatttatcgatgtattttgggacagcgatgggatcatccgcgtggacacggagcgggatcgcctgtccatttgcgcaaacggtccggcattggcggctttggcaaagcagctgctgtatttttcgtgcaacaattcccttcgtcatgctcatgtgcattatgattctttcttttgcaagaacggctatgtcggagagcccctgattttggagttcagtccgagggaggagacccatggctttgatctgtatgacgatgataccgtaacgctccgtctggatattccatctgattgcgagccagatgtgcccggcctgctgcaggtatttccggaggagtgccgcatcgttggagacgaaaaggccatgctctatctcgcaaaggcaatgctgatgctccggggcagagaacagggatgcagcttgtcgtttcgttccggcaatgcgccgcgtgccgcgctctgcctgacccggatataaccccccgtcagcacggaaaggaaaacacgatgaaactgatctggaccagagaactcgatgcacaaaacccatgggagccggaattccacggcatattctcttatcaggaatccgggatttccttttattacaaagatgaacatttggttcggtgcgtacacggacaaatggatgagcccgaaatactattcgaagggaggcagggagtatcgcctcctctgccgcatgattggatgattataaaacaggatgacgcgctttttctgctgtgcggagaacagattgcaatcgaattgaaaacaggccgttcaaaaattccggctcctgacaatctgcagtcggaataccagcggcgtaagccctcgcccgaacattttgtggaggactctttcgttttgaatgaatatcaggtccgtcacaaaggagaatgggggtacatctgccagaaggacggacaggatatctggacgttcggcgggcgcgggtatctgtacaccgacatgcagcgcgagggcgacaacctgtatttcgggacagccggagctggcggctatttttacattctgaatatccataccggcgtccctatcctcagcctgcggaccggcggtacgaccgtgattcagcggcgcggctctcatgcctatctctacacaggcgtgggacaaagaaaatcccaactgatctgcgtcgacctgatcagcggcagcattctggacgaaatcgagcttcccggcatcgcgtcggacagaagcgcgcttggcatgagggaaaatcatgtttacacgataacgttcacatataagaaacgttatggcgccgtaaaagatgcgctttacagctgtattgcgctggattagtcctgcttgttatgtagttctctgaaacgacggattacagtgagtaaagtttcagtgccaatcaaactgcaaaacgggacggttcctgctaaagatgatactttcatttttagcaggttcccgctccgacaccagtacaccgtaacagcacagcaaaatccgtgacaagcttgacagagtgacgcggatggtgtattctggcggcaggtatgtgaattaccgttacaatgcagagggttcccttgctgagctggactacggcgagggaaacgcggccccgacggcgacgtaccgcttcgagtacgactcccttggccgcctgatccgcagccagcagcgcgacgggaatactgtcacgcagcggacggagcagctttacgacacggcgaaccgcctgtccgcgcagggctggacgatcggcgggacgagctaccgcgagtcgtatgcctacgacgcgtcagacggcagcctgaccacgctgaacacggccgtcggcacgaagatcggctacaactacgacgcgctcaagcgtctgcgcagccgcgcaatttatcagggcagcacgccgctgttcgaaaaccgctacgcttatgccacgcaaagcggcaatcagagcacggcgctcgtcgaattcttcaactatcgccttgcctcggacgacggaaacggcgacatcatcgtcggctaccagtacgagtacgacaacggcggcaacatcacggacatcaaggccgaggtcgatggcgcgctgatcccgctggagcattacgagtacgacgagaagcagggccagctcaagactgccatccgctatgaaaatggcgaagaagccgacagatggacctattcctatgacacggcaggcaatattctgtcagaggaccatgagggcagcgcgagcgagctgcacgagtacgcctacgaagacgaacggtggggcgacctgctgacgtccgtcgacggcatcgacctcgagtacgacaacagcggaaacccgacgctttacgcgaacgggacggagctgctctggagcatggagtggcagaacggccgccagctcagccgcgcggccaccgagcgcgacagcacgaccgaggacgtcctcgatttcgcctacgacgcaaacggcatccgcacgagaaagaccgttacgcggaatacttaccgccccgttcagacttataaagttacttttgtggccgatgggaagaccgtcaaaacgatgtccgtcacggagggctacaccctcaaggacagcgattacccggccgtcccgaccaaatcaggctatagcggagcatggaagccatataccgcagcgattcataacgatataacgatcaatgcagtatatacggcgctcaaaacgaagcatacagtcatattcttcgcggatggtaaagcgctgaaaaccatgcaggtagacaatgggtacacgttgaaagccagtgactacccctccattccggaaaaagatgggtataccggcaggtgggatacccgcgtaacgcggatcacgaaggatacggccatctacgccatttattccaacaattccacgcatacggtaacatttatctttgccgaggtggagcgcaacaccctgactgttgcagatggatacattttaaaggacagtgattacccggttccgctgataccgagtaaggatccgtcagccgtcgcagtttgggaaaaatacacctcgccgatccacgaggatattaccgtgcgcggaaattggcaaggcagtgcagtccttccgacagaacccagttatccggatgagatcatgtccggcggaaagggcgagcctgttgaggcggacgagccggaggagaatggtgcggaaccctacagtgcgggagcgatggacgaagcggacaccataacgcatgactatctgacccaaagcggcagggtcgcaagggaaacgatccggcagagtgtcggcggaacggttctgaaaacggaaactttggatttcttctatgacgaatccggctaaaatgggagttgggacagattatgaatggacagcaaactacacaacatcgcgtggttgccattgcagtggcggccgcagtcctcggatttttgatttttggctcatcctgtagcctcattatgtcttccaattggaatccacgtggcgattgggaacttccgctgtgcaatggttattatattttccggacgagcagtcgtgatatttgcgtcgtacatgaacgagataattataaggattcttttgaggatattattgacagctatataacatgtttccggtataatagtagatacattgcggtcagacggcttgttgtagccgatcgcgcacttttggatgatatccaatccgtcgatacagaagctgctgattactatttgatcgatgcagagaccgacacgatttacgggccatttgcagagaaggaagattttgaacgcgcttgcaaggagcagaatgtaggcgatctgggcgaatggatcccaactgtcccggcccccgaaggcgcggagttttagaaacagacagatatggacctgctaaagatgaaaccttcgcctttagcaggttccgcataacctacagaaaggaagtgaccctttgcgccgagcaaagttcattttcacgctgatcattctttccatggaggatggctttgacgtggtcgactccgaaccgactaatgtgtttaataaccacccggtatataggtttagtgatccatataagtttctccgtaacaatcacggtgttgttgctgtcagtatttttatctatcaaggaggttaaccatgagcgcatcaggaaaacgtcttttggccgcctgcatttttgcgctgtgctcgatcccggtcctgatcgtgtatacctgggtgttcacgccggatctgatcccacatgaaggcatctggtactgtgaagagctggatgcaacatgggacctcaatacgtcctccggaacgattcaggtgaacggaaaacagcaagcatttgtttcgctgcaccagttctattgcaatctgttttattttgagactgaagatagaaaaaacgtgttctatggtgaagttgtacgtgcttcacgcagcaaaattgtcgtacaggatacggatagtggagaaaaatacattttcctccgacaggatacgaaaggagaacagccatgaatccgagataccgcagccgggtcggggcaccgcagcagctggcggcggacgcggcagcatcggccatttattgtgcaatgccgtttctggtagtacattatctgggagactggcggctcacgcccccgtggctggtccttccggcagggatgctggccgttaccctgtattgcctgatccgggagttgtccacggtgatgattgcggacgggaacatttgcctgcgttgtcttggcttcaaggtcacggagttcccgctggaagagctgcgctccgcaaaactcatattcaaaaacggccagtgcagtcgggtctatctctctgtgcacgaggaaaccgatctccggcgggcgctcagaaccgccaatcgccgtggagggaaaagcattcagttcgcagcaacaacgaagcggttggagcagctgacgaaactggtcttgctgcagccgtgtgattatccgggaaaaaggagagcggaataaacgcctgccgatgcaagtcaatgcaatcgttcatctattgcaggttcatcctgagaaagcgataaggagcaacaacatatgggcgggcatttgtgcaatgattggcgcattacaaatcaaatgaattatttatttcgggcaagactgataaaaacaacattttctgaatcctctcacagcgaccatgagcactgcgaattctgcttcgccaagttcggaaacgccgagggattattacagtctggttattgcacactggataaataccattggatttgcgacaagtgttatcgcgacttccaaacacaatttgaatggactgtccttgatgaaagccacgattctccgagtgagttacgctaaagatgaaacttccgcctttagcaggtccgccccatcctgcagaaaggaagtgccctttgaaccagacaagactctttttcccgctgatctttatttctctggaggacgatagcgacatcatcatcccgccgcagccgaccagccccggcgcgatcatgtccggcggcgagggtgagccggttgagaatgcgccaatcgaagccgacgctcctgctaaagatgaaactattgccccgcagggaactcacgtcaccggaacgcagactgtcacccatgagtatctgaccctgaacggcaaagtcgcaagagagacaattaaaacgaataactccctgacagcagtccttgatttcatctatgatgaatccggaaagccgtttgcactgaagtattcgacggatggaacgagtttccagacatactattatgttctgaacctgcagggcgacgtggtaaagctgattcaggcaaatggacatgttgttgcgcattatacttatgatgcgtggggatatatcttgagtagcggcggcaaccttgcagcggtcaatcctctcagatatcgtgggtactattatgataatgagaccggattctattacttgcaatctcgttattatgatcccgcaaaccggagatttattagtgcagatgtttatgcttcaacgggacagggattcgtcggaaccaacatgtttgcatattgtaataataagcctattatcaatagtgatcctagcggccatgccttgcgttctaatctaacggcgatctgtgatggtggtagcggatatcttgacagaacaaaagatgtaaaacgtgtgctgcgggagaattacgaacaggcaaagcggtggggatgggaacttgatggcccatttgaattctataatgcggtaaaggatgggggcaaatgggactacaagctccatccagacggaagtgagtggataccgcggaacggtgttttttccgtaaacggcaaaaaaatgacggcagagcaacttggaaacattaattacggatttacgggttccgtattgggtttcccggctccagttctccgtatggctggcggatttgtggcaattaagaacagcggaattaactgggaagattggtggtatgattttgattctaaagaggatgctgaaatgattcaattgggtattgatatggagtacctcatgacaatcactggttattctactgatgaggtggtggatttcttttggaaatgacgaataactatgtaggaaaaactgtaaaactgtccatattatgcgtaattatggcagcaacgatagcatttagcatctggcattcctgtggctattgcgcttcggctgatgacgtcgcacaaatattccggcaaaatgagcagctgtttgaacgttgtcaaagtgcgttggagcgggaacctgccataagccacattgtgtttcgagagggagagtgtatttcaaatgtatcctattactgtatagatggcatttattatgcaggggcaattcctggtaaagagttggcaaatatcgtttcagaattggaaaatgcaattccccttcgccgcattcagattcgggatggcgggaagattgtcgattttatcctgcaagtatcgaatcttttgaatgctgctggcatttggtatttggaagacggcgaattggacacgacgtatatgacgtatataaagacgtatataaaagagagtgtcgagtgcgttcccaactggttctgctacataacttaggggtaatttaacctgagcggttggaacctgctaaagatgaggcttccgtctttagcaggtctgcaccggccattgtaggggagcggcatgccactcccggcacagtggctgcgattcgcacaggtcgccgttaaaatggtaggaaccaaaagtcaccctgcagcggcctccctgcgcaatgctgccgggcgagagatcgtagcggcgctcagcgagcgccatgcaggcttgcagcacttgtagtattgattctatgggacgaggttcccaaacttgccattgcgaggagcgaagcgacgtggcaatctcctgcaacagcttgcgaatccgccgaggtttccccatgattcgaccgtgtactgcgagattgccacagccccgttggacctcacaacgacaattcggaaatgaaagagaaggtgccaaaaatggggaaccggtacccattttgcagcaaaaagcttcttgctgagctttattgaggtgaatcgatatgcgtgaacaaaaaactgacgtggtataccagtgcactgtcgtttcatcttgggccacctttgttacgagttccattatcttggtgatcgcggtggtggtgcttttctccgtcgagcgtgatctttggctgccagctctgttcccggagttcttctttctgttgatccttatcggcaattatttctcagggtatggcattcttacaattacgtctgatcgggtcattctgtctcgtttccatcgtgtcataacagaatttcggttggatgaaatcacggcagccgggtactttgtccgtttaaagaacagagacgagcaactttttattgctgctgagcagcccccgaaggtcatgaccaaagagaatcgggatgcggtcaacgcgcagcgatattatgaaatccggaaaatggggaacaagaaaaacgccagatacatccgaattgaagcaacacggaaacgcatgaaaattttcaaacagctgattcccaccttcaacgcaaactatgttgtaaagtatccggagagcaaaccgtctggaaacaagccgcaccaatatcaggaatggtggaaggaataatgcttggcctgctaaagatgaaactttcatctttagcaggtcttcctctctggcagccccgtcctttccacgaacgattgcgccctgcaataaaaggaaaatagacaccgaatgcatctttgaccgttgcattcggtgtctatattttcacaacaatacgggaaattgcgcaacagattcttgaatgtgtattcgattttcaaggttcacgagggcattcgttttgtccctcaataggtagccagcgagaaggcccattttttaaccccctgagcgaaaaaattcaaaaaattttttggagcacaaaaaaagccgctgatttcgtagtgaaaccagcggcttgatttgcggtgtgttcagctgaaaatggtcaaaaaaacttcatgcctgagcaccgcgccacggaaatgcgcaaatgccggcacatgaagtttttgtgcatcatttccggttgccccacaggggcgaggaaatggcacatttcttatttttgccatgcttttgcatggcaaaaataacggtcacacaatcctgacggactgtgtgaccgtatttatatcagttgttttgcctacgctgtttgcgtcaactttttattggcgctgttcgcggatggcagcctgcgcagcagcgaggcgggcgatggggacacggaacgggctgcaggagacgtagttcaggccgacgttgtggcagaactcgacggaggcgggatcgccgccgtgctcgccgcagataccgagcttgatgtgcgggcgggtggcgcggcccatttcggcggccatcttcacgagcttgccgacgcccttctggtcgaggtgggcgaacggatcggactcgtagatcttgtggtcgtagtaggagtcgaggaacttgcctgcgtcgtcgcggctgaagccgaacgtcatctgggtcaggtcgttcgtgccgaaggagaagaactcggcctcggtggcgatctcgtccgcagtcagagcggcgcgcgggatctcgatcatggtgccgacggtgtacttcatctcgacaccggcctcttcgatcaggcggtcggccgtggcggtgacgacgtccttgacgaacttcagctccttgacctcgccgaccagcgggatcatgatctccggctcgatgcggtaccaggagaactccttgttgaccttgatagcggcattgatgacggcagtggtctgcatctcggcgatctccggataggtgacagccagacggcagccgcggtggcccatcatcgggttgaactcatgcagagaggcgatgacatccttgagctcggcgacgctgacgtgcagctcctcggcgatctcggcgatgtcctcttccttcgtcggcaggaactcgtgcagagggggatccaggaagcggatggtcatcggacggcccttgagctcgcgatacatcgcttcgaagtcgccctgctgatacggcaggatcttggccagagcttccttgcgggcctcgaccgtcttggcgacgatcatctcgcgcatggccttgatacgggtggactcgaagaacatgtgctccgtgcggcacaggccgatgccttctgcgccgaacttcacggcctgcgcagtgtcgcgggggttatcggcgttcgtgcggacgcgcagaacgcggaagctgtcggcccacttcatgaagcggtcaaagttgccgctgatggtggcctcgacggtcttgacggcgcagccatagatgttgccggtggagccgtcgatggagatccagtcgccctcgtggtaatccttgccggcgagggtgaagtacttctcttcctcgtgcatggtgatctcaccgcagccggagacgcagcaggtgcccatgccgcgcgcgacgacggcagcgtgggacgtcatgccgccgcggacggtcaggatgccctgtgcggcagccatgccctcgatgtcctcggggctggtctcaagacggacgagaacgaccttttcgccgttggcggcccaggactttgcgtcctcggcggagaagacgacacggccgcaggcagcgcccggagaggcggccaggcccttgccgacgacctcggcggccttcagcgcggcggcgtcgaactgcgggtgcagcagggagtcgagctgcttcggctccacgcgcatgacggcctcttcgcgggagatcatgccctcgtcgacgaggtcgcaggcgatcttcagcgcggcggcagcggtgcgcttgccgttacgggtctgcagcatatagagcttgccgttctcgatggtgaactccatatcctgcatgtcacggtagtggttctcgaggcgggtggcgatgtcgacgaactggtcgtagacagcgggcatctcctcatgcagcttggagatcttgctcggcgtgcggataccggcgacgacatcctcgccctgggcgttgatgaggtattcgccgaacagcgccttctcaccggtggccggatcgcgcgtgaaggcgacgccggtgccggacttgtcgttcagattgccgaagaccatcggctgcacgttgacggcggtgccccaggagtaggggatgtcgttcatgcggcgatagacgttggcgcgggggttatcccaggagcggaagacggccttgatggcctccatgagctggacggccggatcggtcgggaagtcctcgcccttttcttccttatagtgagccttgaacaggtcaacgagcttcttcatgtcgtcggcatcgaggtcgatgtcgttcttgacacccttggcggccttgacttcgtcgatgatgacctcgaacgtcttcttggacagctccatgacgacgtcggagaacatctggataaagcggcgataggaatcgtaaacaaagcgggtaaacgcaggcgtggggttaccggcgatgagaccggcggcgacctcgtcgttcaggccgaggttcaggatggtgtccatcatgccgggcatggaggcgcgggcgccggaacggacggagacgagcagcgggttcttggcgtcgccgaacttcttgccgttgatcttctcgatgcgggcgagagcctcgtagacctgcgccttgatctcgtcgttgatgttgcgatcgtcctcataatacttcgtgcaggcttccgtggagatggtgaagccctgcgggacaggcatgccgagattcgtcatctctgccaggtttgcgcccttgccgccgagcagctcacgcatggagccgttaccctcggagaacaggtaaacatatttgtgcatactgttgataaacccctttcgtgtcttggaaacggtcactcgcagccgtttcgaatcgtttttctagttctattcattcggatacttgaacaatataacacaatccgcagggtttttcaatgaatttcaaaagaaaaaaccgaaaaaggccaatgaaaatattttcagacagaaaaatggcgcaaaaccgtcattttgccagaaaaaacccgccgcgctcctcccaaaacgcagcgggtttggaattggtttttcaggaacgggacatggggcaagctgaaaatggagagtggaaagctacgcgaggccgccgaccatgtgttgtagttgcgggggagcggacagccgtgcccggcactgcaccggcgaaacgaatggaccatcgttgaaatggcaaatgcccccgaattgtcattgcgaggagcgaagcgacgtggcaatctcgggaaggcactcgcagatcgtacaggctgccgtgaaaacgtacagaccgattgcgtctgtagcggcgctcactgagcgccttgtacagggatattcaaccgcacaagggcactggtgcactgcgcgccaccctgacgtgtcattgcgaggagcgaagcgacgtggcaatctcgggaaggcactcgcagtccgtacaggctgccgtgaaaacgtacagaccgattgcgtctgtagcggcgctcactgagcgccttgtacagggatattcaaccgcacaagggcactggtgcactgcgcgccaccctgacgtgtcattgcgaggagcgaagcgacgtggcaatctcgcagtacccggctgaatcggaggaaagctatcggcgaaatcgcaactgcctccccgagattgccacgtcggcctgcggcctcctcgcaatgacaaacttttggtcttcacgttttaccggcagtcactacgggacgacagtgcggcatggggcgtcgaggacgccgctcccctgcaatgcgccggttctcatcccgcccgcttgggcaggcgaatggtcaggacgatctcacgatccgtctcctcctgcttcgtttctgcctggatgcctgcgctgcggacgagctcgaggctgtggttcacgctgttcaggaacagccgcacgtcccgcacgatgagcttgcggatgccgcgcttcggcggctcctgcgcgttctttttcgcgagataggcgtcgatgtacgcctccgtctttgccacgttgagctgctggcggatgacggtctgcagcacggccagccggtcctcctcctccggcagccgcagcagcgcccgcgcgtgccgctccgagagctggttctcccgcaacagggcaagcacctgcgggctgtggcgcagtaagcgcagcttgttcgccacggcgctctgacttttgcccacgcgctgggccgcctgctcctggctcaggccgtacaggcgcatgagccgcgccagtccctcggcctcctcgatgtagtcgaggtcgcgccgctggaggttctccaccagcgcgaccatgccgctctgcgcctcgtccaccgacagcaggatgcagggcacctcccgaagccccgccatccgcgcggcgcgcaggcggcgctcgcctgcgaccagctcatagaatccgtcccgccgccggacggtcagcggctgcacgatgccgtattccgcaatgctcgccgccagctcctgcagcccggccgggtcgaagatcttccgcggctggcccggattcggccggatctgtgcggccggaatatatagaattttccctgtttccagcagtccacctgttctgcgcatcctgctctcctcctttgccgtgcgcgttgttctgctatctattttacgcgtttgcgctgcgaaattgcgcgaatgaaagggactgaaacgcaataaattgtgtttttcgaaatgatggaccacaatatcttgggaaatacgcgggaaatgggaaaagcggcggaaccatgccgcatccgggccgttcacagcctgctttccggaagttcataattccttcatccttctttcaggaacatttcagcttggcgcgctacaatgtggccagaaagaaaaacaaaggcaccgcagcaaagccggaagcggccgcgcggcggggttcctgagaaatatgatcgaaggagtgcttatcatgtacgaaaacgacggattccatccctatgaagataacaacgatgcgcagaaccggtatgaagcgcagagcagtgagaccagcggcaatcagtggcagcagccgctctaccagatgccgcagcagccggagcatacgcagccgaagaagaagcataccgcagggcgcgtcgtcgcgctggcgctgtgctgctcgctcctcggcggcgcggtcggcgcaggcgccatggccatcggcacgagcatgaccggcacgtccggcggctcgcgcagcagcagcacctccaccatcctgcagggtgaccgtcccacctcggccatcaacgtctcaaagatcgacacgagcaaggaaatgacggctgctgaggtctacgccgccaacgtcaattccacggtcggcatcacgacctccatcaccacgaactactggggctatcagacgacggccgctgcctccggctccggcttcatcctgacggctgacggctatatcctgacgaactaccatgtcattgaaaattccaattccgtgaaggtcacgatgtatgacggcacgagctacgacgccaccatcgtcggctacgacgagagcaacgacatcgctgtcctgaagatcgacgcgaccggcctgacgcccgttgtgctcggcgattccgacaagctgaacgtcggcgatcccgtggtcgccatcggcaacccgctcggcgagctgacgttctccctgacgtccggcgccgtgagcgcgctgaaccgcgaggtcacgctctcgagcaacgtcacgatggacctcatccagacggactgcgccatcaactccggcaactccggcggtgcgctgtttaacctctatggcgaggtcatcggcatcacgaatgcgaagtattccagcagcggctcctccagcgaggcgtccatcgataacatcggctttgccatcccgatcaactcggtgcgcagcatcgttgagagcatcattaaaaacggctatatcgtcaagccgtacatcggcgtttccgttgaagatgtcagctctgaaatgacgagctacggccttcctgccggcgcggtcgtccgctccgtgacggatggcgctccggctgcacaggcaggcctgcaggccaacgatatcatcaccgccgtggacggcgccgagatcaccggcagcaacgatttggtccagattgtcaccgccaagaaggcgggcgacacgctgaagctctccgtctaccgtcagggccagacactggagctgaccgttaccgttgccgagcagaagcagtccgcgctggaaggctcaagcgatacgcagcagagccagcagcaggatcagagccagcagcaacagcagggcggcggctacggcttcccgtggggcttcggcttcggcggctgatcgctgcaaaatcaatttaccaatactctctcttttctttcttcctttcttaaaaaggcagccgcttccgggtctgggccggaggcggctgccgatttttttgcaggtttggatgggaaggcttgtaactgtagggtcggggcatgccccgaccggcgcaatgccgccgatacgaacaggctgccgttaaaaacagtactggcctccgatttgtcattgcgaggccccgaaggggccgtggcaatctcgggaaggcactgtcgccccgtaccagccgtcgttaaaacggaaaatgccgaagtatggggtgtagcggcggtcactgcgcagccgttggcggctttgccgccttacggatgcggcgtgccccttacgggtagtgaccgccctgtatgggggaattcaaccgcataagggcactggtgcgccgcgcgccaccctgacgtgtcattgcgaggagcgaagcgacgtggcaatctcgcaggaccggggtggataacagggcaacttcggcgaattcggaagttggtgcgtgagattgccacgggcgcgaagcgccctcgcaatgacaattcgggagtgcataccattttaacgatggcctgtacggatcggcagcattgtgccgggagcggcatgccgctcccctacaacgcgcgggcggcggccctataaaaaacaggcgcaggggagcatgtccctgcgccattacttttctgttttactgcttctgcagctcctgcatggccttccgcaggacgggcagggcttctgccggatcggtcacggccgcggcagcctgctccatcgggcagggggcggtcccggcacggttcagaattttcggcacgagcgtgccatactccgtgcggactccggcatcggacagaagacgatgggcctcctcgctcatgacctcgccatacacggccttcacgcccgcggcaagcagcagcagcgcggcggcacggccgatcaggcggtcggcggcagccatatcctgcagcgattcgttcgtatccagcagccggatgagcggcgcgagcccatgctcgcggctggtcagcacgcggtcgcggtcgcacagcacgcaggtgtagccatcccgatgcagcagggaaacggcgcgttcaaagtcattttttctgggattcatcgtgggtatctcctttgtccgaaatgagcctgcgccgcagcagcagctgcgcgcacagcccggtaaacagcccggtcacaagcccgcacaggagcaggaccggcagccagatcagcaggcccggcgtccgcgttacggcaagcgccacggccatctggcccagattgtgcagaagtcctccggccacgcctgcgacccagacctgctttgccgtcaggatgcggcgcagcagcgccatcccggcaaagctcagaaggccgccgcccagcgaatacagcagcgccatgacctgaccggaggccagattgccgagcaggatgcggataacgacgatggcaagcgcgtccttccagccgaaggaaaacagcgcgaagagcgtgatgatgttgctcaggccgagcttcatgcccggcacggggaagggaatggggatctgcgcttcgagcacgaagatcgccagcgcaatggcggtcagcagcgcgcagcgcgtcagccgtttcacccgcatggccgtccctcccttgccagacttctgccgaacctctctagtctacaggaaaacggcgaaaaagtaaagaattatttttacggcccgataaatgccgttcccctgcaacgctctatcgatcccctgctgatgcataccaaaagcgggcggcatgagccgcccgcttcggactgtcaaaaaacctgcccagccgaaggtttcggagggaagaaaagcctcgcagagtttgcgctcgcaagcgcaaagaaagtaaaaatcattttctccggcggcgtgtacgtcggagaaaataccgctcggctcgcaaacgtgcgaagggcgtgcccttcgtgcgatgccgcgagccgcagccctttcaaacgagagcccagtgaaacgggtctcgtttgagagcttgtcaaaaatctttttttgacaagctcaagcgggcggcagtgccgcccgcctggggatggtctggatcagacctttgccttgctgttttccacggggaagaggttctcttccgtcttcggatcgaacaggtgcataagctccggatcgaacgtgaagtgcgccgtgccgcctgcgcggacatcgtcgaggctgaggccggccgtcgggatgacggcgatgacatcgtggccggagacggtcatatgcaggtgcatctcgctgcccatcatctcggagacgtcgatcgttgcggggaagccctcctgatgcagggagaggtgcacggggcggacaccgacggtgacggtgccttccggctgcttgcgggcgcgcagggcggcctgcttgtcttccggcaggacgatggacttgccgagcagctcgacgacgtacttgccgtccttcacagtcagcttggcatccgggaagaagttcatctgcggcgtgccgatgaagcccgcgacgaacaggttcttcggatggttgaagacctcctgcggggtgccgatctgctggatgaagccgtcgcgcatgatgacgatgcggtcaccgagcgtcatggcctccgtctggtcgtgggtgacgtagacgaatgtggtgttgatgcgggagcggagcttgatgatctcagcgcgcatctggttacggagcttggcgtcgaggttggacagcggctcgtccatcagcaggacctgcggattgcggacgatggcgcggccgatggcgacgcgctggcgctggccgccggacagggccttcggcttgcggtcgaggtattccgtgatgccgagaatttcggcggcctcgcggaccttcttgtcgatctcctgcttcgggaccttcttcagcttcagggagaatgccatgttttcatacacggtcatgtgggggtacagagcatagttctggaagaccatggcgatgtcgcggtccttcggggccacgtcgttcaccagacggtcgccgatgtacaattcgccgtccgtgatctcttccagaccggcgatcatgcggagcgtcgtggacttgccgcagccggacgggccgacgagaacgatgaactcacggtccgcgatgtccaggctgaattcctgaacggcgacgacgccttcgtccgtgatctgaagattggccttcggctcgtcagaggtgtgctccttcttcttctttttcttcttcgtgtcggcgttggggtagatctttttgatgtttttcagcgtaacatttgccatgctaccggctctgatccgggagcctccgcttgcccggacctcacatcggcgcgcgaagcgcggatgcattacggcaggtctccacactgccgcaccgcaagcctgcggtgggtgattcctccttatccggcggtccgccgctaacggggtggagtagcggcgcctaccttaataccataaattgtagcatatcctgccgcgctccgcaatgcattgaaccgccaaaaagtggacccataatttgtgcaccatgacgaaaacgtttaacatcccgcaaaaagtgcggaaaagatgggaaatggaggaaacggcgctgatatggcgatggctcccggcctttccctgcgggaaggcctgcgccgcggctcctgcggagcctcgcaatgacaagtctgggaacctgccgcttccggagggacgcagggacaaacttgcgtgcgccgcccacccgtgtcattgcgaggaggccgaaggccgacgcggcaatctcgggaaggcagtaacgaattcgccggaggcctttctgcgtttcggctgcatcctgcgagattgccgcgccttgctccgcaaggctcgcaatgacaaacttgggtgcctttcccattcggaggggcgcagcgccgagcttgcgagtgccgcccacccgtgtcattgcgaggagggcgcaagcccgacgcggcaatctcaagtaggcaccttcgacttcgccggggctttcccgtgctccggccggtactgcgagattgccgcgccttgctccgcaaggctcgcaatgacaaacttgggggcctttcccattcggaggggcgcagcgccgagcttgcgagtgccgccctcccgtgtcattccgaggagcgaagcgacgtgggaatctcatgcaggcacctgcgatttcgccggagcccggctgtccccgcccttacggcagtatatcgcataacaaaaccgggacacaccctgcggcgtgtcccggtgctgtgcgcttactgcagcgcgtacttctttgtataggcgtggtagaggtcggtatagtccttgctgccgccctccttgacctcggagagatactcgtgcgtgtcgaagctgcccgcgctcgtctcgatgagagagacggcgatgttcgagcagtggtcagacacacgctcgtagttcgtcagcaggtcgttgagcacgaagccattctggatcgtgcacttgccgctctgcaggcgctcgacgtgcgtcgacttggcggcggagatcaggcagtcgatgacctgctccagcggctcgacgtggcgcgccatttcgaggttgtgctcgcggaaggcatcgatggtcagctccagaatctccgtcagtgcgtttgtcaggttctgcagctccgcagcggcatcctcggagaagacgatgtgcttgtcgtggatctcctcggccgtcttgcgcaggttgacggcgtggtcgcccagacgctcgaaatcgccgatggtgtgcagcatgttcgaaaccttccgcgagtccgcgatggacagcgagcggcttgagagcttgacgaggaaggtaccgagcttgtcctcgtagaggtccagctcgtcctcgtgcttcagaatttcgtctgccaccttctggtcgtagcgctggcagatgttgatggcggaaagaatggtcgtgcgggcaagggttgccattttgaccgtcatgtcactggcctcgccgacagcgatagacggcgtgccgagcaggcgctcgtcgaggaaggcgtaggtttcctccttcttggagggacggatgacaaaattggcgaagcgctcgagctgcttcgtgaacgggcacagcagcgccgtggtgaagacattgaaaatcgtgtgcacggccgaaatgccgacggcgttgattggcgtggccacaaaggcgaaatggaagatggcgtgcagcccgtagaacaggcacaggcacaccaccgtgccgatgaggttgaacgtgatgtgcacgacggcgaccttgcgggcgttcttgttgacaccgatggacgagatgagcgccgtgacgcaggtgccgatgttctggcccatgatgatcgggatggcaatgccataggagatctggcccgtggcggccagcgtctgcaggatgccgacggaggcggcggaggactggatcacacccgtgacgaccgcgccgacgagcacgccgagcagcgggttctcaaacgccgtcaggatgctcgtaaaggcggcggaattctccaggccggaaacggagcttcccatgagcgtcatgccgtacatcagaacggcgaagccgaccaagatcttgccgatgtcgcgcttgcggggctttttgcacatcatgatgagcacaacgccgatgaacgcgatgatcggggagaaattctccggcttgagcagctggatccagcccgtgccgttcacgccggacaacgacaggatccacggcgtgagcgtcgtgccgatgttcgagcccatgatgacgccgatcgtctgcccgagctgcatgatacccgagttgaccaggccgacgagcatgaccgtcatagcggacgaggattggatggcgatggtgatgaccgcaccgagcgccatgcccgcgaagcggttcttcgtcatcgtcttgagggagcgctccagcgagccgcctgccagctttcccagtccgccggacatcacgttcatgccatagaggaagaacgcaagcccgccgagcagagtgaagaccttcagaagcactgtcatagggaaactctctactttctatctgtattcggaaaggtacggccctaccgcaccaactacactatatcgcagaaaacggagcgcgtcaaggcccattttccggaattccggtcttgctgatctcatcagagcttcttcaaagcacgaagccgccgttcacgggcaggttctgacccgtgacgaacccggccccggcgaggtagaccatagcctgcgccacgtcctccggcgtgccgtttttgccgagcggggcctcctgtgccagctccgcgagcacctccggcgcgatgtttgcgaccatgtccgtcaggatgacgccgggcgagacgcagttgacgcggatgccggacggtcccagctcctgcgccagcgccttcgtcagggcgagcaccgcgcccttcgtggcggagtagcacgcctcgcacgacgcgccgacctgcccccacatggaagagacgttgatgatgcagccgctctgcctgcgcagcatggcgggcaggacggcgttcacgcagtggtagatgccgccgacgttcacggcgaacagccggtcccactgtgcctgtgtgatctgcgagagaagaccgtagtggcagatgcccgcgttgttcacgagcacgtccgtctccggcaggcacgaaacggcatcctgcacagcctgtgcatctgccacgtcgcagcggacggcctctgcgcctgtctcggccgagacagcggctgccgccgcgtcgtttttctcatagaagaagctcacggcgtagccagcggccgtaaaggcgcgcacggcagccgcgccgatgccccggcttccgccggtgatcagggcgtgacgcatgcactcgcctcctctccgtccgggatgcggaacagccgccgcgcgttggcggcggtcagcgcgcccgcctcctccggggtcaggccgcgcagggccgcgatcttcgccgcaacgagcggcacatagcggctgtcgttgcggcggccgcggtacggctccggggccatatacgggcagtccgtctcgatcaggatgcggtcaagcggcagggcctgcacggcctcgacggcgcggcgggcgtttttaaacgtcacaacgccggtaaagccgatgtaccacccgcgctcgacgagccacagcgccatttccggcgagccggagaagcagtggaacacgcccgtcgcccgcggatgggcgcgcaggatgtccatggcgtcgccgtgggcctcacgctcgtgcacgatgacggggaggtccagctcctcggccagcgaaagctgcttttcaaaggccacgcgctgctgcgcgcggggcacgtcctcataatgatagtccagcccgatctcgccgatggcgcgcacgcgcggcgaggcgcacagagcgcggtagcgggcaagcagggctccgtccacatgatcggcgtcgtccgggtggctgccgacggcggcatagaggaacggatactgctccgccagccgcacagaccgctccgaggacggcaggtcgcagccgacgttcatcaccatggtcacgccgtggtttttgagatcgtccaaaatggccgcgcggtcgccgtcaaagtgcgcgtcgtccagatgggcgtgcgaatcaaaatacatgggtcattcctcctcctcctgcgtcagcgggcggcaggtgaacagcaggatctgccgcggctcctcccgcagcacgcgcagggcggcgcgggtgcgcgcggggtcaaagttcacgagcgcgtcgtcgagcaccatcggcgcatccggcggcagcagacggcggcacatggccagccgcagcgcaagatacatctgatccgccgtgccgcagctcatggcggcggcgggccgcatgacctgcccgtccgcctcgcgcacggacagatgcatgtccggctccagcagcacgcggggatacttattttctgtcagctcggcgagaatatgccccgcctcggccgtgatctgcggtgaaaaacgtgcgcggagcgtctcatcggcgcggcgcagggcctcggacgccagctccacggcggcgtttgcctcctcggcgtcagcgatccggcggccgagctgctccagctccgcctcgatgcgcacggcgtctccctgcgcggagatctgcccgcgcttgtgggccagacgggcgcggagcgaggccagcgtctcgtcggcctgctcaaggcggcggctgatctcggcgggatcatagcgcagcgcctcctcgtccggcgcagcatcggtgggcgcgtcgccgacgatgtcggccattgccccgatctgccggtgcatagcctcaagctcgcggttcgcggcagcggcggtctcctgtgtctgccgggcgttccgcagcgcgctgcgagcctcggagagcccctgtgtgccgggcgcaaagcgggcgactgcgccgatgcggtcgttcagctcctcctgccggctcagaacggccccctgcagcagccgctgctgccgctctgcggcctgccgggcctgctgccactgcgtgcgggcctccacctgccgggcggcaagcccggagagcgcggcgggatcgtccgtcccgaacggccggagcaggtcctcggcctgttcggcggcccgctcggcctgcacggccttcctccgcagcaggaccagcgagaggacgaaggcggcaagcccagctccggcgacgccaaggccgatgggcagcgaaacaaagcacagtcccgcgcccgccagcactgcggcggcgcacggcagcaggatcgggagttttttcggcacgcggacggcgtggagcgcatcccactgcacctgcatgtcccgcgcgcgctgcgcggcctcatccgggccgcagccagcaaagccgggcaggtcctcaggcttttccggcagcttcacgccgatggcggcgtcgagctgggccgtctgcaggcgctcggcggcgtcctccagactgcgggccaggagctgcagcatctgctcatccggaagccccgcagtctgctccgccagcgcggcgcagcgggcggcaagtgccgtttcgcgctcctgcagctccgtcagaccggcgcggcggcgggcagcctgcgcccgctcgatacgggcgcgaaggtcctgcaggcggctgcgcgcggcctcggccccggcgcaggcggcgctcagatccatggcctctgcctgtgcggcgcgcagggcggaaagctgtgcctgcagctcgtcccgccgggcctgcagccggggcatcagaccggtgcggtaggtatacttgttcttcaggtcgcgcagcttcttctccagcgcggaggccgacgggccttcctcgccggtggtgacaagggcgctcagccgctgctcgagctgggcgtcgctcgaaacggccatgccgagctgccgcacgaaggccgttcgctcaaacacgctccgctccgcgccgcacagcatgcggccgcagttctcggccgtcagctccggcacgggtgtgccgctctccgtctcataggcgcggaacacgcccatgggcgtcctgccctgcgagcgccgctcgatcgtgacggcgcggccgttccagatcaggtcgatcgcgccctccatggagctgccgtcccacggacggtagcgctccttggcgggcagattctggttttcccgcgtggcgcgctcacgcgtgtcgatgccatagagcatcgccagcaggaaggcgctccacgtcgatttcccggcttcgttcggcaggcacagctcgttgagcccctcatgcagggtcagcgtgccgtgcagcttgccgaagtttgcccgtaattgcagcaggatcacagcggcacctcccgtccgtccatcagggcaaggccgagccgcgcagcgcgcgcgacgacctgcctcctttcgtctgtttctgcggcctcaaactgcgcgtgcagtccgtcgaggaagtgaccgcgcagtgtgtcctcgccgcaggcctcccaaaggtcctgcttcggccgcgtgcggtcacgcaggtccagactgaaaaactgcggctccagcgccgcctgcagggcggcaagatcgacgggggccgcctcacccgtcagctcgatgcggcagcagctgccctcgagctccggcgtcagggccgcgcggacggcggcaagcgcatcatctccggccgggacggaaaggcgctcatagcgccgcgccccgcagggcacaaattccgtgcggcaggcgcccttttcggccgaaacgagcagagctcccttctcgccgcattcgtcgaacccccggcccatcaggcagccgggccacgcgcacagcgtgccgccgtcgcgccgctcgccgcggcggtgaatgtggccaagggcggcataatccagcccggaggccgccagcgcagcagacgagacggggtcatagggcgaggcagggttttcggcgtcgccgtgcaggacgagaatattcagacgcgaagggtccgcggcgcggaagccgtccagcatggcgggcatctccgcgcgcaggaagcccgcgccgtagacgtcgagctccggcaggctgacgcgctccggctccgccgtgcggaagatatggacattttccggccagccgttttccaggtacggcgagccgggcagcagagcatcgtggttgccaggcgcgataaaaacggggcagcggcaggccgccagcgcggcccggagcgcctcgagcgtgtcacggtagacacgggcgctgtcaaacaggtcgcccgccagcagcacggccgcgcagccctcggacagcgcggtcagccgctcgagcacgagccgctgctcggcgcggcgctgggcggccttctccggcggcagggccgaaaaggcggaatcaagatgcagatccgccgcatgcagcagcttaaccatggatatccaccctcctgacggccgtgcagcggccggtagcgtcgtcgatcgtaaacaggcaggcctcgagcttgcacgggccgggcgcgggctcatagcggctgggaagatcgccccggaagcgccggatggacagctccggccggatgccgagcacggaatcgcgcgggccggtcatgccgaggtccgtcacatagcccgtgccctgcggcaggatcatcgtgtccgccgtcggcacatgggtgtgcgtgccccagacggcgctgacctgcccgtcgagcatccggcccatggccagcttttccgacgtggcctcggcgtgcagctccacaaggatgagctttgtctgaattttgcgcacgatgcgctcgacgagctggaaggggttgtccggcgtgtagtccatgccgcaccggccgatgaggtcgatgacggccacgtcgccgaacggcgtttcaaacacgccccagccgcggccgggctgctgctgcggcagattcgccgggcgcagcacctcgcgcgaccgctcaagatagggcacgagctcacgcctgccccaggtgtggttccccatggtgatgacgtcggccccggcgctcagcagctcctccgcctgcgcgggcagcatgcccagcacggcggcgttctcaccgttcacaacgcagaaatcgaccgacagctcccggcgcagccgcgggagcgccgccttgcaatatttgacaccggcgggcgcgaccacatcgccgaccgccagaatgtttcgttccatcgcaggatctcctttccggacattgtcctcagcttgtcaaaaaagtcctttcggacttttcgccaagctgatgcctttcagaattgcaaaatcaatttttgcagcatgattttgcaattctgccgctgcggcgggggatcaaacgcgaaaggacaccctgacggtttcctttcacactttccttccctccgtaactttcagctgagcgttattttgacaatctgtgttcctccttttctattatatcgaaaaacgccgcaaagcacaaccggaaaacggaaagtcgtgccggacgcacgcgtcttgtaggggaggggacagccgggcccggcgctgcacctgcgtaagaaacaggctgtcagtaaaacggtgaatgccgaaggtttgtcattgcgaggaggccgcaggccgacgcggcaatctcgggaaggcactcacgatttcgccgatggctttcctgttatccaacttggtgctgcgagattaccacgtcgcttcgctcctcgcaatgacacgtcagggaagcgcgaggtgcaccagcgccctcctgcggttaaatgtccctgtacaaggcggtcactccccgtaaaggggacgccgcatccgtaaggcggcaaagccgccaacggctgcgcagtgaccgccgctacagacgcaatcggtgcattcctttattggcagctcgtccgtttcgatggcctctactgagattgccgcaaactcaaatgcccaaaccgggcgtccggggcgggagaattttgaaatttgtcacaaatttttcattttttcctcttgactttcttccggaaatgggtattatatagggtgttagcactcaaatgaattgagtgctaaattcaagcccgtaatcaaagatgggagaccatcagacattatattggaggttagcatcatgaaactggtaccccttgcagatcgtgttctgctcaagcctgtggaagccatggagaccaccgcttccggcattatcctctccaccgctacgaaggaaaagcccgttgtttccgaagtcgtggcagtcggccccggcggcgtcgtggacggaaacgaggtcaagatggtcgtgaagcccggcgacaaggtcgtcgtcgcgaagtatgctggcaccgaggtcaaggtcgaggatgtggagtattccatcgtccgccagtccgagatcctcgcgatcgtagaataattcaggaggcttaaaatatcatggcaaaaatgattgaattcggcgaagacgcccgtaagaagctgcagtccggcattgaccagctcgcagataccgtcaaggtcaccctcggtccgaagggccgcaatgtcgtccttgcgaagaaatatggttccccgctcatcacgaacgacggcgtgacgatcgccaaggaagtcgagctcgaggatccgtttgagaacatgggcgctcagctcgtccgtgaagtcgctacgaagacgaacgacgtcgcaggcgacggcaccaccaccgctaccctgctggcacaggccatcatccgcgagggcctgaagaacgtcagcgccggtgcgaaccccatggtcatgcgcaagggcatgcagaaggccgttgacgccgccatcgaggccatcaaggccaactcgcaggccgtgaacggcagcgcagacatcgcccgtgtcggcaccgtctcctccggcgacgaggagatcggcaagctgatcgccgaggccatggagaaggtcacggccgccggcgtcatcaccattgaagagtccaagaccgccgagaccggcctcgacgttgtcgaaggcatgcagttcgaccgcggctatatctccccgtatatggtcaccgacaccgacaagatggaagctgttgtcgatgatccgtacctgctcatcaccgataagaagatctcctccattcaggacatcctgcccgttctggagcagatcgtcaaggccggccagaagctcgtcatcatcgccgaggacgtcgagggcgatgcgctgtccaccctgctcgtcaaccgtctgcgcggcagcttcaactgcgtctgcgtcaaggcgcccggcttcggcgatcgccgcaaggaaatgctccgcgatatcgccatcctgaccggcggcacctactttgcaagcgagctgaacatgaacctgcaggaggctcagctctccgatctcggccgtgcccgccagatcaaggtcaacaaggacaccaccgttatcgtcgacggctgcggcaactccgaggagatccagaaccgcatccacgagatcaaggccgccatcggcgtgaccacgtccgagtacgaccgtgagaagctgcaggagcgtcttgccaagctgtccggcggcgtcgccgtcatccgtgtcggcgcacagaccgagactgccatgaaggagcagaagctccgcgtcgaggacgccctgaacgccacgcgcgctgccgtggaggaaggcatcgtcgcaggcggcggcaccgcgttcgtcaacgccatccccgctgtcgagaagctcgttgccaagctgtccggcgatgagaagaccggcgcgtccatcatcgtcaaggcgctgcaggctcctgtccgccagatcgctgagaacgccggtgtcgacggctccgtcgtcttcgagaagatcaagaacagccgcaaggtcggcttcggctacaatgcctacagcgccacctactgcgacatgatccccgccggtatcgtcgatccgacgaaggtcacccgtaccgcgctcgagaacgcagcgtccatcggtgcctgcgtcctgacgactgagtccatcgtggccgacaagcccgatcccgcagccgacgccgcagcagctgccgcagccaatgcaggcggcatgggcggcatgtattgatccgcaccaactgaacagagagatcccggacggttcgccgtccgggatttttatgtcccgtcgcctctttttctgtggcgaggaggcgcagccaacgcggcaattttgcaggacggggcgggataagcggagagctgcgggcgcggttgaaaaactttttttcggatagcccgactgcttccttgcatagtggtgatactctgtgctatactgtaaaaaagctggatttttcttgtgacaaggaggcggacgtatgctttgcaagctgacacttgaacaaatctgcaccatgacggaatctccgctgtttgaccgcaagagcgcccgcatcgacgcaaagacgcttgcgattcatctgatcgcctttgccaacgcagacggcggcgtgatcgcggtcggcgtggaggacgacgggacgatcaccggcatcgacggctatcaggagcatatcaacgagctgctgcgcgtgccgtttgattactgtaagccgtccgttcaaatcgaaaccgaactgcttgcctgcaccaacagggacggtgagccggattatattctgctgattgaggttttgcaaagcaacgagcttcacgccaatcaggcggacgatgttttctttcgcgtcggggataaatccaagaagcttaatttcgacgaacgcctccagcttatgtacgccaagggcacacggtattttgaggatacccctgtcccggacgcggcgatggaggacattgacctcgacttcgttcgggagtatacgcagaaactcggctaccggaaaagcccggaggaatacctgcgggagaacaaagaatttatctccaccaaaggtggcaaggaagaagtcagcactgccgccatgctgctgttcggcaagaatccgaaacactattttccccgcgcacgcatccgctttgtccggtacgagggtacggaagccaaggtcggtgcggagatgaacgtcatcaaggacgtggtgtttgaaggccgcgtcctgcaggtcattgagaaggcgctggagttcgtgcgcagccagatcaaggagcgcacctacctcggtgcggatacccgctttgtcaccgagccggaatacccggagtttgcctggaaagagctgatcgtcaacgccgtcgcgcaccgcgattacagcatcaagggaacggacattcaaatcaagatgttcgacgaccggctgacagtagaaagccccggtacgctgcccggcatcgtgcggctgaacaatatgcggcacgtccacttctcccgcaatccgaaaattgcgcagttcctgcatgagtacgaatatgtgcaggagtttggcgagggcgtagaccggctctatgaggtcatggaaacagcaggcctgccgcagccggagtaccgcgtggaagcgtttatgctctatgcaacgattcggaatacgaaaaccgatgcgaacttaggggataccccccaagtcaccccccaagttaaaatcattgcattctgctcggaaccccgcagcaaagcagaaatcgccaaccattgtggcttcaaagatatcaagcatttcaccgcacgctatctgaagcccctgctggaaagtggtcagctgcggatgactgcccctgataagccgaatagctcaaagcagaagtacattacggtgcagccgtcacaataaaatgaccgccggtcttctgtgggggaagaccggcggcattttgtgggcatttgcgtgggggagagcgattcagaaatgagagttatcggaagcaccggccgcggggcgcggtgcagccttcttacttcaggtcctcgccgtagtagtacttcttcagcgggaagtacagggcgacggcggcgacggtcgtgatgatcatttcggggatcatgtagctggcgttgtaggcaagggaccacagcggggaagcccagcccagctcgttcggccacagagcctcccagatgatccagccggacacgaagtggcaggccagacgcagcagcgtggcgaacacactgccgacggcgatggacacggggcggttcttgatgcacttgtcaaagatgccggcaaggccgatgacgccgaacgcgacaacatagtccagcaggatgatggcaagcacttcccagaagttgcggccgtacatgacgttcttcatgccgaggaacatctgcagcacgccgtagaccagggcggagctgatgccccactttgtgccgtggcggtggcagatcaggacgagcgggagcatgctgcacacggtgatgccgccgccaagggcccaggggccggagaactcgaacagactgagaacggtgccgattgcgatgagcacggcgcactccacaaggcggcgcagtcccatacggcgagagggaacggacatagaggattcctccaaaacaaaaattccgcgctgcaaaccgttcttggaaagcagtgcggaagacctctttccctacgacggcatgatccgtgtcaggtttgcgggtcagggcgtgacttcgcccaatctcagccggaagcatccgaccccccgaagaaggatttgttttgcggtaaattcagtatacccgaaaaggaaccatttgtcaagcatagaaaaacatgctataatcgcctcagaattacggattttttccggaatggaggccaatcatgtctgattccctgcaatcgctgttctcgcgctgcgactccgtcctcgtgttcgacacggaaacgagcggcctgagctggcagcgcgatgagatcattgaattttccgccatccgcctgaccgcctccggcacggaggaggtcgatgagttcatccgctgcacgcgcagcctgccgccgcgcatcgtggagctgacgggcatcacggacgacctgctccgcgaagaggggatcggcaagcaggcctttgccgagctgctggccgcgctcctgacgcctggcacgatgctcgcggcctataacgcccagttcgatctgctgttcctctatgccttcctgcagaaatacggcgacgcccgcctgctgcaggacaagcagaagctcgacctgctcacggtctaccgcgaccgccgcgcctatccgcaccgcctgtgcaacgccatcgagcagtatgacctgcaggaccgcgtgacgaattcacaccgtgccattgacgatgtgcgcgctacggtcgaggtcctgcgcgccatggggaccgagcgggacgatctggagcgctatgtcgacctgttcggctattcctccaaatacggcatctccggtccgcgcatctcctccgtgcgctatctgccgcagggctatgagccgaaggctgcgccgctctacgccgggctatgagacctgccgcagcaggtcgcgccgcaggcgctgcatgatgcgcttctccagccgcgagatatacgactgcgagatgcccagcagatccgcgacctccttctgcgtcttttccggccgcccgcccagcccgaagcgcaggctcacgatacgccgctcccgctccggcagccgcgcaagggcctcgcgcagcagctgctgctccgcgtcctcctccatgggccgcatgacgatgtcgccgtccgtcccgagcacgtcggacagcagcagctcgttgccgtcccagtccgtgttgatcggctcgtcgagcgagacctcggccttctggcctgcgatcttgcggatgtgcatgaggatctcattctcgatgcagcgcgaggcataggtcgccagcttgatgttccggtccgatttgaacgtgccgacggccttgatgaggccgatggtcccgatggagatcagatcctcgatattcacgccggtgttctcgaaccggcgcgcgatgtagaccacgagccgcagattgcgctcgatgagccgggcccgcgcggcctcgtcgccagcggcggcctgctgcaggagggtctgctcctcctgcgcggcaagcggcggcgggagaatgtcgctgccgccgatgtacatgagctttgcgggctgccgcaggaggcgctgcagccagtccgtgagaaattcaagcatcgcatttccctcctgtcagggcctcgtagccgccgccgtccgaaacgggcgtcggggagaaggcgacgaggccgtttttttgcacgctttttccgatgcggacctcctcgcacggcagggcgagcagcaggccgctgcccgttccgacggcgcggaaggggatgaggcgcgggtggagccgctgcaggcgcactaccagagcggcgggcgcggcaaaatccgcggcgcgcaggccgtcgtgcggcaggagccgcgcggcgcagcgccagtccgccacgagcacggcctcgcccgtcacggggtcgcagagcgtgttgccgctgtcgcgcagcgcgctgaggaacacccgccgcccgccgagcgtcagccgcacgggcacgacgctgtccggcgcgtggctcagccggggcagcagcaggcgtgttgcggcatagaccccgcccgccgtcagcacgagcgacgagaacgttacggggtaccacagcgcgccggggcgcacgcggccgtgcttcagcagctccagcccgtataccgcgccgcacagcgccagcgtcactccgccgaacaccgccgcgagccgcagcgtctcccgccgcaggccgaaggccacggccagcagtgccgccgtcatggccagcttgcccgcccagcccgccagaactccgcatcccggcagatacaccgccacggcgtaggccgcgccgagtgccgcagccgccgcaatgcgccggggccggaccgccgccgccccgagccgggccgccgcgcgcagcagcagccagttcaccgcaaagttcagcgcgaacacgctgtccagatagaccgtcatggccgccccccctttgtccgtggacaaagtatacgcgcagggcgcaaaaaaacaggtcgcaatcccggcgtggggtcgcggcctgttttgtctgctttcccggaaaagaacgggcgcttcgcgccgttcggcggcgtgcggtcaggttttgctggcggacgcggcagggatttgcctgaccgcgtcgaacggtttatcggaagccaaacggatctgccacggcgctgccccacagcggggcggccatgcgccacatcgcgcgggcgtggatgcggtcgtgccacaggaagcggcgcaggagcttgcgcagcgtccagcgctcgccgtccggcgcggtgcagatccttccggtcagcagctcctcgcgatcctcgatctcggccagcgcctgcagacggttggcgtagaggtcgggcatgttctcgaacggaatgccgaaggcggccatgtaataggccgtcgtgctgttcgtgtggtcatacatctcgcgcggcgtgcgcggcacggggccgtagaagctcgtgcgcggggcgcggggcgagatatccgggttcggaatgctctcgaacagcgcgcagaagtcgcgcgcggatttcagcaccagcagcttggccgcggcgtagtccgcctcggtcatcggggcgcagtcggcctcgagcagcaggtcggaatcggcgtcctcggtgtgcaggctgctttcgatgggcgcgcccggcgtgacggtgatgtccccggcaggctctccggcccagcgcagaaagcgccgcacgtcgcccggcagcttggccagcgcttcgttttccgtcgcgccgcgcgcaaaggcgccggggcactgcgccgcccagaggagccagccctttccgttggtttcacagatggcatcgatatgcatgcgattccctccttgtggctatacgggcgcggagagcaccgcgtccacggggatatcgtgcgcctccgtctccagtcgcggcagcagctggaaggcgtagcacagtgcaatggtcgggtgcggctcagcggcgaggaagcggtcatagaagccgccgccatagcccagccggtggccctgcgggtcaaaggccagacccggcatgagcaccagagccgccggatcgtcggcctccgggccgtcgtcgaccggctccgggatgccgtaggccccgggggcgatgcgcgccggggcgtccagccacaaaaagcgcatgtccgtttcgccatagaccttcggcacggcaacgcgcttgccgagcgcctgcgcctgccggatgagcggcagtgtgcgtacctcctgattgtagctcaggtaggcatagagcgaccgggccgcccggaacagcgggtgggccagcagctgcgccgtcagatcggccgaggcggcctcgatctgcgccgggctcagggcgcgcttctgcgcggcgatctcccgccgcagggcgcgtttatccagcatagctgctcagtgcctccgtgatgtgcgcggcaaagcctgcacggtccaccccgagcaccacgaagacattgcgctccgggaatttcgcgtccgagtccagatcggtcacagtcttggcataggtgaccgtgccgcgcgtctccacatgtacgcccgcctgccgcccggtgaacagctccgggtgtgtcaggtacagcacggggcagacgtcgtgcaggcacaggccgcctgcgccgcgggccatgtttttctgcatgggcccggccgtcgccgcgcgggcaaagcgcccgacgggcgtgtccggcagggcggcgaactcctcgggggagaaccaggcctgctccgtgacgtccagcccgcacattacgatgggaacgccggacgaaaatacgatctccgccgcgtccgggtcggcgtggatgttgaattccgagcagggcgtgcggttgccgcccacggccgcgccgcccatgagggcgatgccgcgcagcagggaccggagggctgggtgggccgtcagcgcgatggccgcgttcgtcagcgggccggtcgccacgagcgtcagctcgccgggcatccgcgcagccgcctcatacagggcgtcccacgcgggcgtctgctccggggcgcggcgcggggcagggagcacggctccgccgaggccgtcggccccgtggaagctgctggcgtcctcgcgctcacggcgcagcgggccgggagcgccggggtaaacggggtagtccgcgcccataaggccgcagattttcagggtattttccgtcgtgtggccgagtgtgacattgcccgccacggtgctcagcccgacgatctccagcccgggctggcggtgggccgtcagcagggcgatggcgtcgtccacgccggtgtcgcagtcaaaccagatccgatgttcagccataggtacgcaccgcctccgtcagaagttccgcgaagccctcgcggtcgatgcccgtgatgacgcgggcgttcggcgcagtgcgccggtcaccgacggttgcgccgcggcagaacgcgccctgcgtctccaccgtgacgtgccagtcctcaaagtgcagcaggtcaggccgcagcagggcgcacacggccacggcgtcgtgcacgggcgctccggcgtagccctttgtgcggtggaaggcaaagaagaagtccagccagcccgcgacagtctccgccacggggttgccgacggcgcggatgcgcgcaaagtcctccgggtagagcagggcctgctccgtgacatccagcccggccatggtgatgggcaggccggagcggaacacgacgtccgccgcctcggggtccgcgagaatgttgaattcggctgcaggcgtccagtttccgtgggcaaggccgccgcccatcaggctgatgcccgcgatgttcgccttcagctccgggtgagccagcagcagggcggcaacgttcgtcagcggggccgtggccacgatggtcagcggctcggcgctttcgcgcagcaggcgggccatctgctccggcgcgcgctcgggtgcggcctcacggtccggctccggcagggcggggccgtccagcccgctcacgccgtgcacgctcggggcggtgagcgcctcggacagcagcggccgggcaaggcccatggccaccggcgcccggatgccgagcagcgtgcagatgcgcagggcgttgcgcgtcgttttttcaatggtctggttcccggcgacagagctgacgccgcggatgtctaggccggtcgcggccagcatccaggcaatggcgtcgtcatggccggggtctccgtccagcaggacgggaatgcgatggttcatgcggattttcctttctgtgcaagcgccgagcgtgcgcggtgctttttgcgctgctgcgcccgcacgacgacgtagaccatcatcacaacggtgatgacataggggatgagattcgtaaggtccgcgctcaggtattcctgcaggcgcaggccgatggcgtcaaagaagccgaacatcagggcggcaagataggccttcggcgggttggccgcaccgaaaatgacgcaggcgaaggcgatgtagccgcggttgttgctcatattctcggcaaacgtgccctgcagctggccgagcgacaggtgcgcgcccgcgagcgcgcagaacacgccgcacaggatgcttgccagccacttgagctttgcggggtcgatgccggccgtgcgcagcgtctcgggcttttcgccggaggcccgcagccagaagccgtagggcgtcttatagaggaacagccacagcagcagcacgaacagcagcgtcaggtagacgaacagcgagttgccgctgagaattttgccgaggaaggggatgctctcgatgcccggcaggcgcaggctgggcaggaaggggttgcccttcgtgccgcttgcaccgaaaatggagcgcgacaggaagcccgtcaggccgagtgcgaacgtgttgagcgcgcagccgatgatgaattcatcggagcggagcttcacgacgaacagtgcgaagaacaggccgacgagaaggccgacgccgacggccagcgccacaccggctgccgccgaggcaaacagccagctgccgagcacgccgaagaacgcgcccatcaggatcatgccgtccatgccgatgttcatgatcccggcgtgctccgtcagcgagccgccgagggcggccagcgccacgggcgtggcgctgcggagcatctgctggaacgttccggcggagaaaatgctcttcagaatggattcaagcatgcttttccgcctccttactctttcttacgcggttctgcagcgcgccgaacaggccgctctctgcagccatgaggaagatgacgaccgtttggatgatgagatagatctggttcggcacaccggcggccagctccatgccctgcgcgccgatcttcagcgcggcaaagaacagggacaggaacacgacggccagcggctggtagcgggcgatcatggcaaccatgaggccctcaaaataatagtcgcggctgatgctgtcgcggaacaggtgctccgcgccgtacacacggaacatgccgaccaggccgcacagcgcgccggacagcagcatgcacacgagcacaaggcggtcggtgcggatgccgatgaagcgcgcaaagcgttcgttctggcccgtgagcttcatctcatagccgcgtgacgtcttctgcatgacataccagatgacgagcgcaaggacggccgcggccagaatggccgttgagaggttcgagccgccgatgaggccgccgaaccagtagcgggcgttcagctgctccgtcgctgcgaccatgtttttatttgcgttcttccacggccccttggcgaggtactggcagaagctggcggcgacggtgttgagcatgatggtcgtgatgacctcgttgaccttgaccttgaccttcagcacaccggggatgagggcgtaaagcccgccggcggccatggcggccagcgcggccagcggcagcacgagccacggcgtcaggccgtcgagccacacgccgacctgacaggcgacgatggcgccgagcaggagctggccctcgccgccgacgttgaagatgccgacgcgcgcgccgagcacgcaggccagaccgcacaggcaaagcaccatggcgtattccagcagatcgccgatgtggcgggcactggagaacgcgccgttcagcatggcaaggtaggccttgccgggcgagaagcccgcaatggcaaggatgaccgcgccgatgacgaacgcgagtaccacgctcagcagcagcgagatgagatagccgggatcgatccgttttttcatgcctgcgcctcctcccggcgtccgccggtcatgcaatagccgatctcctcgcgggaaatttccgcggcggagaattcgcccgtgatcctgccctcatacatcgtgatgacgcggtcggacaggcggaacacctcgtccagatcggccgagcacagcaggatggcacagccctcgttgcgcttttcgaggatgcgggcatggatgaactcgatcgcacccacgtcgacgccgcgcgtcggctgcgcgatgagcaggacgggcgcatcgaacgagaattcgcgcgcgatgacgaccttctgcatgttgccgccggacatggacccggcctttgcgccggtgcccgcgccgcggatgtcgaatttttcatacagctccgaggcatagcgctcgatgctgctcgtgcgctggcagaaggcaaagccgctgaagcgcggctcgcgctgcttgcccgccagcaggttctccgtcacactcgcctcggcgctcaggccggtggcaagacggtcctccggcacatgggcaaggcccgcggcgcggatctcgccgggcgttttgccggtgacgtcctgttcgtgcacgaaaatctttccgtgctcgacggggcgcatgcctgcaatggcctcgagcagctcgctctggccgttgccctcgatggcggcgatgccgaggatctcgcccgcgcgcacggacagcgacaggccgtccaccgccgtcaggccgcggttatcctgcacggtcaggttttccacgcggatctcctccgcgccgggtgtgccggtcttttccagctggtcatagagcacggggcggccgaccatcatggaggccagcatgcgctcattgacgtttttcgtctcctccacgccgacgagctttcccttgcgcatcacgccaacgcggtcggagatggccatgacctcatagagcttgtgcgtgataaggatgacggtcataccgcgctcacggacgatgcgccggatgacggagaacagctcgtccgtctcctgcggggtgagcacggcggtcggctcgtcgaggatcaggatttccgcgccgcggtacagcgttttcagaatttccacgcgctgctgcaggccgacgcccgtctcggcgacgacggcgttcgggtcgaccgtcaggccgtattcctccacaaggcggcgcgtttcgcgctcggccgcgcgctggtcgaagaacaggccgaaccggcgcggctcacggctcatgacgatgttctgcgccacggtaaacgacggcacgagcatgaagtgctggtgcaccatgccgacgccgtggtcgatggcattgcgcgggctgaagcggctgacctcctcgccgcggatggagacgctgccgcccgtcggggtgtggatgccgtagagaatgttcatcagcgtcgatttccccgcgccgttttcgccgacaagggcgaagacctcaccctttcggatgtccagcgagacgtcgtcattcgccagaacgccggggaacgccatgctaacatggcggaactgcacggcgatgtcgttcaaatcgggttcccccttcctcccggcagcagccgggatcatgtaacaaaggcgtggcgcagcgccacgccgcagactgtcaaaaaacctgcccagccgaaagtttcggagggaagaaaagtgtgaaaggaaaccgtcagggtttcctttcgcgtgaaataacccgccgcagcggcagaattgcaaaattatgctacaaaaattgattttgcaattctgaaagcagcttgtcaaaaaagtccaaagagacttttttgacaagcagaggcgtggcgcagcgccacgccgggagttgatattcagattatattgtaggggaggggcaagcctctcccggcgcaatgctgccgatacgaaccggctgccgttaacatgggtaaagccgattgcgcctgtagcggcgctcgttgcgcaaggctgacgggcgagagaatgtagcggcgctccctgagcgcctttggcagttgcaggtattggagtagtaattcgacggcgcaaggctttcaaatttgtcattccgaggagcgaagcgacgtgggaatctcctgcaaccggttacgttttcgccgaggcctacctgctatccaacatggtactgcgagattgccgcgtcggcagcgcctcctcgcaatgacacgtcagggtggcgaagcggtgtaccaatggcctcctgcggttgaatagccctgtacagggcggtcactgaccgcccctacagcggcaggtgcggtcggcggaaatgcccccccaaaaatttgcagctgcccatggcgctcattgcgcgccgccgcaccattctgcggccttttccagctccgggaggggcgtgcccctcccggataattctgcatcagcgggtcgtttcgacggtgatctcaccggagacgatcttcttcgacagctcttccacggcggtcttcacgtcgtcgggcacctgctgtgccgcgccgtcctcgccgtagccgatgccgacatagccgttgctcatatcggcgacccacgtcgtgccccacagggagctgtcgccgtccagcaggcgctttacggcgtcatagatggagctgccgacttccttcttcatggagcagatgatggtgtcggggtcgatgtacttctggtcgctgtccacgccgatggcgtagaagccgttctccttcgcggcctcaaacacgccgtcgcccgtggcggaggcaatctggaaaatgacgtccgcgccctgatcgtgcagagccagcgcgcattccttgccctttgcggggtcgtcataggtgcctgcgtagttcttcacgacgttcacggccttgccgttctccgtgccgtagtactccgcgccctgcgtgtagcccacgatgaagtcattgatggtgtcgctgtcctcgccgccgacggcaccgaccgtgccgctctcggacatggcggccgcgatgtagcccgcgaggaacgagccctcattctgggcgtaggtgatgttcagcacgttggcgaccggctcgctcgtggcgttgtcgatccagatgaacttcacgttcggatattccggcgcgatggtctcgacatcatagaattcccagccgacgcacacgacgacgtctgcctgatcggcggcgttcttcatctgcgttgcgtggttttcgttgttgcactcgatggtgctgacctgcacgccgaagtccttggccagacggtctgcgccttccttggacgagtcgtagaacgaacggtcgccgaacgtaccggccacgacgagcgcgagcttcaggtcggaggaggagccccccttgtcttccatcttgccgcaggcggcaaagacacacgtcagcagagccactgccagaatgcatgcgaggatctttttcataaatagcctctccgtttcaaacaaaaatttgtcggttttacccgacggtgtgctttcattataatgttttttttcgcgccgcgcaagtgggcatggcaaatatcgcccggaatttcttacgcgcgggcaaaaaaccggatgccatgccggaaaatagagcgatgcgtatggaaaaacatgattgcggcaaaaatctttgttgaaattgtgctgagaatcggctatactacaggaagaaaactccaaaggaggcggcatgcacatgggtgtaacggtttccgtcatttccggcaagggcggcacgggcaaaacgacgctctgcgccgggatcgcggcctgtcttgccgccgagggcaagcgcgtcctgtgcatcgatgccgacatcggcctgcggaatctcgacatcgcgctcggcatggccgagcagcccgctgtcgcgttcacggacgtgacgcagggcttctgcaagctgtccgacgccgcggagcatccggccctgccgggcctgttcctgctgacggccccggtgcgcgagcaggacgctctcgtggagcagcagcgcttcggtgcgctgctgcgcgaggcccgcgaggccttcgactgggtcctgatcgacgcggccgctgggatcggcacaagcttccgccttgccacgcagtttgccgaccgctgcatcgtcgccgccacgccggatcccgcctccctgcgggatgccgcctgcgcggcagacgcccttgcgctcgaggggcacgagctgctgcagctcgtggtcaaccgcgtgcagccgcgcctgttttcgcgcatgaacctgacggtggacgacatgatggaccagaccggcctgccgctgctcggccttgtgccggaggacccggccgtcgtgctttctgccgcagcgggcaaggcgctgatcctgaattcctccggcggtgccgctgaggcctgcctgcgcatctcccgccgcctgcgcggtgagccaatgcccttgatgcgattttgaagatgaggtgatcttatgaatattacgctgatggcgcatgacaagaaaaaggaactgatggtccagttctgtacggcttataagagcgtgctgagcaagcacaacctctccgccacggccacaacgggccgccttgtcgcggaggcgaccggcctgcccgtgacgctgtatctttcccacaatcagggcggtcaccagcaggtcgacgcccggatcgcctataacgagatcgatctggtgctgctgttcaccgatccgaataacagcgacccctgggaggatcagcaggtcgtgcagacgctgcacctgtgcgacgcgcacaatgtgcccatggccacgaacctcgccacggcggagatgctcatcctcggcctgcagcgcggtgacctggactggcgcgagatgatccgccgcaagcgctccgtccgctgaaaggagcagctttatggaagcaacggaactcattgaactcatccgcacgtcggagaagaagacgcccgtccgcgtggtgctgcaggccaatgcgccctgcgagttccccggcgcggaggttttttccggcgggaacggcctgcatatcctctacggcgactggaaaacgctcggtccgcagcttacggcgcaggccgcgcacatcgaccgcctgcatgtggaaaacggcgcctgcaattccgccatccccatgctggacctcaagggcctgtatgcgcgcgtcgagccgggcgccatcatccgcgagggcgcggagatcggcgcgaacgccgtcgttatgatgggcgcgattctgaatcttggtgccgtcgtcggcgagggcagcatgatcgacatgggcgctgtgctcggcggccgtgccaccgtgggtaaaaactgccatatcggcgcgggagccgtgctggcgggcgtcatcgagccgcccagcgccacgccggtcatcgtggaggatggcgtgctcgtcggcgcgaatgccgttgtgctcgagggcgtccatatcggaaaaaatgccgtcgtcgcggccggagccgtcgtcacggaggacgtgccggagaatgccgtcgtggcgggcgcgcccgcccgcgtgctgaagcagcgcgacgaaaagacgaattccaagaccgccttcgtcgatgccctccgcgagctgtaagagaatacaaaacaaacgtccccggatgcgccgcatccggggataattatttggaaatgaaaaatgaggggagcggcatgcggactgacaagttacaggcggcttcgccgaccgtacccgccagtgtaggggagcggcatgccgctcccggcgctgcacttgcgataggaatggggcggcgttaaaacggcaccggcccccgatgtgtcattgcgaggccccaaaggggccgtggcaatctcttgcaacagcctgcgaatttgccggggttttcctgctatctggctgggtactacgaggccattacgaaatagtactgagattatggcgttgtcgcttccctgagccacaacttgatctcttctatacactttgctaactcatcacatatttgatacacccagaaacgcttaacatcccagccaagctcaaatagacgctgattacgcagttgatctctgtagcacagttcatcgttccaatctctatgatacatttctccgtcaatttctatatccagttttttggaaccggcgataattgcaaaatcgagcttatacttttcaaccgggtattgcggaatgacatggattccatgatcgaacaggatactataaaaatatctctcccaacctgaaacctgttccggattcggcacatcgggatatgctcgggtaagcggatacgccggatcagatcgtgaattgaccagacgattaagagaaagttttcttacatatgatacaaagtcttcgatatgccgaattccgcaatgcgagcagaacgtttcgttgccgataacgatcagaacggcacgcgctctggatacggctacattaaacaggttctgcgtttgggctaagaagcgcagtgacgattgtgaaatcccatccgaaataacagttgaaaacagcatgagatcgcgttcgtcaccctgaaatgcatgaactgtatctacgaggaatttgttattcaccaatgcgaggcggagtgcttcaaatttgtcaatttcttttcgaatttggtcagcttgtgctcggaatggtgtgacaacgccgatagaaccacgatacccttcaactaatacaagctgaaccagattcgaaacgacggctttcacttcggagtaattgagagcaccgccattttggggccgtctggattgaccagcgatgtcgacccaatggattccggcggacacatttttgggacacaccagtcggtcatatgccgttgctatgcgcagcgtgtctttatagaattctgtattcgaataaccaataatgtcaccgtgactgcgatgatggtctctgagcgatatggcctgagtagaatcaatcatgcttgcagcaacagaatacaacgagcacgctgagtatgaccaacgcaggtcgatgccgtatttctccaacagacgagcgtcctgtgtcgcggacaatgaacaaatgtgacttaactgctgctgatcacccaagataacagcttgttttgcgcgatataggagcgggagaacggaagcgatatcgcactgacttgcctcatcgataatgactatatcgtataatccggccttaaaagggatatggcttgctgataatgatgtgacggcgacgcaaggaagatacttctgcatcttttcctgtagacttttaaacttttttcgcaaggtaggactgtcacaattgccgtcgctcagcttcatcgcggttataaaattcgacatgtctttacggcactcgcgatctacttcagtagagcatgttaacaaccaacttttccagagttcttttgctgttccggcgaggccctgcttgcttttcgagagttcgtgatccagagtctccagcgatggggccatagataaagcctgcagagatttgaggtagctatcgatattgcgcaaatttttgagcaacagttcgctttgttcacatactttgcaatggtaatcttgtgagttagtacgggtgtctatcgtgattgcaggcaactcgtatttttcaaataaactatttaaatcgttggctgcctgaatcaggtcgctttccttgcgttttccagatataaaccagaacagttttgagaaaaaggagtttttagcagcctgaaaatcatgatatgaccttctgtattgctgataagctgcatcacagtcataaatactgtcagaattgatagagcgaaaccatttctcccagtttttacgcagtgtgcagatggcttgttcagcatggtcgacactattacgcagccgaacgattctagccttttcctgaaataactgattgtattctgccagtttaagctggtattctttcttgcgctgcttgtatattgacttatcatcttctgctgagttgtatgataagcagtcagttaccaattcggctaaacggtttgcgtatttatcatttccaagccgcagcatgacggggcgagagcacaatgagtttacgcgtttttccacaacgtcgacagctttattattcttgctggaaaagagaacactttttttattccaagcggcgttggtcaatagatttgccactacttgcgattttcctgtaccgggaggcccggtgacgattgtaagcttttgcgttaacgcgtgacgaatagcagcttcctgttctgtgttcatgggaaaaacttccagcaatggaaaattggcttttgctccggaagaagcagcatcagctacggcatcatgtatccagtcgaatagagcggtgtcgcgatatgatgcctcagtcaaatttgctaagacggaaagttcattttccagccccacggtatatgatgattgagcgattgtaaggcagatggcgtggttataaacgccttcttcgcagaccgtactgataggaggataagtggtcaattgattcgggtctaaaggttcacgccattgccactggcgtacctgctggagtttggcgactaattcacttgggctcaaattacaatcattgtcattgagacctaaatctttccccaaattgatcaaatcatatatttgactgtctttatcgcgctgagagtattgccggattgcttctaaatttatgattggcagttcagaaatggatacagcaccaccggaaatcgtgatagggaaaagaaaaacaggagtcaaaacagaatgatttgtcgatgactttcttgaaactataactggatagccgacatacgatgtgagtcgcttgtcataagacaagctatggatcaacaggggaatgttttcttcagaaccagtaaggtcgattcgggataactcgaagaagcggtgttcttgctgaaggctacttttgatgtcaaaagatatattatttgagttttccaagctgatgcaattcagatagtaattgcagagactttgaagacgcttatcggggtgcgatgtttgctcgttagttgttttggcttccattgtttaccccccatgttcggaccgtcaaaggtagtaaagagttatttattaatataaaggcgagacggccgctcttgatgccccgccgtacagctttcgtatttgccgtggctttcctgttatctaaccgtgtgctgcgagattgccacgggcgcaaagcgccctcgcaatgacaaatctgtttgccttgcgccgctgaaccactgcctcgatacctgcaactgccaatggcgctcagggaacgccgctacagacgcaatcggtttgtgcgtttttatcggaagtctgtgcgaattgcatgtgcctccccgagattgccacgtcgcttcgctcctcgcaatgacaatttggggccaattccattttaacgatgccctgtgccagtcggcagcgctgcgccgggctgggctgtccccgaccctacaacacatatttggccgccttacaaaatctccccccacaggccctcttcctgcaggccctcgatgcggacgcggcggacggtgttatgcaggtcctcgccgcgggcatagaccttcatgccgttcggggcgtggccggtgaaccagccgtcctcgatctgctcaaagagcacgtcctgctccgtgccgcacatggcggtcagaaattcgcggtgcagctcggcggcggcggcaacggccctggcggagcggtcggccttctccgcgcgggagagctggccgggcatagaggcagcgggcgttcccgcgcggcgggaataggggaagacgtggatcatggcaaggccacaggtgcgggcaaaggcgagggattcggcgaattcctcctccgtctcgccggggaagccgacgatcaggtccgtcgtgacggcgcagccggggaaccactgctgcagcaggcggacgctctccagatagcgcgccgtgtcatagtggcggtgcatgcggcgcagcacgccgtcgctgccgctctgcaggctcaggtggaactgcgggcggaaattcgggcacgcggcaaggcggcggcagaagtcctcgtccaccacgcgcggctcgagcgagccaaggcgcacgcggagctgcggtacggcccggcagacggattcgaccagatcggcaaacgtgctgccgtccttgagatcgcggccccacgatgcgacctcgatgcctgtgagcacgacctcgcggtagccctcgagcgcgcgcgcctgctccacggcctgcgccagcggcagcgagcgcaccggcccgcgggcgtaggggatgatgcagtaggtgcagaagttgcagcagccgtcctgcaccttgagcatggcgcgggtgcgcgtgccgaggctcccggccggaagcgactcaaaggcacggcggcgcatggcgtcgtccagcaggacctgctgcccggcgttttgcccggcctttttctgccgcacggcgtccagcacgagctggacaaaggcctcgcgtccgccgctgccggacacgacgtccacgccgagagcttcgacctccccggcgctgacctgtgcatagcagccgcacacgccgatgacggcctgcgggtgctcgcggcgcaggcggcggatgagggtgcggtttttgcggtcggcgaccgccgtcacggtgcaggtgttgatgagataggcgtcgcagtcgtcggcatccgttccgctgacgtggcccagagccagcagctgctgctccatggcctgcgtttcatattgattgaccttgcagccaagcgtataacattgaaatttcatcgagtttctccaaaaaatctttgagggtcccaaaaaagattgaacaaaacgtgcattgtgcttttgcccgtttttgcggtataataatcacgatcattatagtggaaaaaacaggatttgtacagtctcagactgtcaaaaaactgccaagccgaaagtttcggagggaagaaacgtgggaaaggaagccgtcagggtgccctttcgcgttcgattgcccgccgcagcggcaggatcgcagactcataaggacttttttgacaagctgacagtctttctttgggaggaagcacatgatcgttcgatttgcatccgtgagcgacgtgagagaatttgtcggactggccacgctgcagccctatgccattgacgtggtagatggcgagcatgttgtcagcgcaaagaactttatggagctgtttacgattaattttacccatcctctgcaggtgcagatcgcagacagccggaacgaggcccattttgccaaagctgccgcgcgcttcgtcgtcggctgaatcaaatgcaggcgcccccatccgatcggatgggggcgttttttgcacggatttccaaagctgcctgcagcggcgctccctgagcgccttgcaggttgacaatgactgcggcacacattctgcggcgcaaggctcccaagtttgtcattgcggggaggccgaagggcgacgtggcgccctgagcgcgaagcgcgaggaagtgcccttggggtgcaatctcgggaaggcagttacgttttcgccggggctttcctgttatccaccccggtactgcgagattgccgcgtcgcttcgctcctcgcaatgacaattcgggggccagtaccattttatcggcaacctgtaccaactgtcagttcagcgccgggaggggcatgcccctcccctacaacgcgcgactggaaacttcgtgtaactttacactatccactttccattttccacttgcaccatgccgcaccgacaacgaccgcccccatccggatcggagggggcggtcatgttctgtatatttgccttacaggcgctcgtacatcgtgttcatgcggcgcaggcggtgggccagctccgccgtgagcaggccgggctgcaaccgccagctccagttgcggtcgctgagcgtgccgggcgtgttcatgcgggcctccgcgccgaggccgagatagtcctgcagttgggcgatgaacgtgtcagccacgctggcaaggccgctgcgcaggatgccccacgcgtagccctcctgctccgtcaggccgaggtattccgcggcataggcgcgcgcggtctccgacgtctgcgccagccactgggcaagcgtttcgttgtcgtgcgtgccgctgtagcagatgcagttgcggatatagcggtgggggaggtagttgctcggctcgcgggagtcgaaggcgaattccagcaccttcatgccgggccagccggagtccttctgcagccggatgacgtcgtccgtcaggaagccgaggtcctccgcaatgagacgcaggtccgggaagcgctcctgcatagcgcggacgaagtcgtggcccggccccttgacccacttgccgccgcgggcggtcttgtcgccgtaggggatggcccagtagctctccagcccgcggaagtggtcgatgcggatgacgtcgaacagccgcgcggccgctgcgatgcgctccttccaccaggcgtaatccgtctggcgcatacgctcccagtcatagagcgggttgccccacagctggccgtcggccgagaaatagtcgggcgggcagcctgccacgccggtcggcagcccggtctcgtccagctggaacagggacgggttcgcccacacgtcgcaggagtcatagggtacatagatcggcagatcgccgatgatctccagcccaagcgcgtgtacatagctgcgcagcgcgtcccactggccgaagaacagatattgcagatagatgaagaagtgcacgtcgtcgccgagccggacggcataggtttcggccgcacccggacggcgcaggcggatctcctccggccacgtctcccacgagcgcatgtcctggctgcgcttgagcgccatatacagggcatagtcctcaacccacgggttcgcattgcggaatttgcgcacggcgtccgcgtcgcgctcccagccgcgcaggaaggcgcggtagagcaggtcgaagcgcacgctgtactggaagccgtagtccacgcgcgcgctgtgcgcctcccagtcgactgcgtcgatctcctcctgcgtcaggaggccgtcctcccgcagcagatcgaggtcaatgaaataggggttgcccgcgtgcgtgctgaagctctgataggggctgtcgccgtagctcgtcgggccgatggggagaagctgccagtagtgctgcccggccgccttcagaaagtcggcgaagtcatgggctgcctggccaagtgtgccgatcccatagggggagggcagcgaggagatgtgcatcagaattccactggttctcatgagtttgttccgtccttccggggtgggtgtgaggtactttcgcggaccgccagcgtgaaggggacggtctcgtggcgtgcgacggcgccgcgctcgagcgtgccgagcagcagggccacgccgcggtcgaccagcaggctggcctgctggcggatggtggtgagcttgggtgtgtagaactcgccaagctccaggccatcgaagccgatgaccgaaatatcctcggggatgcgcaggccgcggtcgtgcagcgcgcgcatggcgccgatggccatgacgtccgacatggcgaagattgccgtcagccccggctgctccagcagccgcagggcggcgtcatagccgtcctgaaaggcatagcgcgccgtggcgcagcattcgtccggcagagtcagcccgcagcgctccagcgcgagcaggcagccctcatagcgaagccgcgacgggccggagcagctcaggtcgcccgcgatgacgccgatgcgccggtggccgctttccagcaggtattccatggcgcattccgccgcctccacgtcgtccgtggtcacggaggagagattgtcgaagccgaggcgggcggcgtcggtcgtcagcacgacggacggcagcgtgatctcgccgaagcttttggcgtacatccgccggtcgccgccgagaaacagcagcccggcgggctttttctcgcggctcaggtgcagagcgcgctcgacggggtcctcgttttcgtcgacgtagtccacggtcagcgggtagcggtccgtggggagcgtctgctggatgcgttcgatcatctgggcaaacagctcgttcgacgtgccggtcaccacggcgacgatgccgctgctgtggatctgcttgaggtacttcgcgttggtattgagctgatatccgcgttcctgcgccagcgccagaatggcgctgcgtgcctgctcgctgacattcggcaggccgttcagggcgcgggagaccgtgccgacggagtagccggacaggcgggcaaggtccttgatcgtcatatgggttatcctttgacggcgccggctgcgacgcccttgatgatatatttctggcagaacagatagacgatgatgatcggcacgatgctgaacatcatgacggccatcgttgcgccgaggtcggccgtgccatagctgccctgcagatactgcacatggatgggaatggtcttgtattcgttgatgtcgagcacgagggagggcaggagatagtcgttccatacccacatgacctcgagaatgccgacggagatgagcgtcgggcgcagcatgggcaggacgacgctgaagaacgtgcggatcgggccgcagccgtcgatcacggcggcctcctcgatctcgagcggcaggctcttgacgaagccggagaacatgaacacggcaagacccgcgccgaagccgaggtagatgacggggatggtccacggtgtgttgagatagaggccattcgccacggagacgagcgggaacatgaccatctggaacggcacgatcatcgagaacacgcagcccagatagaacaggcgggagaaccgtccgccgacgcgggagatgaaccatgcggccatggacgtgcacagcaggatgagcgtgacggacagtatggtgatgacgatgctgtacagcagggacttgaggaatggatagttgccgaacgtcatgcccttgacatagttgctcgtgcctgcaaacgtgccgacattcggcagggcgaaggtgtcggtgttgatggcgctgtgcgtcttgaacgagttgatcagcacctcgacgatgggcatgacatagagaatgcacacgagcgagaacagcacggtcagcacaatgccgccgatgtcgcgctttttcttacggagcggtttctgcatcactgctgcacctccttcgtgcgggtcgcgcggagctggagcagggccagcgccgccacaaggatgaagaatatcacggcctcggcctgcgcaacgcccttccagctgttgccgatgccgttcgtcttgaagatgtgcagggccagcatttccgtcttatagatgttcgtgccgggaatctgcggcgagccgttcgtcagagcaaggttctgatcgaagagcttgaaggagtttgtcagcgtcaggaacacgcagatcgtgatggacggcatgacattcggaatggtcacatgccacagcgtctgccagcggcccgcaccgtcgatcttcgcggcctcgagcatgtcgtccgggatggcctgcaggcccgcaatgtagatgatcatcatatagccgatctgctgccacgccacaaggatgaccaggccccagaagccgtaggtcgcattcgtgaggagaggctgcagcgaggccgagcggaggaaggcgtcaaaaatgagcttccagatgtagcccagcacgatgccgccgatgaggttcggcatgaagaacaccgtgcggaagatattcgagccgcgcagcttctgcgtcagtgcgtaggccagcgcaaaggcgcatatattaatgataagaatggatacgacggcataggcggccgtgaagccgaaggcacgccggaagccctcgtccgcaaaggcgcggaagtagttggaaaagcctgcccagtgataatcgaccggcgaggtgaactcgcagaacgagcggtacaggcccagcaggaacggatacaggaacccgatgcagaaggccagcgccgtcggcagcagaaacagcggccagcagcgccggatcgggcggcggatcagctcactgttcagcgcctcgcggctgcggggctgacggtttcgttttttcataaaggaccctcccctgaatcgattgcatatacgcttgtcagaggagctcttttctccgggctattgtacaacaaaatttccggaaagaaaagagctgctctgacaaacgccggagggcggcggcccgccgccctccgagactgtcgataatctgcccagccgaaagcttcggagggaagaaaagtgtgaaaggaaaccgtcagggtgtcctttcgcgttcgatcacccgccgcagcggccaaaattgcaaaatagaactgcaagatcattttgcaattttgccacccggcctgacggaaaatcccgcagggactttttcgacaggccgggagggcggcggtctgccgccctccgcaggtttgatggatttggattagccttcctgcagctgatactgcgttgcccagccgtcgacgaaagcggtctcgacgccgctccagtcgccggagccggtgctgtaggccagcagcgcgtccacgacgccctgacgccagctctccacgttcggggtgtagttgaaggcccaggtcacggtgtagttgccctcggacatcaggtggttggcattgttgaagaacacgttcgcgctctccttggccttcttgaaggggatggggccaaactgctcggccatcatcttcgtgccctcgtcagaggtaacgacccacttcatgaagtcgagggtggccttctggtcttcctcggaggccttggcgttcacggcccagcagttctcggtgccgcaggccagaccggccttctcttcgccctcaacgccgcagtagatggggatcatggccagctttgccggatccatggagaagcccatggcggaagcgtcggtcaggttggcgtattcccacgtgccgttctggaagaacacggccttgccgtttgcaaactccgcgcgggactcgtcgccggtcttggcggccagctcggagggagcgcaggtggcgttgttcatgtacagatcccagacgttcttgtagttggcaagatacttaccggtgatcgtggcgggctgctcggtcacgttgtcgtcgcggaactcatagtacagcggcatgttggccagatggccggagaagcgccaggaagaggaggaatccagaccggcggaggagaaggcggcaaagcccagctcgtccttgtgggcggtgatgtcctcggcaacagccttcaggctggcaaagtccttgatctcgtcgagagagtggcctgccttttccagcagctcggtattgacgatgatgccgaaggcctcatagcagtagcctgcgcagtaggtcttgccgtcctcacccttgatgttgaagtcggacgtggtcatctcgttcaggaactccgtgccgtcgagcgcgaggcagtagtccttccaggtgtccagagccgtctcattgccgcactggaacagcgtgggagcgtccttcttggccatttcggcggtcagcgtggtctcataggtgccgctggcagccgtgacgaccttgacggtaacgccggtcttttcggtgtaggtcttggcaagtgcctgccatgcgctgtctgcttccggcttgaagttcaggaaatagacagagcctttgtcgctgctcttgcagccggcgaacaggccgacggcgaggatcagcacgagggtcagagcgatgatctttttcatgatgttgcctcccaattaattttccggtgaattggaaacgtttccaatttcctcatgcacacagtatagaccgctgttttgcagaatgcaatctttattttggacaaaatgaaaagttttcacaaaatgaacaaattgactgcttaataattgtgcaaaaaaccaatagccgggagagaaattttttgaaattccctcttgacgatggcagaggaatatgctattataataacacaaacgataatcattattatttaggagcggatgcgatggcaatacagaaaaagagcagaaagcgcgatgcgattctggcctgcgtctgcagcacggatacgcatcccaccgccgaatgggtctacacgcagctcaagccggatatcccggatctctccctcggaacggtctaccgcaatctggccatgttccggcgcgagggcatcatcgggtccgccggtgtcgtcaatgggctcgagcgttatgaccgcaacccccttccccacgcgcatttcgtgtgcacgcagtgcagcgccgtctatgacctgccggacatcgagccgccggtcgagctgatgcgccgcgtgacctgcgggtgcccgagcacctgcgagctgatgtttaccggcgtctgcaacgactgcatttccccggatgcagggtctaaaattacgatctaaaacaacaaaaacaacatttcaggaggattttattatgaagaagtatgtctgccccgtctgcggttatgtttatgaaggcgatgagctgcccgagggcttcaagtgcccgatctgcggtgtttccggcgagaagttccaggtcgtcgagggcgatctgaagctcgcggccgagcatgaattcggcatcggcacgaagctcgacggcgttcccgaagaggacaagaagttcatcctcgaccagctcaaggccaacttcagcggcgagtgctccgaggtcggcatgtacctctgcatggcccgcatcgcccaccgcgagggctatccggagatcggcctgtactgggagaaggccgcctatgaagaggctgagcacgccgcaaagttcgcagagctccttggcagcgagctcgagccgaacatgaccgccagcacgaaaaagaaccttgcttggcgcgtggagtgcgaattcggcgcaacggccggcaaggtcgagctggccaaggtcgctaagaagaacaacctcgatgccatccatgacaccgtccatgaaatggcccgtgacgaggcccgtcacggcaaggctctcaagggtctgctggagcgctacttcggctgagtatttcccgcaggaggaacggctatgaagtatgtctgcgatgtctgcggctatgtctatgacccggccgtcggcgacccggagaacggcgttgcccccggcacgccgtgggaagaggtcccggaggattggctctgcccgctgtgcgcggtcggtaaggatcagttcagcccggaagcgtaaaaagtcttcggcaggagagaacgcatgttttctcctgccgatttttccgatttgtggaaattgcctatttgcacggacagcgcgctctgtgatatactgacgaaaaaaggaaaggagcaaaagcaatgcatgaatacgaagttctgatcgagaccatcaacccctgcggcggcgaagcgcacagcaaaaaggaattcctggatatcgaggccgaaagccccgaggcctatgtccgcgccgagggccgctggcccgttctggacaccgggaagaacatggacggcgatgtcgtgatcacgaccggcgacggaaagggaaatatgattcgctatacgttcacggagtgaagcgggaaaactgcacgattagcctgcagcggaactcaatgagcgccatgcaggctggcaatttttgtggtattgattttatggcgcaaggcttccaaatttggaagccggtgcggtcggcgaggcggccggaaatttgagagtgccaatggcggtcactacccgtaaagggcacgccgcatccgtaaggcggcaaagccgccaacggctgcgcagtgaccgccgctacagacgcaatcggtgcgtgccgttttatcggcagcctgttcgtgtcggcagcgctgcgccgggagcggtatgccgctcccctacaatggcgtgtgcattcagcggtggtgcatatcatttaacggcagcctgtacaaaccggcagctctaacatagccccatatataccaagcgtccccaccgggtcgaccggcagggacgcttcttattatttttccttggcgtaagctaccacgatgcggcggtgcggctcggagccggtggagaaggtcgtgacctcgggataatcctgcagggcggcatggatgacatggcgctcataggcattcatcggctcgagggtgaagttgcggtggtacttcacggccttgcccgccatcttggcggccagatgctgcagcgcttcctcgcgcttgaggcggtagtcgcccgcgtcgacgctgacgcgcacgcgcgtctcgttgtcgcggttgatggcgtagctcgtcagatactggatggcgtcgagcgtttcgccgcggcggccgatgagcataccgacatcaccgccgaccagctcagcgcggtagccgccctcctccgtgcgataggcatggggcacggcggtggaattcatgtgggtcagcaggccggtgaggaacttctcgatcttttcctccatggagccctcgggggcgggggcatattccttcggcgcggcaggggcgggctgctgcggcttttccgggcgcggggcgcgcggcttttcctgcttcggcgcctgcgggcgctcctgcttctcggggcgggcgggcttttcggcgggcttttcctgctgcttcggggtttcggcgttctgcggcttgcggcgctccggacgcggacggcgctcgcggcgggcaggctgctgctcctccggctcgatcttcctgccggggcgggagatgatgctcgaggtgatctcggggcgctccttcggcttcgagcgggaggcggacgagagcacgctcatcggagcttcgggcttcttgggctcgtccggcacctcataggtcaccttgaccttggcgggcgaagcgccgatgccgaggaaaccggatttcgcattctccagcacctcgacggacacgctgtcgcggtccatgccgagctgctgcagcgccgccgtaacggcaagatcgatcgtcttaccggtcgtgacgataaacttttccatgattattcgttctcctcattcttcgtgtaatgctcggaggaataggcgcggccgcggctgaagggacgctcgggatcgccgctgagcacttcggcagcttcctcgggcgcaagcccggcggcagcgcgctttttggcttcaaaatccttggcagcggcctcgcgcccctggcgctcccggagctgctgcttcttcttgctggtgttctccgtgatgccctcggggttggcggcacggcgggcagcgcggatgcgctccttctccgcctcctcagcggcgcgctgcgcagccttctcgcggcggacgacgtcctctgcgtcatagatcttgcggtagtgcttcgtgaggaacacatcctgcacgatgccgaacagcgactgcgtcagccagtagatcgacaggccgagcgggacgataaagccgaaccagatggacatgagcggcatgaggatattcatcatcttgccggtctgggcagacttggccgcggcctcgtccttctcaccgttggcgttggagataacggagccgttcatcttctggctgatgaacatcgacagatagttcaggccgccggagagcagcgggacgataaagccgccgatatcgctccagcccttggcctgccagaccttccagctcgggatctggccgaggttgatgccgaggaaggaaaaattgatggacgagacgcccatgacggcttcgcgcatggaggcgtcggtgagctgcagagcatatttctgcagatcggcagccgggccatactgccagtagtagccgagcttgctgacctcgacgccctgctccgtggccacgatggtcttgagggcatcgacggtctccgtgttcaggtgcatcaggtagtgcagcggttcacggatgacagtgtacagcggcagaaggaacagcagcggcaggaacgaccacaggcagccgccgtacatgctgacgccctcggacttatagagggccatgacctcctgctgatatttttgcttgtcgtctccgcaggcaagctccagctgcttgagctgcggctgcaggcgggacatcttcatcatgctcttcttgctcttggcgctgaacggcagaaggatcagcttgacaacgaacgagaacagaatgagcgcaaggccgtagttattcaggaatccatagaagaattccagcacatagccaaagggaacgcggataaaatccatgaaaggcctcctcttggccgcgcacggcggccggacggaacgggtgggcggagatccgccgggtgatcacggcacgggatcgtaaaaatcgccgtggttgaaggggttgcaccgcagcaggcgcttgaacgtgagccagccgccccgaagggcgccgtatttttcgatggcctcaaggccatattccgagcaggtcgggatgaaccggcacttgcccggaaaggcgggagagatatacttccgataaaagcggatgagcgccagcaggacgcgcttcattgcgcggcctcctgcatcaggcccgtccgcccggcgagcgtcagaaacgcccgcgtcagctctgcgaaatccgcctccatcgcgcggctgcgcgcgacgatcacgatgtcatagcccggcaggagctccgcctcgtgcaggcggtagacctcgcgcaggcggcggcgcatgcggttgcgctcgacggcgtggccgagcttggcgctgacggtcaggccgaggcggctgtgaccggtgccgttgcgcaggcagtagaccacgagcagacggttgcccgccgtggcgccgcggtgatacaggcggcggaaaacatggttttccttcagagaaacagtatgcagcaagtcggaacctcccggcaaagcaaaagggcgaacagagactgttcgcccttcacgttacaattcaagcagacggtgcggtctcggctcctcaggcggacaggacggctctgccttttgcacgacggcgggcaagaaccttgcggccgtttgcagtagccattctcttgcggaaaccatggacctttgcgcggtgacgctttctgggctgataggtacgcagcatcttcgtgtacacctcctgttagattatgctcaacagccggactccggccgcagcaatcgaaaatcatcatgcgcaggcatggatgcaataagcaagcatggatgcgcaattgatattatatcgcagcacccggtagaaagtcaaccggaagttttgaattttgtacgaaaattccgggcttttctgtgattccgttgcggaacgacctgctccggttactcagcagtctctacaaagcggcatgctcatgcagcgcgggccgccgcggccgcgggacagctctccgctcgggatgcgcagcacctcgatgccgtgctcctcgagcagaccgttggtgacatagttgcggtcataggccacgacgcggccggggctgacgcacagcgtgttcgagccgtcgttccactgctcgcgctgggccgcgatctggtcaccgccgccgcagcgcagcagcgtgacgcgctcaacgccgagtgcagaggccagtgcctcctcgagcggcatgtccagccgccgcgcaacgggcgcgccgccgcggccgggcgtcagctcgaacatctccagctcgtcgagaatggaggggtggatgagaaacttgtccgtgtcgatctgcgtcagcacggtgtccagatgcatgaaggcgcgggtgctggggatatccagcgccagcacgcggcgcacctcgcccgcctcgtcctggaaaatattataggccagccgctcgacggcctccggcatggtgcgctgggagatgccgacggcgatcgtgtcggcgctgaggttcaggatatcgccgccctcgagggtgtacggctcgtccggcgtgtagtaaaacggcaccttgcccgcataatcggggtgatagtgcaggatatagtttccgtagatcgtctcgcggttgcgtgtgacggagtacatgtggtgcagggcgacgccgcggccgatggacgcgaaggggtcgcgcgtgaaatagaggttcgggatcggctcaagcacaaagtgcgtgcggtcgttgcgcagggaggccagcgagtggttctggtgcaggggcagctcgtcgaagcggacgcccgtcatggtcttgcggatgagctcgcgcgtgttggggcaggccagcagaagctccgtgagggcctcgcggtagctggcggccacgcagccgctgctgcggataaagtcctcaacgaagcggcggcgcaggctgtcgctcagggccagcgtctccgcggccagatcggtaagatagacgacctccacgccgctgtcgcgcagcacctgcgcaaagcggtcatgctccgtctgcgcgccgcgcaggtagggaatgtcgtcaaacagaaggcgctccatcgaattggggacgagctgctccagctcccggccggggcgctgcagcaggactttcttcagcgggcggacttcgcttctcacatcaatggccatgcggatcgctcctcttatcaaaaatttttgagtttgcctttgattttgcttagtgtatcacgatttttttcgaaacgcaattctttttctgccgcaattctttccgttctccggatttccatgcaagaaatccaacaaaatgcggataaatttttgcagctcccggcaccgtgtttttccactgttttccaaagtccggtttttccgaaaaaatgcccctcccgcagaatctgggagaggcataaatattctcaaaaatttttttcagaacgaaggcgtgtccagactggcgaaaaacggtacagccgatcatttggaggaaagagcgtgcttggaaccagcttggcgaaaagggccagcggaacaatttcaccaagctgtatggatctcctgttccagttccccaattgcgcttatgactgtctcaaacatcggaacatcaccatagagcatgtccttcattgcttcgtaatctgcggccaatgctgcaaagcgatacttcgggggaaccagtttcaaagtgccgggaacagcctcctgatactttgcccaagacctcggatagaacttcattttgaagtccgccaccgttttcagcaattccacccgggcaaaggcagcctctttcacaggtgtcatagacatgcgatacaggtcatagtaatgccgggaataacgctgcggcatttccaaactctcgggtctgttcgcctcgtggtgtaggatcgttgccttttcccagaaagtccgctccggtgcaacggtcagaacggccgtattcttttgcgcaaagactttcggataataggttgcggcatagggctcgatttgagccgtttttgcgggcgtccaagcggccagcgcaccgatctccaaacgaatgacctgcaaggtagcagaattcgtaaacaggtgcggataggcaaagataacggtctgcttgtccttttcatctatgtaaatgtttgcctcacagccaagttcccaagagagctctgcctgaatggtggggccaaactgctccgcaaggaaaacttccgcccgtgcattggcctctttgttgaacgcatcctgcttggtgttggagcgctttccccatggctcgtccctaccgtatcccagcacccgccagtccaagatcaggtcaatatcttcggaaaagcggctgatcaggttgaaagccttggaaaggctggtgccgcctttgaaggtaatagcatctttccaggggcagcggtggaacagataatccagcgtaaagcatacccaaaaatctttttctacgatggcatcatttaagcccatcttatctgcggtatttcggaacaattcgcgtcggtcactttccggcaagcgggctacatttctcattgtgtgtcgcctccacacattttccgtatcgtatcataaacccagtccgtggcttctgttgcctctttcagacaggcttgcttttcgtcttcggacagcttttcagaaagcgtctgtatgatctccggcgtcacattggccctccccagagttttcagcgcctggatcaccaagctcgtcatgtaagacagaccggtgatttccttgttggtccgatgcttaaattccagcttggtggaattccactcataggtcttatacgggccgtcgctgatataggaccagaccgccgttacctgtgtagagaggcccagcaaattcagggccgtatttccgcatggggcaatggtccagtggtagttccgcgccaatgcctttgcaacagcgtccgggtcggccgctacatattcatgaagcagcttgctgtacttcggcttttcatagacgccttttcgtattctgcggagcataccagcctgtgtcaatctgttcagagttcgtctgaccgtttcctgatcagcaatatccgcgaaatcggagttcacaaaaattgtgccatcgactgcggctccaattctctctcgtatttgctttgagaatccgtttgccacgatgctcgcctcctttttgtcccgaatattatatattattcgggacattttcgcaacagacagacaatgatgctttcagttttcccaattacaaaagcggctataccgggcgatcggcctgcactttatacgagcccgcacaggagcgcttctcccctgtccagaatttcctccgggaaggtgaacgtcggtgcatgcagctcgatgccgccggtgccgaggaagaagaacacgccgggcgcatggcgctgatattccgaaaagtcctccgtgatgcacgtcgtctccgcctcggcgatcgggaagcgctcccgcacctcggccagcagggccgcgtcgttcgtcacgggcggatagccggagctgcacgtcatggtcacggtgcagcccgtctcctcgccgacggcccggccgatggcctgcgcctgctcccagagcgcggcatacagcccgtcgtccaggcagcgcagcgagccctcaagatgcgtgtggtcgctcacggcgttgcgggcgctgccgctttccattttgccgaagcgcagcaggcagggcttgccctcggccagtgcatacagccgtgtcagcagacgggcggcggcgtccagcgcgtcgcagccctcggcaaagcgggccagatggacggaccggcccgtgatctccaccgtcagctcgcacgagcgcgacatcatcgctccggcgcgcgaggcgatgacgcccgcgggcagctccggccagagatgcatgccgaacacgcgcgttacatgataccgctccagcaggcccgtcgcgcagatgggcgcagcgccgcccgtcgtctcctcggcgggctcaaagatcagaaggacgttccgctgaggccggacctctcctgccgccagacggcgcgccagcccgagcaccatggccatatgaccgtcatgcccgcaggcgtgcatgcggcccggatgggcggatgcaaacggcagaccggtccgctccgtcacgggcagagcatccatgtcgctgcggacggcgacggtctcgtcctttccaaggtcaaaataggcgcacacggcgtcctcccacggggccagcagcgtgcagggcatttcggccagcgccccgcgcagataggccgccgtctccggcaggcggcagcctgtctccggaatgcggtgcagcgcgcggcggtcctccgataaggtcttcatggatattcccccttttgccgcattatatcacgcccgccggacaattgcaatgcgcgcccgcctgtggtacaatatacaatatcgataatcacgccagagcgtataataaacagaaaataaacaggcagtcccgcgcgggactgccgtaccaaacggaggaatgaccggaaatgagtgggatctcgggacaggtctgcctgcggcgcggcgagacgcttgccgccggctgctgctggatctatgacaatgaaatcgactgggcggacgacacctgcgaggacggcggccttgtcgaggtgctcgacagccgtatgcgctatcagggcacgggctttttcaaccgccgctccaagatcacggtgcggctcgtctcacgcgagcgcggcgagaccatcgaccgcgcattctgggagcgccgcatccgtgcggcatgggaaaaccggcaggcactgggcttctcgaatgcctgccgcgtcattttcggcgagccggatggcctgcccggtctgacggtggacaaattcggcgactgtctgtcgttccagatcgtctcgctcggtatggagcgcatgcgggatgatattctcgccattctggccgaggtgttccggccgcagtgcatttatgagcgcgacgaccttgccgtgcgcgaaaaggagggcatggagcagcgcaagggctgcgtctacggcgcggtgccgccggagctcatcatccgtgagcacgatgccctcatggccgtagacatcgaaaacggccagaagaccggccacttcctcgaccagcaggaaaaccgcggccatctgcggccatattccgccgggcggacggtgctggacctgtgctgccatacgggcggcttttccatccacgcggcgctgtacggcgcagcccatgtgcaggccgtggacgtttcggagacggcccttgccatggtgcgcgggaacgctgcgcgcaacggcgtggccgaccgtgtcgagaccgtctgcgccaatgtgttcgatctcgtgcggcaggactgcgaggagggcagacagttcggccttgtcatctgcgacccgcccgcctttgccaagagccgcagcgccctcgacggcgcgtatcggggctatcgtgagctgaaccgccgctgcatgcagctgacggagccgggcggcttccttgtgacgtgctcgtgcagccagttcatgacgcagccgctgtttgagcagatgctcacggaggccgcgaagggcgcggggcggcaggtccgcctgctcgagcgcctcctgcagtcgcgcgaccatccggccacgctgggcgaggagcactccatgtatctcaagggctgtatcctgcaggtgctgtgatgatgaaaattcttgtggtagaagacgagcgcctgctggctgattcgctgcagacgctgctgacgggccggggcttttccgtcgatacggcgaacgacggcctgaccggcctggaatatgcaaaaacggacgtctatgatctcgtgatcctcgacgtcatgatgccggggctcgacggctataccgtcgccagccgcctgcgcgcggagcaccatgccgtgcccatcctgatgctgacggcaaagtccgatctcatggaccgcgtggccgggctgaacgccggggcggattattatctgacaaagccgtttgattcccgcgagctgctggcctgcgtcggcgcgctgctgcgcagacagggcgagcaggtcgacgagctgacgttcggcaacacggccctcgacctctcggccgggatgctgcgctgcggcagcaaaagtgtgcgcctgtccgcgcgggaatttgacgtcatgcgcatcctgctgcaggcgaagggcggtaacgtctcgaaggagacgctgctcgagcgcgtctggggctttgactccaacgccgtggagaatcatgtggaggtctacgccggcttcctgcggaaaaagctcgcgagcatcggctcgaacgtccgcatcgaggccatccggcggctgggctatcatctggaggtggcggaggtatgatccggaagctccgcgtcaagctcgtgtgcatcctcatggccctgctgaccgtgatgctgggcgtcacgttcggccttgtgctgcattttacgcagcagagccttgaggccgagagcctgcgcacgctcgaggcgctggcaaacaactggcagacggcctccagccccggtttggacgacggcacgcgcgtgccgtatttcgcgctggagatcaatgcgcgcggcgacatcatcacgacgcgcggcggctattttgacctgagcgaccgcgaaaagctgcagaagctcatcgacatcgccgtgaattccgaggacgacatcggtgaggtgccggattacggcctgcggttctaccgcgtcgtcacgcgcacgagctggcgcgtcgtttttgccgatacctcagccgagacgacgacgctgcacagcctcatccgcacgctggccattgcgagcgcggcggctcttgcggtgttcttcgtcatgagcctgctgctggcacgctggctggtgcggcccgttgccagggcgtgggaccagcagcggcagttcgtggcggacgcctcgcatgagctgaaaacgcccctgaccgtcattctgacgaatgcagagctgctgcaggcgccgggctacgacgccccggcccgctcccgctttgccgggagcatcctcacgatgtcgcagcagatgcgcggccttgtggagagcctgctggagctggcccgcgtggatgccgggcgcgcgcaggatgcgcagacggagctggacctgagcgccctcgtgaacgacgccctgctgccgttcgagccggtgctgttcgaggccgggcacacgctgacggcccgcgtggaggacggtatccgtgtgcgcggcaatgccgcacagctgcggcaggtcgtggagatcctgctggacaacgcccgcaaatacgcccagccgggcggctgggtgctgctgacgcttgcgcggcagggcgggcggcactgcgtgctgtccgtcgcggaccccggcgcgccgctgaccccgcaggagtgccgcgatatcttcaagcgcttttaccgcgtcgattccgcccgcgccatgaaccacagctacggcctgggccttgccatcgccgcccgtatcgccgaagcgcaccgcgggcgcatctgggccgagagcagcggcggcatcaacacgttctattttacaatgccgatataatgctttggtgatagcccccgatttgtcattgcgaggctccgcaggagccgtggcaatctcgcagtacctggccggagcataggaaagccccggcgaactcgttgctgccaacttgagattgccgcgtcgcttcgctcctcgcaatgacacgggaaggaggcgctgccaagtttgtcattgcgaggctccgcaggagccgtggcaatctcgggaaggcacttgcaattcgtacaggctgccgttaaaaacgtaaaagccgattgcgtctgtagcggcggtcagtgaccgcctttggcagcagcaaatttgtgcgtactgtcgccgaccgcacacgccgttgtaggggagtggacagccggccccggcgcaatgctgccgatctgaacagcctatcgttataatggtgaatgctcccgacgtgtcattgcgaggagcgaagcgacgtggcaatctcgcagaacacggccggacaacagggaagccatcggcgaaatcgcaactgcctgcatgagattgccacggccccgttggggcctcgcaatgacaaacctgggtgccttgcgccatagaagcaatgcccgcaaatacagcaagctccccggcggacaccggggagctgtttttgcgctatgttacttttccttcggggcctcggtggcgatctcgatgaggctgtcgtccgccttattgaggacggccgtgcccttctcgccgacggtgaggatgccctcgtatttctcgcccttggcgacggagtttttgagcgtccacagcacggcgggatcgtcgacctcgcccgtgatggtgtaggtcgtgaacgtgacggtctcttcgtcgtggaaggctgtcttcgtgaccacgttcacaaggacaagcgtgttgtcgtccacgccgagataatcagccagcttgtggttcagcgcggcgcgctcgtcgctttcgagcgaggtggcgtgattgcgcgtgttgtagtcataccatgcatagcccgccgtagcgcacgagccgacgatcagcagcgccagcaggaaggcgacgaggcggccggtgatcttcagcttcttcggcggctcatacgtcagcttcatgcggtaggtcagcggggtgataacgttcaggaacaggatgagaagcagcgactcgatcgggaagagcacgaggttcttgcagatgcgcggcaggtcaaagatcgcataggacttgccaaggaccatctggtaatacagcagcatgatcggcgtctggatgacgatgttcacgaagaagctcacgcagaagcgggagagcgtcacgcgaaggttcgtcagcggcgcacggtacaggaacagagcaaagataagggaaccggcgatctccgtgaagatgaacgggaagaagtacacgccggtcgggaacaggatacagccaagcgtatcactgatggccgccgcaatgatagcaacgaccgggccgaagatcatcgcgccgagcgcattgacgaaaaagccgaggttgatcatcagcgtcgggggcgcaatcggaatggcgacggacttcagcgccacgcggacggcgatgaggatggccgcgacggcgagcatgcggaccttgccgagctcacgggcagcgtcacgccagtaggccttggaaaacggcgaggcatacaggccgggagcgagcactttcttttcagcagccatgcccgatccctcctctccggaatgacggacgggcggccgcgcgcaggccgcaggtgaacagcttggttgacataaaaaattcctccttacggaatgagagcgtgcggacgcaccccattgcgcaggggggtaaaaaaagatccgccactctccggagcgtggcgaatgcaccctccgataaaatggaggaggttcaatatgcgatgctatccccggaatgcacggggatcttgctcaggcggttgcggtaaccgtatcgcggagccaaagctccttcgcccggcggcaacctcccatccgaccggtacttaacgcacagttcctactccctgcagcatcgttttatggatattattgtatcgatttttttcgaaaaagcaagccccaattttgcaaatagcggaaaatttttccgcggcatatgccgcgcggcgctcacagccgcgcggcaagggcattggacagggcggcgaagccctcgaggccgagcgtttcgccgcggacattggcaggcagaccgcatgcggccagcacgtcggtcagctccgccttcgtcagctgcggaaagccggaggccagcccgttgacgagcgtcttgcggcgctgggcaaagctggcgcgcaccgtgcggaagaacagcacctcgtcgcggatgtccgcgggcgcgggccgcgtgcgcaggcagacgacggcgctcgtcaccttcggctgcgggatgaagcacgaggccgggacgtcaaacagcagctccggcgcggcgtggtactggcagaggatggagaacgcggagtagtccgccgttccgggcgcggcgcagatgcggcgcgcgacctccttctgcaccatgacggtcacggcggagaagcagcggctctccagcaggcgcgtcaggaccggagacgtgatataatacggcaggttggcacaggcggcgggcgtcaggccggggaattccgcctgcacaagggccggaaggtccattttcatggcgtcggcaaagtgaatggtgaggttgtcgaactcgccgacggtttccgccagcacggggcggagcgtcgtgtccagctcgatggccgtcacacgcccggcacggagacacagctcctgcgtcagcgggccgaagccggggccgatctccagcacaccggtcgagcagtcgatgccggcctcctgcgcgatgcgctgcggcacccaccgctgcgtcaggaaattctgccccttcgctttggaaaaatgaaatccgtatttctcaagcagcgcgcggatcacgcgcggatcgcacacatccagcatggcaaacgcccccttttcctgcccattgtagcagaaccgccgccggtttgcaactgcgaatccatgggcggcgtcaggcagggacgggcgtgtgcaggggaaaaatggaaagtgggaagttatgccagatcgccggtcgtgcattgtgggggagcggacagccgggtccggcgcaatgctgccgatctgaacaggccactgttaaaatggtatgcaccgattgcgtctgtagcggcggtcactgcgcagccgttggcggctttgccgccttacggatgcggcgtgccccttgcgggtagtgaccgccttgtggaggacaattcaacggcagaagagcgctggtgtaccgctgcacccgcctgacgtgccattgcgaggccccgaaggggccgtggcgccctgagcgcgaagcgcgaggaagtgcccttggggtgcaatctcgggaaggcagctgcgatttcgccgatggttttcctattattcggcatgtgccgcgagattgccacgtcggcctccggcctcctcgcaatgacaaatctgggggccttgcgccagaagcaatgcagcgcatgctgcaagcctccatggcgctctccgagcgcccctaaaaatacggaagccgccccgttgttgaggcggctcccgacgatctcgggtgagatagacaaagggcagagctccgcgtggaagttctgccctttgcatgctgcgttcccacaacgtcccggatgcccacttccgttcggccgtgtcgcgcatggcaggaataaataaagtgcataacactttatgacagactccaccacttatttcctgcaagcgtattatatgatgggcggcctgtcctgtcaatgcgcagattgcatagaaaattctgtgcaaaccaaccagctttctctgcaaaattttacaaaatcatggatgttttccacaaaattaaccaatgctacatgaaaaaggaatgcaaaatacgccctaaattacaatatctctgtagcaaacttgacgaagacggtatgtcaaatcgaataaaaaatgcgccgccgaagcagcgcattttttagggaagctctgatcagaagccctgcagggcctgacggaccttttgggtcagccgaacagatcgccgagaccggacagaacgtcgttgatgtcgtaggaatagcaggcgtgcaggaaccagtcgcgcaggccgctcacaacatagtagccggcgatgcagaacgcaacgcacagcaaaatggttacaaggttcagctttaccccgtagacctgcagcagtgtgccgacggtgacgacggcccacacggcaaacgacgcgacgccgagcagggagatgaggccggggtacacgagcagcagtacgatggagccggcggccagcgttgcggggaacgtcatgccgaggccggaggaggcgagcattcccttaaaatcggacgggaccttcgtcaccttcgtcagaacgagcgtggccagcagcgtgaggccgaagccggcgacgggcatgagcaggctcgcgccgagccatgcaacggccggaaaatgggagtccaggcgcagcgcatacacgagcgtggcaaagaacacggcgatgtacgtcacggcggccatcaggatgccgctgaggaagtcgtgcttttccacggccttgcgcgtcgtgccgatggggtccttgcagtagctcagccacagctggggaaggcccttgatcgcaaggccgaacgcgctcggctccttcggagcctgcggctgctgatactggggctgctggggctgctggggctgctggggctgctggggctgctggggctgctgcgtgcaggggcagatgccgctctccggcagagggcggccgcagcgtgtgcaaaatcctgccataatggatgatcctccttcaattctgcggttctctgcccgcagtgattcacttttattatacgcataaggcacgggactgtcaacctgcctttggggtacttcggcacaagctgcaaaaattgcatcaaaattcgcgaaaattgtcacactgccgtgatgaattccttgcaaagcctaggttcgtatggtataatagcaatcggtgaaaaatctttcacacagacttcatcatatcttgatttggaggttatcccatgcccacgaagaaacccctgatcggtgcagcgatcgtcggtcagtccggcggtccctcttccgtgatcaacgccagtgcctacggcgtgatcaaaaccgccctcgaggatgagaacatcaccaaggtctatggtgccgagcacggcatcgtcggcgttctggaagatcggctcatgattatggacgaagaggatcccgcagagcttgagcgcctgctctatacgccgtcctccgccctcggctcctgccgctacaagatcgccgatccgtccgacaacgacaaggactataagcgcattcttgagatctttgaaaagtacaacgtccgctacttcttctacatcggcggcaacgactccatggacacctgcgccaagatcagccgttatatggccaaggtcggctatgagtgccgcgtcatcggcgtgccgaagaccatcgacaacgacctcatcggcacggatcactgcccgggctttgcctctgccgccaagtatatcgcgacctctgttatggaagttgcccgtgactgccgcgtttacaacaagggcatgatcacgatcatcgagtgcatgggccgccatgcaggctggctgaccgccgccaccgtcctgcccgccgccaagggcgacggcccggacctcatctatctccccgaggtcgattttgacatggccgacttcctcgatgacgtcatccgcgtctatgagggccagggccagtgccttgtcgctgtctccgagggcattcactactccgacggcgcgttcgtctccgaggccaagacctcctcgaccgacggcttcggccatgcccagctgggcggcctggcccatcgtctggccggcatcgtctccgctgccaccggcgcgaaggttcgcggcatcgagctgtccctgctgcagcgctgcgccgcccactgcgcctccgcgacggatatcgaggaagccttccagtgcggcaaggtcgccgtcgagtctgcgctccgcggtgagaccggcaagatggtcggcatggtctgcaagcgcgacggcggctacagcgtctcctatgagctgttcgacctgcgccgtgttgccaacgccgagaagaagatcccgctcgagtggatcaccagcgacaacgcctatgttaccgacgccttcatcgattactgcacgccgctgctcgagggccagacggctctgggctatgaggacggcctgccccgcttcgcccgcctgaagaaggtcttcgcgaagtaaataattgattgtgattgattgtgattgattgtgtttgaaaaactaccggaagcctgtgcttccggtagtttcagactgttaaagaaacctgcctagccgaaagtctcggagggaaggaaagtgtgaaaggaaaccgtcagggtttcctttcgcgttccataacccgccgcagcggcagaattgcaaaatcatactacagaaattgattttgcaattctgaaagcagcttggcgaaaaagcccaaagggacttttttgacaagctgaaattaccggaagcctgtgcttccggtatttttttgcgcagaaaacgcgaaatggccccgatgggaaatgcagcggcgttccctgagcacctcgcggagggcaattcaaccgcgcaagtgcactggtgcaccgcgcgctctcctgacgtgtcattgcgaggagcgaagcgacgtggcaatctcgcagaacacggccggacaactgggaagccatcggcaaaatcgcaactgccttcccgagattgccacgtcggcctgcggcctcctcgcaatgacaaatttgggggctgatgccattttaacgccagcctgtaccagccggaagttttgcgccgggcccggctgtccgctcccctactatggcgggtgcggtcggcgggagtaccgcaaaacctccagcctgcatggcactcagggaacgccgctgcagacaccggcccggcggggatgccgccgggccggaacctatgttttttgattatttaacaatgatcttcccgtcggcgaagtccgtgatcacgcagccgcctgccgggaactggtaggtatccttcaggtctcttaaatgcagtataacttcaccgggactttcggagacgatccggagcgtattgtcctgccagtacacctgcaggtcgctcccctgcccgccggtcaggtcgtaatagaactcgtctatgctcggaaagaccgcttgcttaaaatgtcctcttgcattgtatgaggttactttgcccttcagacggaagccggtcgttgtcagctccagccactgatcatcggtctcgcttttcagcttgagcaagacaaaaacctcatcggactccacccgcatcgaggcgttttccaccgtgacttcaaaacgcagctttcccgtatcagggatctgatagctcggtatcgttgccgaaacacctgccagccatgtgctctcttccaggatctccattgtggaatctgccgttaccggcgaagcatcctttgtatgatatgcatcatcatatacaacatgcaggtattcccctgcctcattgtatagccagccgggaatgtagcaaggcgatacccaaatatttgtcataggctccaatttctgctttgtgcagccgaataagagcgaggaaatcactattacaattacaataaaaattgctgttcctttgcgccttgtcaagttattcaccctcctttgggagcttctccgtgattctgggactcccgttcatcaatcccgcaatgtacaaagagctttcctcctgttttacagcctgctgcacaaaggaacaatccgctgatgacacgacagagacttctgccctttgcgatgtaagcaattcgaccgattgcgccagtgctgacaacgcaacagtgtcctctcccgttcccgaagcaacaacatagaagggacttgcacaaccgcaggagctgcttgcacggtagtccatgttcttcccgtcaattgacagctgtgtttcagttgcacgaatactgttgattcctgtcccgcgtacattggcaaagatgctctgccctacaatttcaaatccgacatacggggaatcagtctgcaaatcgaaagaggcactgtcccgaaccttcaggacgagtgttgcgggggcttctgttcctttcaaaatagtattaacgttcaggacttccatatcgccgtctatgccgtctgtaccgaccttcagatactgaccttcagcatttgtgattgtgctgtttccaatcaggtcgacatacaaatatgctgtgttttcggtctcccctcgcagttcagcaaccgaatatggagatgcattggaatcgccgtccaagtcgaggcagttgaaatagtaatagtttttaaagtatgttactacttcggccacaatagtagttgtaaggttattggcgtccgtggagtcaaatacgcagctcgtataatcctttgagattctgagtcttgcggcattcaaattattggggtcatatgccttaaagatatagtagtttccttcttctgtcggggtaccataaaccagaattgaatgaccaatccctgcgggctctttattgacatacttcttagagtagtaaagcccaactaatgtaagctgactctttctctgatgatctacaagtgcctttaaactagttgtattagtagttccatagggaagctcaacgctccagttaacccaccccgcttctccgttacgcggccatacccatatcccaccgccggtgctggggttgaatttagatgtaattttttgtgataagaagtaataatcaattccgctttcagcaagagagatgtatgttttgcgttgcagatcaagtaccgatttatgatgtgcattggctacatttttgggggctggaatatcccaaatatcattgcaatcataaacaaaagctccatcaaagtctatttttccgagcttgtccatcagcatgctcatggtcatcccataacacacaccgtcccaaggatataaggcagcgaattcagccagttcattttgttctaatgggtcgcttattagattatataatttattataatgtgattgcgatatcattatgcgattgatgtctctatcgccagacctgaaattcgcggcggtattcgtaaagcggaacgagtcttttccgtgccggatgccccaaatattcgtcccatagcggcacagccacagggcaagctcccggcggtacacataggacttcggatacagcttgttgtttgcagagctatccggatagacgatgccgttgctgaccgcccagcggaaggaagccacggcataactgtcgatttgggaatagtcgccgcagtaggtgatggaatagtgatagtaagcggttcgtttctcaaagttcttcagataacgcaggaaaaaggtcagggcctgctctcgtgttaccatgctgttcggttcgaacgtggtcgtggtaacgccattggcaataccgtactgcaccgaccagcggaccgccgcgtaaaaccagtcggtggacgagacgtccgtgaaggatacgctggcactgctggaggggctgcccgccatgcgatacagcgtcgtcacgaccattgcgcggctgacgaacgagttcggttcaaactgtgtggacgaggtcccgttcatcaggccattatctgttacatagttgatcgcgtcaaagtaatccggaaaagcagaacgagtcacatcggaataggccgaggccagcggtacggtgagagaaaccaacagcgcagcgagcaaaagaatgctgcaaagacgagccaaacggtgttttttcatgtctcttcttcctttcgtatattctactttctatggcgacagaacagctcattccggggactcccttccttcctcggtaagtccagcatatcaccccttaacttttttgtcaatatttttacagaaaacatcccgtaattttcaataatatgcagtgcggtaaatggaaaaagtcccggcgggagttccgtcgggacgatgtgcgaagaattttcgaattcgccaaggctatcctgtcatccagccgggtgcttcgagcttgccacggtccctttggggccccgcaatggcaaatccggggacttcattcccgcagggtgccgccgttgttccacacggccgtcgagcagagatagagcacgtccgtcgcgtcggacaggtctgcatagtccgtcagccgggcggcagagatatagcgcaggtccacgagcgtgatgcgctcgaatgagccgagcagcagcggcgcgagcgacgagccgaacgagtcgcggaacagcacgaggtgccgcccgttgtgcacgttgggcgacgtgacggtcagaaccgcctgcgcgccggagaggaagacgtcgtagccgtccgtcccgtccagcagctccggccggtagaccggctgcgccccgtccagctccgggccggtgacctcggcggccttcgtgtcggcgctttcgaggtacgtcagcgtatccggggccatcggcagggccgcctgcccgtaatacgcgccgtaaaacggagagagcgttttttccgtgaaggttcccggcgcgtccgcgcccagcgcttcacagatggccgctgcgacggggagcagccgctcctgccgccagtgggggtccgttttgtaatagtcgtctgcggacagcaggtcccagatgtcgatctccgtcataccgggcagggcctcgcgcacgatgccgtgcagcgcctccgtgtccagccggggacggctggtctccgctttggcatttttatccggtacgatgacatagtgcggcggaagcgacgggaaataggtttcctgcacggcggaaaagaccgctgcggcatggcgcacctgcttttcctgcagcgggccgtccatgcggaaggccccgccgccctgcagatagatgctgtggatatccgcctgcccgaggccgtagagccgcacgaggctgttgaccgtgcgcagctgctcacgcagcgggaactggtcaagcatatattcctcaagcttgtccgaaaagccggaagacaggggaggaagctgcgccagccgccgccgctcactgcgggatacttcccggtccggcagggcgagatgcagcagggaaaagccgaacagcaccgcgaggaacacggccgccgtggcgatggatgctttgcgtttcatggctcacctcagaagcggaaatagaggaagggattgaacgagccgtccacgagcgcggccgttgcagcaaggagcagcaggcccgtcagcaccggtccgagcgcggctgagacggggtgcggctccagccgcttccacagccacttcggcagccgcgtcgcgccgacgactccgaggacgagcacgcctgcaaagctgcgcagggcatacagcgcgtccgcgtcccacagcggcgcgccgccgaacatggcccggagcgtctgcccacaggcctgcaggctctcggcgcggaacagaacgaagccgagcgtcacgagcaggagcagcagcgcatgctgcacggcagcgggcgcacgggccagccgttttccgagccagagccgttctgtcagtaggagcagaccgaaatagccgccccacagcacaaaattccacgccgcgccgtgccacaggcccgtcagcagccagacgacggcaacattgcggatccatttggcgcgggtcgtgcggctgccgcccagcgggatatagacatagtcccggaaccactgcccgagcgtctgatgccagcgccgccagaagtccgtcacggagcgggcaagatacggatagtcgaaattctccgggaacgtgaagccgaacatccgcccgaggccgatggccatgtcgctgtagcccgaaaagtcaaaataaatctgcagcagataacccacggccccaagccacgcgccgagcaccgttgcgttcccggctgaggacaccagctcacccagcacattggcaagcaggacctttttgcccagaccgacggtaaagcgccgcgcgcccgcgccgatgtcctcgaggcagaagcgccgcgtgtgcagctcggcctcgatatcggaatagcggacgatcggcccggcaatgagctgcgggaacaggcagacaaacgtggcgaacgtcgcgaggttccgctgcggccggacgtgcccgcggtagacgtcgatggtgtagctcatggtctggaacgtataaaagctgatgccaagcggcaggcgcacgcctgtcagcggcagggaaaggccgaacaggccgttcaccgtcgtcaggaagaagtcggcgtatttgaaaaagccgagcagcccgagattcagaaggacggagaccgccagcgccagctttgctgtccgcgtgccgcgccgccgctcgatgcacaggctgagcgcccagttcgaaacggacgagagcagcagcaggagcacatacacaggctcgccgaacgcatagaacagcaggcttgcgatcagcagaacggcattccgcccacgctgcggcgcgagagcgtagaccgcgagcgtgagcggaagaaaggcatagaggaataccgcgccagagaataccatctcagctccagagcgcgttgaagttggcggtgagggcgtcggtcacgtcgctccaggacatgacgagcagcacggtgcagttgtgcacgagcacggccgtcttttcggcctcgacgcatacccacttggccgggttcaggttggcctccacgtcggcggcgagcttcttggccgtctcggcatcctgcgcgcgcatgagcacgacggagtgcgccacagcgttgatgagcgcgtcggcagcaatggcctcgacgccgtcgggcattgcggtgaaggcgaagtattcgaagttgtccttcgtcagctccgtggtctcagtgtccggcaggtcggcgacgtccttcgtgatggaggtgaggatgtcctgcagcgtcattgtgtcgccaggcttcgcgttcggctcggcgggggagcctgcgcaggcggcaaggccgaaaacaagcaggacggcaaggagcagtgcggtcagttttttcatgttcatgatttcctttcaaaaatggaatacggctattagacggcgcaattctctgcaggttccataaaaatttcccggtggggaataacctccccaccgggaccggattttatgcgcgcccggaatatacgcgctcggccatcagggcagcctcctcgcgcgtggcgtagccgccggggcgcgtgccgtccgtgatgccgtgcgccatggcgcgggccagctcctcctgcgcccagctgctcgccttgctgcccgttccctccagaacggtgcggatgcgcgcatcgatgcgggcgtcaagctcctgcagtgtcaaatcctccgcctccttttccgacgacctgcgcagcagcgcggccgtctcccgccgaaaatcgtccatgcttttcccaaaccgcgggaaccagtgcgccacgtcgccgtgggcactggcaatgccgcggcgattgccctccgcgtggtcgagcacaacgccgtctgccagcgggtccagcccgaaccggcggcagagataggccgtcagctcgacggcttcgcggtacaccgccgtaaaataggcccggtcgtccagtccgtcctcgcaaatttcaaaggccaggtgcgtccggttgccggaccggccgcagtgccaggcctgcacctcccacggcagcgtctgatagaccgcgatgcctccgccggcctttttgcccagaaatgcgtggacgcacaccggaagtcccggccggttccagtcattgtcatagcggtttttgcccaattcgccgtcatccggctgcacatagcggcgcagatatggattgttcgcgcccgtggagtgcaccatgacgccgcgcgggacgagcggtgtgccgcggcggcagcagtcgtttcgcgtgaggatgtattcatgcagctccatgctttcgcctcccttcgcgccagcttatgccgaagcccggcgcgcggttcctgaattttctgtgaattttacgcccgccgtgtgcgctgcgcttgcaatccgtccccacgattcgctatactataataaatagagtagcgatgtacctgaaggaggccccggaatgggagaagcattcatccgttttgaaaatgtggaaaaaatttacggctccggtgagggcgcggtccgtgccctgcacgatgcgagctttacgatcggaaaaggcgagatctgcgtcatcgtcggcccgtccggcgcgggcaagacgacgcttctgaacatcctcggcggcatggataccctgacgagcggccgcgtctttctgaacgaccgcgaggtctcggcctttgaccgccgccagcttgcggactaccggcgccgcgacatcggcttcgtgttccagttttacaaccttatcccgaatctgacggcgctggagaacgtggagcttgcctcgcagatcgtccgcgactctctgcccgcgccgcaagtgctcacggacgtcggcctcggcgaacgcatgaggaattttccggcccagctctccggcggcgagcagcagcgcgtggccatcgcccgcgcgctggcaaaaaagccgagtctgctgctgtgcgacgagccgaccggcgcgctggactatgccacgggcaagcagattctcgccctgctgcaggatcagagccggaagaacggtatgaccgtcgtcatcatcacgcataactccgcgcttactgccatggccgaccgcgtcatcggcatccgcaacggcaccgtggcctatgcccacctgaatgagcacgtcacgccggtggaggagatcgaatggtaacgggcagcgcctggcggaagaacaatcgccgcgagctgcgccattcactcgggcggtttctggccatcgtcgccatcgttgccctcggcgtcggtttttttgcgggcctgaaggtcgcgcagcccgccatgctccgcaccggatcgcagtatgtgcagaaaacggagttgtttgactaccgtcttgtcagcacgctcggcctgacgcaggaggacgccgattattttgccgggctggacggcgtgcgggctgccgagggcgcgcggagcgtcgacctcacggccgagtttgaagacgagggcatgacgctcaaggctctgacgctctccgatgcggtcaaccgccccagcctgacggccgggcgcatgccggagcgtgcggacgagtgccttgccgatgccgaccgcttcacggaggccgacctcggcaaaacgctcacggtgcaggccgcgtccgtgaacgatgcgttcacgcagacggccttcaccatcgtcggccttgcggaaacaccgctgtatctcggcgcggagcgcggtacgacgagcctcggcggcggcacactgaacggcttcgtgctgctgcagcctgaggcgtttgccatggactattttacggaaatttacctgctgctggacggcacgcagggcacggacctctattccgatgcctacgacgccgccgtcgacgccgtgcgccccgcgctgaccgccgcgctgaaggagcgcgcgcagaagcgctatgacgacatcatcgacgaggcgcgcgatgcgctttccaaggcgcagaaggaatatgacgacggccttgcggaatatcaggagcggcgcgcgcagaccgagcaggagcttgctgacgcccgcacgcagctcgacgacggcgcgcagcagctggaatacaaccgtgcccgcctcacgcaggcagaatcccagctggccagcggcgaaaaggagctggaggccgggcagaaggagtatgacgaaggccttgccgccttcacacaggcaaagcaggacgcgctcgaccagcttgatgccgcacaggcccagatcgacgccgcgcagaagcagctcgatgacagcggcatcctcgtgcagtatgaggccctgcagatcacgcgccgccagctcaccgagcgccttgccttgcaggagccgggcagcgccgaggccctgctgacgcagggactgatcgaagcgacggatctgctgctgcgccagtttgagcagagcgaggcctatcagggctatctgcagctgcagcaggcgcaggcggagctggatgcaaagcgcagcgaggccatgcagacactgaatgaaaaacaagcggagctcgatgcggccaagcagaagctcgaggacggcaaaaagcagctcgagagcagccgcagcgagatcgcagcgggctgggccgccgtgaacgccgcgcaggctgagctggagcagggcgaggccgactatgccgccggaaaggccgaggcggaaaagcagttcgccgatgccgaggcgaagcttaaagacggcaggcagcagctcgaggacgcacaggtcgaggtcgacaagcttgagcacccgaagagctatgtgcttgaccgcagcacgaacacgggctatgtctcgtttgagaacgacagctccatcgtcgcgggcgtcgcgaaggtgtttccactgttcttcttcgccgtggcggctctcgtgtgcatcacgaccatgacgcgcatgatcgatgagcagcgcacgcagatcggtacgctcaaggccctcggctacagcgacggcaccatcgcatggaaatatatgtcctattccggcggcgcggcgctgctgggctgcgcgcttggctttgccctcggcacatggatcttcccactgttcatctggatgggctattccatgctatatgactttgcgcccatcgtctatgtgttcgacggctggctgctcatcatctccgttctggcggcgctggcctgctcggcaggcgtgacgtggctttcctgccatgcggagctgcgcgagaaccccgcgaatctcatgcgcccgaagaccccgaaggccggcaagcgcatcctgctcgagtatatcccgttcgtatggaaccgcctgtccttcctgcacaaggtctccatccgcaatatcgtgcgctataaaaagcgcctgtttatgatgctgctgggcgtcggcggctgcacggccctcattgttgcgggcctcggcctgcgcgattccatctccaccgtcgtggacgatcagttccggggcgtcacgcactatcagatcgccgtcacgttcgtctcgcccatggacgaggcgcagcagcaggccttccgcgaaaaatatgcggacgagatgacgcagtgcatttttgtgcacgctgcggcctatgaggcgcgcacgtccagcggcatcaacaaggtcaacgtcattgcgacggacgaccccgccatcacgcaggccatcgacctgcatgagaacggcaggaccgtcacctggccgcagcagggcgcgctgctcgacgccgcgctggcgcgggataccggggtctccgtgggcgagacgctcccggtctccgtggacgacacgacgagcgtcgatctccccgtcgccgggacgttcgagaattatgtctaccactatgcctacatgacggcggaggcctacagggatctgttcggcgcagactgcgaatatagcacggcctacatcctcacggacggcgatgcctacgctctcggcgcggcgctgtcatccaactcccgcgtcgcgtccgtcacggtctccgaggccctgcaggacattgtggacaacaccatgaagagcctggactacatcgtcggcctcgtcgtggtctgcgcctgcgcgctggcgctcgtcgtgctctttaacctctgcaacatcagcatcacggagcgcgtgcgcgagatcgccacggtgaaggtcctgggcttctaccaccgcgagacgctgaactatgtcttccgcgaaattctgctcctgacattctgcggcgcgctcgtcggcctgccggcgggctgggcgctgcaccggttcatcatgcagaatatccgcatcagccttgtctcgttccacatccacgtcacaccgctgagctatgcgctggccttcgccgccacgctgctgctggccgtggccgtgtgcctgtgtctcatccgcaagatcgaccgcatctccatggccgagtccctcaaatccatcgagtgagaaaaaccgcgctgccggaaatgaaccggcagcgcggtacagactgtcaaaaacctgcttagccgaaagtttcggagggaaggaaagtgtgaaaggaaaccgtcagggtttcctttcgcgttccatcacccgccgcagcggcagaattgcaaaataagatacaacaaaattctattttgcaattctgaaagcagcttggcgaaaaagcccaaagggacttttttgacaagatgaaccgcgctgccggaagcaatccggcagcgcggtgattttagaataaacaagagaaacaataattgtcgggagcggcgattcgtacacactgccgataaaatggtatgcaccaattgcgtccgtagcggcgctcactgcgcagccgttggcggctttgccgccttacggatgcggcatgccctttacgggcagtgagcgcctaaggcagctgcgggtattgcagtggtgattcggcggcgcaaggctatcagaattgtcattccgaggagcgaagcgacgtgggaatctcgcagaacccggtcggatcacagggtacttctggcgaaaacgtaactgccttcccgagattgccacgtcggccttcggcctcctcgcaatgacaaatctggaggcttcacgccatagaatccatgcggcacatgctgccagcctgcaaggcgctcgctgagcaccgctgcagacgcaatcggtgcacatcgttaattgtcagccggtgcgcaggggtggcttcctaacctagccttcctccccacgcaggttggcgaagaaggcgctgcgggcggcgctgcggtagctgcggctgatggggacgcggaggccaccggtcaggacgaactcgtccttctccatggcggtgatgtgcgaaaaattcgcccagtagctctggtggcagcgcaggaagattccgtccgggacggcttccagcagggcggcgggcgctgcggtgaccagctcctcgccgtccgtcagcaccacgcgcgttttgcgcaggatgcgctcgaggaagagcacgtccgtgaccggcacattgcagtagccgtgcgccgtggccagctgcaggctggcaggcgcggccgtctcggccagcgcggcgcgcagggcgctgccgatgcgccggtccagctcacttttcagaacaaaatagacatggcgcgtctcatagacatccggcgcataggagagataggccgtcaggaagatgatggcgcagccgggaacgagcgcattgagcctttttgccagctcgatgccgtccatgcccgccatgcggatatccagcacggccacgcgcggggcatagccctgctgcgtcacggcggccagcagggcaagcggggtctcgaagcagcgggtgaccgcctgcgcctcacagcgccggatggcggcctgcgtctgccgcgcatgcaggagctcgtcgtcacagatcgcaatggggatcatgccgccgcccccttcagaagaaggctggccgtgcattcgccgccggacggcgtgagcgcatagctgccctcataggtttccgccagcgcgcggaggatgtgcgagccgatgccgcgctccagctccgggatgcggcggctgtgccgtgcgggcgcggccggggccgggttgcggacctcgatacacaggaagccgcggtccatgcgggccgagagagaaagacgcttctctccggcgtcgcggcaggcctcggcggcgttgtcgaggaggtttccgaaggcgacgaccatgtcggcgttgcggatgcccgtctccgcggggatgcagacctgcagctgcagggtatagccctgcgcgcgcagctcctccgtgcgggagtagaggaaggcgtcgacaacggggttctcgcacgcgccgagatcggagcggaagcggcaggcctccgtgacctcggcggaataggcggctgcctcgtcatactgcccctcctgcagcaggagctgcatggtataaagatggctggaaatgtcgtggcggatgcggcggagattctcatactgcgccgtgagggcggcatagtgctcgttctgccggtcgatctggcgggcgagcaggtcgttgcgcgccttcagctcgcttcgctgggccatgccgcggatggcggtgaagagcagggcgtcggccgccgtgcagatggccagcgccagcagcagcatcagcacgcggcgcaggatgaagtccgtgcgcaggaagatcacccacccgtagatcagcagatactggctggcgggaaaggcgaggtacagcgcccattcgcggccggacaggcggttctggtagcggttcatcagcagcgtgaacaggaacatcagaaggccgtccgtcgagaggaagatggcgtagaccgccagctgcacggagatgggctggaacgtcaggccctgccggagctgctccggcgtcagcagccacgagacggacagcaggtccgagccggccatggcgaccagtccggcgaaggcgcacaggagagatttataccacttgtcacggaacaggacgatgggtgtgagcgggaaggtgacgaggccgaagagcatccgctcggcgtcggcgtagggcatgaacttcgtcgggataatgtacagcagatagccgaccgtgaggccgagcagcgtaaaaggccacgaaaagcggcgcgtgagcacgcggcagtacatcactgcgaggatgaggtaaaaaatggtattggcggcaagcgacaggggcgtcaggcgcatcatggggcatccctccggaacagatgtgcggatcatgccggaaaaagtgcggatcatgcaccaaaaatcccggaattttccacttttttctatcatacagcaaaatccggccggatgcaagagaaatcggaaacgggaggggagagcgcctgcaatttgcgctggccgggatgacctctgcaggctgctgtttttttgcggattgcgcagatatctgcggtatggtataatcgggtcaaaacagcacaaattctgccgccggctgcccgctttttgacggggcgggcggactgggggacatatcatgcagaaaccgttatcgccgaagacactggaaaagagatacgccgagctcggcctttcggatgagaagctgcagctgctgcacacgttcttccgctgcgcgtctaatttttacggcgttctgccggtgtctcatgcatggcaagttttcaagcactacgagggcctgcgggtccacaaaaaggattttgttgcgttttccggtgttgcgcagcgggatgcatcgcttccgtacgccatctacgagctgagggagctctacagcgacgagccatggggcgacccgctggatcgcacgatcgtaaacaaggatatggtcatgcacggatattaccgtttcctccacgtttacaatacgctcgaaaatcagaggtgccagtcatttctcgtgccggatcaggagatattcttgtcctttgcggaggatcggttctatctcacgctgcagggaaaggccatggcggactttatcggcggcctgcgggccggcggaacgcagcgcagatggaacggcgaggtcattggcccgatgctggacctgaatggagagcccgctctgggaaaaaggctgtcgggactcctgtaccgtacccagagcgaggagttcgagatcgatatctccaaacgcgagtcggaaaagcggaggctggagcgcgagtccgccgcccttgctgcggacaaggtgctgcggagaatgcgcgttgatatcatgacgggattcatggagccggacgaggaattcgacctccaggttcggatcctcaatgaggactacgacgtacagctgtccaaaaaacagacggacaagttccgcaggctgtttatggatctgtatctccaaagcagcctctggcagctcggcggctggacggccgtgagtctgttctatagcggcgctgcttacggaccggaacgccgtccgaccagcgagaaggtgcgggtggcgacgcctccggacgcggacaaactggtggaacttcggggcaggctcggcccggactggcccaagctgccgaaaagctgatatggaaaagtatgccccggcgctgaaaacagcgtcggggacgtcttttaagcggccgatttgtctgacgtgtcattgcggggggctggtgcacctcgcgcttccctgatgtgtcattgcgaggccccaaaggggccgtggcaatctcgggaaggcactcgcagtttgcaggctgccgattaaaacgtaccagccaattgcgtctgtagcggcgctcagtgagcgcctacggcagttgcgcgtattgcagtggtgattcggcggcgcaaggctatcagaattgccattccgaggagcgaagcgacgggggaatctcgcagtaccggggtggataacaggaaagccccggcgaaaacgtaactgccttcccgagattgccacgggcgcgaagcgccctcgcaatgacaaatctgggagccgttgccattttaacggtggcccgttcgagtctgcagcattgcgccgggcccggctgtccgctcccctacattggccggtgcaattcggcagtgccttcccgagattgcaccccaagggcacttcctcgcgcttcgcgctcagggcgccacgtcggcctgcggcctcctcgcaatgac

SEQ ID NO: 11114 - DNA, 29147 bp, Unknown
  gut microbiota DNA sequence
ttggctttcaccgttttatcggcggtctgcagtggtcggcagcgctgtgccgggcacggctgtccgctatccctgccataaatatggaaagggccgtgacccgttccttgggccacggccttacaagatggaaaccagatgaagcacgcagtcggcgttggcttatccgcagatatttccgcggcatcgccggctgcctgagcggaacggggcgtaccccgtctctgtacaaaaatgatatcatatcggcggcgggaaattgtgaacaaactatgaaaatagccaaaatagttttcacatattctccgcttttcgtcgaaatgacgggatatcagctgacgagccgcgcctcgagcacgacggggttgtgatccgtcactgcgaactcggcatcctgcgtgcggacgctgaccggctcgacattcgggctgaggataaagccgtcgatgacatagaactgtgtgccggagcttccggcgctgtagggctggttcagcaggcggcaggtcggcgcggcgctgtcccatgcataccgccagcccgcaggcaggtcgccgagcgtgccgggcgtccagtccgcgccggaggcaatgggatagcggtccgtgccgtccgggaagctctggttgaagtcgccgcccgcaatgacatagttgcccttggcatactcgtcctgcagcagctgcaggagcatggccgtctgggcctccttgccctcgccgtcgtcataggcctcgaggtgcaggttcacgagcacgagctcctgctccgagccgtcgatggggatgcgggtgacgagcagacagcgcttgagattggcgatgcgcaccggccacgagaacgggcacggcaggcggtaacgcgtggcggccgtgatgtcgtagcggctgtaggtcgcaacgccggagtgcacgcggccgatgggctccgtgacgggatagggcacataatcgcaggaatagttcagggcaaagcggctctcatagtccgcaagatcgaattcatactgccgccactggtcatagccgtagctgcgcttcgaatccgtgtcgacctcctgcagcatcacgaagtcggcgtccgcaccgcggatgaggtcctcgatgccgagcatattctgccgcacggtctctgcatcggacggtctgacgccctcgccgccgtccatgaagaagtcctccccggcgtccagcccgccgtagccggtattgagcgtcagcacgcggacggtctggccgcccgtgagcttgctctcgcgcaggacgttgccgcgctgtgcgtcctcggcataggccgggcggtattccgtgaccgtgagatagccgatgccgcccgccgcgacgatggcgacggccaacacaaggaacaggaaatatttgacgatcttccggacgacccggccgcggcgcttcggcttctgcgggacctccggctcgtcctcgggtcccggctcgtcctccgggcgcagctccggcaggcgcgccgagccctcgagcggatcgacgggatccggcagcacgcgcgtgcggtcaagctcctcgtccggcgtcagctccgggatatcatgttgctgcaatgtgctcgcctccttgctctgcggcggcgtgataggtcaggccgcgcggatagaaaaaccggatgctctgcggtgcgatctcaaacgtgacgtcgcgggacatcatgagctcgccgtcgagattgatctcgctttcgcggtcgcagcggatgtgcacccgcctgcagcggaagtggcggatgagctccggcagctgggcatagtgcccggccttgtattttccgatgacacgcagcatcgtcgcgcgcgacacgtcgcgcaccagcagcacgtcgagcaggccgtcgtccggctccgcatcgggcactgggttgaagctaccgccataataccggccgtttgcaatgcacatcagcgtctgattgccgtcaaaatgctgcccgtccacgtcgacgacatagtgctcgtggatgccgcggataaaattcacgcccgtggagagcagataggcgcccgtcccgctgacgagcggcaggcgcttatagcgcccgatttccgttccgatgcgggcatcgaagcccatggagcagatgttgacggcgtaattctgcccgttgcagcggatgaggtcgaatgtggcctcctcggcgtcgagcaggcggggcagggagcggaaggccgccggatcggagaagatcttgatgaaatcgttgccggagccgccgggaaaatgcgtcacggcggcgttggcatggcccgccgcgccgttgacgacctcgttgagcgtgccgtcaccgccgcaggcatacagccggaccggctcgccggaggaagcggcggcctgcgcgatatgggtgcagtcgccgggcgcgcgggagacgaggatctcatagtccagcccctcgcaggccgcgcggatcgtctgggtaaattcgcccgtccggtcatattttccggcagcgggattgatcagaaatacatgccgcaagcgtctgcgcccctttcagaaatacatatagacattgcactgcaggcggccgttgtagagcttgcgctttttcgtggcctgcttgccgaagtagtgctcaaattccggctcggaggagatgatatattttttccacccgtcggcaaagcgcagatggcggccaaactgccgcatgagctgctgcgcactgcgctgctcgagcatacgctcgccatagggcgggttgcagacgatgaggccgtggtcgcacggcaggctctcacgggtggcgtccgcctcgcggaactcgatgtatttgctcaccccggccttctttgcgttcgcaatggcgatggcaaggctgccggagtcgatgtccgtgccgagaatgcggtattccccgcggaactccgccgcgcgcgcggcctcgcgggcctgcgtccagacatcctccggaatgcaggaccagctctgcgccgcaaatttgcgggcaaggcccggcgcgcggttcagcgcggccagcgccgcctcgataacgatggtgccggagccgcagaacgggtcccagaagaaatcgcggccgcgatagcgggccagattcaccatggcggcggccatggtctcgtgcagcggggcctcgttgcccacggcgcggtagccgcgcttgtgcaggctgacgccggagctgtcgaggaagacctcgcacaggtccttcatgatggaaaagcgcagctggtaggtctcgccggtctcgggcagccacgtcaggccgtagtgcgcgccgaggtggtcgacggcggcctttttgacgatggactggcagtccggcacggagtgcagctgagaatcaaggctgtagcccttgacggggaacgcgccctcgcgcgggacgaagcgctcgagcggaatggccttcacgccctgatacagctcctcaaacgaccgcgccgggaagcgcgccagcaggatcatgacccgctcgcccatgcgcagcccgatattcgcgcgcgccagctcggccgcgccgcccgtgaaaaacacgcggcgatcctcgacgcgcacatcctccatgcccattcgccgcagctcgtcgcccacgaggccctcaaggccaaacaggcacggcacggccattgtccaacgttccattgcgtatcctcccgcccaaattcgagcgattatttctcattatttttatgttctattataaccgatagcaggaccgattgcaacggccaatattccccgctgcccggcgcagaaaaaattgaaaaaacataaaatcagggcttgacttttttgggattttgcatataattatatatgcgctttgacgcacggcaaatagcgggtttgtgtaatggtagcacaccggactctgactccgtttgtgagggttcgaatccttcacccgctgccaaaaaccggttgtccattggacaaccggtttttctatggtttttgtattttttagactgtcaaagaattgtcaagccaaaagttacggagggaagaaaagtgtgaaaggaaaccgtcagggtttcctttcgcgtcaaataacccgccgcagcggcagaattgcaaaataatgctacaaaattctattttgcaattctgaaagcagcttgtcaaaggagtccaaagggactcctttgacaagcttagcgccctccggctgtgccggagggcgcttttgcttttttacagcctacaggccagacaactcctttttctttgcgtcgaactcctcctgcgtgattacgccggagtcgagcaggtccttgagctcgtcggcggtgcctgcaccggccgcagcgggctcggcgggagctgccgccatgccgtcaatgacaggctgtttgccgagaacgaggagaccctatattaaattaaggagaaagcgccccggcatactgctgccgattcacacaggctgccgttaaaatggcaaacgcccccggcggggcctgtagcgacgctccctgagcgccatgcagtctggcagcatgtgctgcatggattctgcggcgcaatactcccagatttgtcattgcgaggaggccgcaggccgacgtggcaatctcgggaaggcagttacgttttcgccggaagtacccaattatccggccaagtactgcgagattcccacgtcgcttcgctcctcggaatgacacatcaggtgggtgcggcggtgcaccagtgcccttacgcggttgaatattcctgtacagggcgtacccgtaaagggcacgccgctacagacgcaatcggctgttaccgttttaacggaggccggtacgaatcggcagcgcgccgccgggccgggctgtcccctcccttacaaagcgtggctggcagccttgcgcaactttccacgatccattttccgcttgccttcagcttcttctcctgcagcaggcgggcaggtccgtctgcgcaggctccgtcaggcagcggccctgcacgtcaaagcgcgagccatggcacgggcagtcccagctcttgtcgtccgggttccactccaaccggcagccgagatgcgggcagcgcagctccacggcgtaatacagctcttccgttgcgcggtacacgcccatctgctttccgtccagctccgccgggccgccctcgccgacggccagctcgtccgcctgcggcaccggcccgtggagcacgcgccggcccagcccgcgcgcggcctgcaggccctcctccgcaatgcggcccggccgctgctgcagcagatcgccggggtcaaagaccgcggcatccggatggctgccgtcgcagatcagggccgtcagcagctccgccgcggccatggcattcgacatgccccatttgcggaagcccgtcgccacataccactgcgggtcccttgcggagaaccgcccgatatacggcacgccggaggccgtcatgcagtcctgcgccgaccagtgcgccgcctcgcggctgccggggaacagcgcctgcgccgcctcgcgcagggcggcatagtgcccgccgccgttccggccggtgcggtgcgcgccgccgctgaggatgaccgtcccacggtagctgcgcagcgaccatgcgttcggttccagcccgtaatacatgccctccggcagggcggcgttctccagcgcgatggcgtaggagcgctcctgatgcatccgcgcaaagtaaagccccggcacgttcacgaacgggtaatgcgatgcaaataccacgcgcccggcctcgatcgtcccgcgcggggtgaacagcgtgccgccctcgacgtgctcgaccggcgtgcgctcgtagatcgtcagccggtcggccagcgcctgcaggaacttcagcggatggaactgcgcctgcccgcgcagccgcacgccgccgcatacgcgcagcggcagaggggtgtccggctcgaacgacgcgtccagcccgagcgcccgctccgcctctgcctcgcgcagcagggcgtcctcccggtcgtaggagtagagccacgagtccgtgcgctccagatcgcagtcgatgtgctccagctcgatgcgcgcgcagcagcgctccacggcgcgccggttggcccgcgcgtacatcgccgccttttcccggccgagccgctcgatcagcccggcgtaaatggctccatgctgggccgtgagcttcgccgtcgtgcggcccgtctggccgcccccgacgtgtccggcctctgcgacgacgacctgcaggccgcgctcctgcagctccagcgcggtcagaatgcccgtcatcccgccgccgatcacggccacgtccgcctgcgctttgccgtaaagcggcgggcgcgccggccccatgcatgttttctcccagatcgactccataccctgcgcctcccgttcgttttcgctatgtagtatgcgcgcccccgcacgatccatgagccacacagccccaaaaccggaaaaattttttcaaaaggattgatttttccgagaaatgtgctataatatccccgctgaattcaatatgggcctgtagctcagctgggagagcgttcggttcgcatccgagaggtcgagagttcgagtctcttcaggtccaccaaacaggtattggacgaacacctatttcttcagcggtggtttcgccgtgaagtgttcgctctgatccgcaacagaaaagcaccgtcttgggagtgatcccgagacggcgctttttctatatttctgaagcgttctaaaactttacatttgtataccttcaatgctaaggaggggtgtgctgtgatgactttcctgtatatgaatctcaaaaaggtgtactgcggtattccctcattttcaaactcaatttaaccaaggaataaaaaagaagatatgaagtaatcaaactaaagaatctgaattctaagatacggtttttacttctgcaattcccggtttttgcaataaattaaaaaactcattaattgcgttgtgatgctgcattggatgtctcatacctgttcttcgtttacagaatgtgaaagtaaccgattcctttgcacgggataatgccacaaagaatgtgcagcgatcttcatccggctggttcctaaagttccagaaagcagagtcttccaatccaacaaaatatacagcagagtattccagccccttgcttttgtggattcggctggtaaagcaaatggtagatgcagagggcattacggaaatgctgaaagccaacgaccaaatggaatgggtcgggcggatgaattcctgccgagaccgtgcatccgaaactgtctatcatcaagtaatctatacataaggcaaggcccttcgtatcaagtcaagaaaatgatacgaagggtctctttttgcttattgcgctttcaaaaatccggattcaaaggcatcggggataataaagcgcttcacgccctgctcaaagcggacggtcacatatcccctgttcagctcgatcaccttgccaatgccgaacttagcgtgagccacagcgcttccaacggcaacgccggaaacatcgaccttcggtttttcgggctgttggggctttgcaggagcgatcggagatttcacgccgaaggcagcagtgacaaaattcggcttagccggtggcgtccgagttggagcgggggctttgggcggctccggctcctcgtccgcttccggaacatcggcttcgtcaatttccggcgcatgagccaagagcggttccgcccgacgctctttttgcttgtcttgaaaagcttggcgagcttgcggataaagccagttcaccggagctggacaaagaaatctgcatggtgctgaaacagatcacagcagaatttctgctgccggaaaagggatgatgcgctatggcggtgacaggcttttggcctgtgttcaaaaacctgaaagccacgctggactacgccgacaatcccgacaaaaccaccgcactggaatatctcgacgaggatttgtacgccgccctgcgctacgcagagaacgataacaagaccgaccgcaaaatatttgtcggcggcatcaactgctcggcgcagaacgcctgcgccgaaatgatcgccgtacagcgacggtttggtctgcgtggcaaggtggtcggttaccacggcattcagagttttcgtgagggtgaggttacaccggagcgggcgttcgccatcggcaaggaaaccgcacggcgaatgtggggcgaccgatatcaggtgctggttaccgttcacctgaacaccgacaatgtgcattgccactttgttgtgaatcctgtgtccttcaagtgtacagtcgttcggccctgcgctgcaggagcgggctagcgctcgagcagccgaagcataccggcgtggagcgcggaggttgtcggcatggcgggaaccgcgccaaaagcggttgcggtcagcgaaccggccacgcaggaaacgccgagaatgtgctgcaaaacctgcggcgcgggaattctgtcgcagcagtcgcagagcagcagctcggaaaggaaggttccccagaaggcgtctccggagccggtggtgtccagcgcggtgacctgaatcgtgtgctgccgcagaaaaacgccgtttctgcataggcagaggcagccgtcggcgccaagcgtaacgacaagcatccgaatatcgtaacgttccagaagctcccgcattccggccgtgtgatcggcggcctttgtcagaaattcaagctcctcctcggaaagcttgacaaggtcggcatagcgcagtccctcgcagattgcatgataggcggagtcggtatcgggccaaagcggcaaacggaggttggggtcaaacgcgatcgccgcgccctttgaccttgcatgtctcaccgcctcaagggtagccgagcgcaccggctcggcagtcatggagaccgagccgaaatggaagatacccgcttgttccagaagcgtcagcggcagctcggcggatcggagcatacagtcggcgctatgctggcggtaaaagctgaaggatcgatccccgcgctcgtccagagagacaaacgccaaggtggtcggctccgtctcgctgcgcaaaaggccgtcggtgcatatgccgttgcgctccattgtgctgcggatcagccgtccgaagacgtcattgccgactttgccgataaatgcggtctgcatattcaaatgggaggcggcggccaaaacattgctcggagcgccgccgggagcgcccagataggacaccttcccgctctcctgctgcccgccgggaacaaagtcgatcaaggcttctccaagcgcaacaatgtcgtatttcggcgctgcttcgcagcggatgcacgcgccgttgcgttctttgagggaggcctccgcgttggcgcggaacacgagtctcggggcgcgggtcggatccgcctccggaaacgtctgcgctccttcaaagcagtatagttcaatgggcgcggggccattgaacacaacgcactgcacacggccgtgcggtgtatcgttttcaaccggcgcaaactgaggtcggaagccgtatgcactcagctcccggaatgatgcggcaaaatcgtgcgcggaaagaccgatgtgctccagaccgagtatttccgaagagtcggatgggtagtccttgtcaaggcgctgacagaattcgaatttcgttccgaagggagcgatcagattgaagtattttgttccggttccgaaaaccttcgggttaaaaaagggaacacctctgtcgtgctcaagctcgagaccttttgaaagcagcgcacgcagaagggcaccggcatccggggtctcaagggcgatgtgctcaagcccgacgatcttgtccggcgcgcgggacggcgcgtccccctcggcggtgacgaggcgcagacgaaaatttccgcaaacatagagtctgccatcgtcgacgggtagaaaatgcagaacggattccagccagcgtcccgcttcatccggcgaggggacgggcaattcgatgcagtgcaagcgcataataagctcctcttattggctgtggcgcgaaagaacgcccagatagatgctgctgagaaggatctgcttttgctcagcggcgcggtccttgatgcggcgcaggatctcctcgcccgccattttgcccagctcgtcgaccggctgagccaccagacgtaccggcgaggattcgaggagaggagagtcaaaatccgaaaagcaaaccagctcaacatcccggccgatctgcataccgcattcgcgaagacagtgataaacatcggtgcccatcaggccattggaggcaacgatcgcagtacacctttgcttgagcagctccctggtgctgttccatgcgctgcgctccatcgaatctccgtgctggataaagccatcctcaatcggaatggcgaaatcggacatagcctgacggtacgccgcaaggcgctcccgcgaggtgctcaggcggctcaggcctgtaatgaagccgatccgccgctgcccctgttcgatcagcgaggcaacgctccggtagacggattgatacgcggacaccgtcacggaggaaaacggcgcagcgtctaccttccggtcggccaaaacagtggggaaggacgccggaagcaccgcagaaaactcgctgtaggactccatggtcgatgccagcaggatcccgtccacaactccggaggtaagataccgcaaatgctgtagctcacgctccttattctcttgtgtgttcgcgatgatcaaatggaagccctctgcagaaatgctactctcaacagtctcgatcaaacgggcgaagaactggttggaaatatccgggaccacaaaaccaatgatattcttctttcctgtgcggaaactgcgggcaaatgcatttggtgtataccccagctctcggattgccttcatcacaagctctcttgaatgctcggatacggtacgggtgccgttcagtgtgtgcgataccgttgcggtcgacacgcccgccgcgcgcgcaacgtctgaaatattcggcagtttcttttctgttctcataggcggttttatcctcactcatccgttgctgtattggtttcatatgcgtaaacgattacgtttattatatcgatgagataattcgttgtcaagccgaatgaaaataataaaaaaattcggcatattatacaaaaaataagcatcatttttggaattgacagagtggaaaaactgtgctatccttgccgtagcgaaaagttaatcgtttgcgcaatcgattaaccagtgtcaaacagcatattattatagtaaataggaggtatgtacatgggtggatcgtcagaagccgcagaggtcggctgtcgaatcatctcaaccgtagacgttctggtcgttggtggcggtcctgccgggatcggggctgcggtcggcgcggcttatcacgaaaatttgcgtgtggcgatcgttgacgaaggcggctgcttcggaggcgcggttccaaaatcgttgatcacctttgcagagggcggcgttgtttgcagcggtgaccagctcctgatcaagggcgtgtggcagcgcatccaagacgaaatggttcgccgcggcggtgcgatccctgcgcacgagctgatccattctaataagtattatccgttcgaccgttcccgctgcgaaaaggatcttcagctcacgatttttgacccggagtgcttcaagctcgccgcagacgagattttgacctcccatcccaacattcaacccatcctgtatacgcgcgcggtcgcgccgattatgagtggaaaccgggttaccggcgtttatgtggaaaacagggagggacgcggcgcgatcctggcaaagcgtgtgatcgacgcaacggggatgtcgttccttttgcgcgcagccggcgccgaatgcgtgtcaacgtgcgccaacgcgccgcaccgtcaggggccgatcctcgtctttttcagagccggcgggatcagtgaggtcacgccgacctaccggcctaacgtaacggatgtgccctacggcgcgatcaacctcttcccgacgatgcgcgaccatgaatatcggatcgagatgacgcgggcgctcggcgacggaagcagcgtggaggatatgacccgcgcttcgatcgaatgtcgccgccagatcccggagatcattgaatatctgcgaaagaactggtacggctgtgagaatatctacctgatcgactcgggcaatgaggcgctgccgatgtctctatataagctggtcggccgccggccggtgtgcgtgaatgacatgctgaacggcgtcgtccccgaggacacaatcgccctctgcggctacgggatcgacgttcacagcgccgaaaagggcggccagaattacctgcactacctcgagccgggtcaatactatggcattggctatggcgcgcttgttcccgcaagcgaggtcgagaacattctgaccgccgggaaatcggtttcctgcgaatccggcgcggaggcggcgatcatggcgacggcgctcagcatggcgaccggcgaggcggccggaacggccagcgcgctcagcatctgtgacgatgtgccggtgcgcagtgtcgatgtgaaaaagctccgcgaggctctgcgcaggcagggagcgctcttggagccggaaatacttcccgaggcgcagaaatacgatgaatacatatttacctattaagaattataaggaggacaagacacgatgaaaacagttaacattcctgcaaaagcctgtcccgttgtcgacgaggtcgatgtgttggtcgtaggcggcggcgcggccggcatcggtgcggccatcggcgctgcgcagtgcggcgcatcggtcgcgctagtcgagtacttcggtgcgctgggcggactgctgacaaacggatatgttacaaactgcgaggcgggcgtggcgatctccggcgacaagatcctgatcaagggcgttttcgacaagctggtcacgcgtatggtcgaaaagggcggcgcgattcgcggctacgacctgatccgctcgaacaagtattatccgttcgatacctcgcgctgcgaaaacgatctgcagatcacgccgtgggatcccgaggcattcaagctctccgccgatgagctgatggcggagcacggcgtaaaggtgtatttctacacgcaattcaccgagatcctcaaggagggcaacaaggtggtcggcggcgtgatcgagaatcgctccgggcgtcaggtcatcttggccaagcgcgtcgtcgactgcaccggcgctgccgccgtcgcgcaaatggccggcgccgaatgctgcggcgtcgggcgcaagggctccatgacgctgatgttccgggtgggaaacgtcaagaacgtcgtcccgtcctacaagccgaatgtgaaggagatcccctatggtgcggtgaacttcttccctctgatccgggaaggagacttccgcgtggagatgacccgctatatcggcagcgagaacagcgcggaggattatacaaagggcactattgagtgccgccgtcagtgccaggaggttctgcaatacctgaaggagcactggatcggctttgaggacgcttatatcattgacaccgcgccgacgctcggctcgcttgctcagccggcgctggtgggcgaaaagaaaatgacgcaggagatgatcctcaagcgcgagatgccggacgaccgcattgccatcaccgcctacggcatcgacctgcacagcccggagatgggcgggcagaatttcctgtactatctgacccccggcgaatattacggcgtgccgttcggcgtggtcgttccgaaatcgcctgttgagaatcttctggtcggcggaaaatgcgtttccaccgagcgggacgcgttcagctccgtctgctgctccgccatttccatggcgaccggcgaagccgcaggcacggcctgcgcgatcagcatccgcgagggtgtgaatgcccgcgatgtggacatcgggatgctgcagcaggctctcgtgaaaaacggcgtattgctcgatccggagcccgctccttcggtcgaaaaatactatgtttaccccaagcgtgaattcaagctcgacgaaaacggaaaattgaaaggatgagaaaaaaatgaaaaaactgatcgctcttttgctttgcgtctgcctgctgctgagtgcagcggcctgtacgaatgcaccagccgtcggcaagagtacggatgcctcaaaccaggacggtgagcagcgcctgcgcatcgtcgccacgctccagtcccagcagatcaacttctggtcgaatgttcagcacacgcttgagcgtcttgcaaaggaagaaaacgtcgatctgacgatcatggatctgaacggcgacgtcacaacgtttgcaaacgtgatcgacgacatcgtcgccatgaagccggacggcgtcattacctgcggcttggaaacatcaactctgggcatccatgtgaagaccctgcaggacgccggcattcccgtcgtgacctacaacatcagcccggagggcgcaacctgcccgcaggtcgttgcagatcagtcggagttcggccgcgtcgccggtactgcggcggcagagtactggaaagaaaatcacccggatacgacgcctgtcggcggtgcagtcgatctgtattccgcgccgcagtgcaaggaacgcgtcgacggctttgtggagggcttccgcaccgtctatcccgactttgaagtcgtccagtccgtggacggcggcggctcgcgctcggtttcccttgcagcctgtgaggatttgctgcaagcgcacccggagatcaacgtcatgttcggcatcaacgccgacagcgcgctcggcgctctggatgctctgcgcgagatcaatcgcggcacgtccgccgattcccttgtcgccagcgtcgacgggacggaggccgactgtgcagagctgaaggatccgaactccgccctgaaggccgttgcgggcaactctccgcgcattatggccgagatggcgtggaacctcctgatgcaggtcattcgcggcgagcttcctgccaacgaggattatccgcagtcgcttgagatcgtttcggtcacaacggatacggcggattcctgggtcaaagagaatttcgaataaaaagcagttccccatcacgcagtccgaagcgaccgcagaccgcttcggactgccctctgttatacgaaagcgcggatcgggccggagaataagcagctccggtcgcgaacgcttttatacaaatactcaggaggcggagagaaatactccgatgttcaagatgaatgaccctgttttattggaattttgccgcgttcggaagcaattcggcccggttattgccctgaatgacgtttcgttctccgttcgcgccggagaggtgcactgtctcgtcggcgaaaacggggcgggaaaatccacgctgatcaaggttctagccggcgcctatctcattgacggcggagagcttcgcatcgacgggaagcccgttcggatcgaaacgcccgctcaggccgccgcgtacggaatctctgttgtttatcaggacgtgacaaacgtggataagctttccattgcggacaacatcgttctcggttcagagaacagcagatttggattcaatcagaaaaagaagaattatgagtttgtccgtccgtttttgcagcaggttggactggaggtcgatccgtctgccctgatggagacgctctctatcgcacaaaagcaaatggtaatgatcgcaaaagccctgtcaaagaatgccagattaatcgtgcttgacgagccgacagccatgctgaatgagcaagaggtccatacgctgtttcagattatctgcagcctgcgcgatcgcggcatcacggtggtatacatttcacaccgaatggaagaaatctatcgcatcggcgaccgggttacggtgctcaaggacgggggatatgtcgggacatgggatttgtcctccatcgacacgcagcagctgatcgtaaaaatggtcggccgcgagcttcatgatgtttacccggataagaatcgcccaatcggaaaagagctgctgcgcgtcgaaaacctgaccacggaaaagatcgacggcgtgagcttcaccctacacgagggggaggtggtcgggctggccgggcttgtcggctccggccgcacggaggttttgcgcgcgatatttgcggcggacaagctgtaccgtggcaaggtcgttctggagggtaacgagctttccctgtcctcgtcgatcgatgcgatccgacacggcatcgggttgctgccggaggagcgaaagcggcaggggatcgtgaactgtctgtccgtaaaggacaacatcaccatgctctattctcaactgcacgccaaatgcggatttttgaggaaggcggatgatgatgcgatcgttcgccactatatcgacgaacttcacatcaaaacgccgtctgcgatgcaggcggtggggaatctctccggcggcaatcagcaaaaggtcgttgtctcaaagtggctgtctatctcccctcggatcctgcttctggatgaaccgacgcaggggatcgacgtcggagcaaaggccgacatctatcagctgatcgatcgtcttgctcgggaaggcatgggcgtgattgtggtttcctccgacctgatcgagatcatcaacctcagcaatcgaatcgtggtcatgcgggacggtcaagccataaaaacacttgaaagcgatgagcttacagaagagaatgttatgctatatgctatgggagttaacgccgatgaaaaagcttaaaacaaatacgcaaacaaagcagcgccttgtaacgatgctgatccttgtactgattatggtgatcctttcgtgtatcagtaacaagtaccttacggtcaacaacctgattaacattgtccgccaggagagcaccctgattattattgcctgtgccgcgacaatgctgatgatatccggcggcatggatctttctccggcaggcgtgattgccctgacctccgttgtttttgcgaagctctgcgtctccggcatcagcatcccgctggcggcgctgttgtccctgtttgtcggcatcgctgccggcgcgttcagcgggctgctggtcgtgatggcaaatgttccgcccatgatcgcaacgctgggcacgtggtacatcacaaagggcctggcgtatgcgatcagcaacagctatgcgattgtgcaggggcttcctgcagattttggttgggtcaaccgctatatcgggccattcccgctcatggtggtgatcgccgtggcagtttttgccgtgttttacattctcctgaaccgaactctgctcgggaaatatgcctatgcgattggcggcaatagcgagaccgcgcgcctttcgggtattaaggtcaatctggtgcgttgcggactatacattttaactgcgctcatgtcctccttcgtcggcattctgatgtcctcacgcatcaattccggtgacccgaatctcagcacctccggaattgagtttgagatcattgttgcgatcatcctcggcggaacaagtctgcttggcggtcagggctcgctgatcggaacgctgatcggcgcgctgatcctcgggaacctttccaacggcatgaatctgctgggaatcggcacggtctatcagttcatcgtcgagggcgccgtgctggtcgtggctgtcgttcttgatctgacgctgaagggcaacggccttcgcatcaagaagctgcgccggtcaaactgacctcggaagccccacaaaaaatccggacacgagaatgattttgtgacgataaatagctccgctgccgctccttcggtcaaggccgagaagcggcagcggagctgcttcgaacgggctttggataagtggagctgcaagcaagaaaaggggcagtctcactaaaaggcagccccccaaaaaagcaaaggcccggctcttgcgtagagccgggttttggcgtattatttaggtgcgaaacaaaacaaatgttctataattaatgacgcctctgaaccatatcggctcggaggcgtttttcgttatctctgttcaggcgggcagatcttcgggaggatttcaaggaagtgctgaccgatcttttctgcgtcatagccgttggcctcgcagatgaaccggatggtatccggcagcaggacgtgacccttcgctttctccacttcgtattccttgtttgtgatttgcttcatagtgggcatctcgtcagacaggaatttgtcaaagcgacataacataaatctggcacggattccatttgtcccacagatttggcatcaattcaaattccttaaatccaaggcttaggtaaaaacggtttgtttcatcgtattcctgatacttacccatttgaaccgtctttacctgaataaaagaatagctatgttctgcagcgatccgctttgcctcgtcaaacatatctctgccaatacctttacgatgatgcgtcttcaatacgcccataacagcaagctcaacggtatcttttcccgtttccttcagacacaaaaaaccattggctttttcttcttcaaaagaggcaaccattatttcattcgcactttcacgaatatagttttctgttgattccggaatcccaaaccactctggcagtgccgtaagaatgctgcgtgcaattcgttgcttctcctcaatatcatccactattcttatcatcactttcacctctgcaaatcatgatttctaaccgtctattataccggcgaagtatgaacatttctaccaagaaaaacagccgggattatagcgcggcggttctccatgtcaacccggtagggggatgaaaatctccgggaccttttcggtcgggcaacgtcccggggtcacacgcaccaaaatcgcaaaaaagacatggagctgctccacatcaggggaactttgtctattgtcctgttttactggttctgttccgtcttgccctgcagggcattttgtgataaactggagaaaaatttgcaaggaagtgatcggatgtcgctgcgggaaaagctgctgtgggtcgcgccggaggaatgggaaaacgagttcgtccgacctcctcgacctgaccggtatgacccgcgtcgtcgtgacgcacacgctggaggccgcgctcctgcgccgctatgacggcatcctcgtcctgaaaaacggccgtatcgccgaatccggcagcttcgacgagctgatggagaaaaaggggtatttttacgccctgttcaccgttgcgcagaggtgagagccggataaatgatgcagtaagaagaatcattccggcccgataccgccgaaagccgaattttcgatggacaagatgcgcgttccatgctaaaatcaatttgtgtgaccgcattttctgcgcagaaaggagcgaagactatgatcgatttttccaaactggaacagtatcgggagaataaccgcattgaggcaaaaaaagcgcttggcggcctgccgaagagcatttgggagacatactctgccttcgccaatacctatggcgggatcatcctgctgggcgtagaggagcgggcggacaagtccctgcacccggtcgatctgcccgatccggaccggctcatccgggagttctgggatatcgtcaacaatcccaataagaccagcgtcaatatcctgtctgccagggatgtttttgtgcaggaggtggacggcgcgcacatcgtggtcatccgcgtgccccgtgccgagcgctcctataagccggtctatgtggacggcaacccgctgtgcacctatcgccgcaacggcgagggcgactaccgctgcaccagagaggaatatcaggccatggtgcgggacgcttccgtgcggacgcaggatatgctggtgctgaacgagatggacctgggcgtgtttcatccggaaagcgtccgcagctatcgccagagaatgcgcctgtcccgccccgggcatgtgtgggagtcattggaggatgaggaattcctcctgaagctgggcgctgtcggcatcggctccgacggaaagaagcacccgacctctgcgggcctgctcatgtttggcaatgaatacgacattgtgcgggaattcaatgcctattttctcgattatcaggagcagtatgatgccgatatccgctggacggaccggatcatttcctcgtccggcgactggagcggcaatgtgtatgatttctatttccgcatttacaacaggctgatccaggatatcaaggtgccgttccggatggacggcgggaaccgcgtggacgacacgcccgtgcatcaggcactccgcgaggcattggccaactgccttgtcaatgcggattattatggcaggcaggggctggtcatcctcaaaaagcgggacggcatcaccatgtccaaccccggcagcttccgcattgagctcgacgcggcaaagagcggcggcgtgtccgatccccgcaacgggacgatgctgaagatgttcaacctgatcgatatcggtgagcgcgccggaagcggcatcccgaatatattccgcgtctggcgcgagcagggctgggcagcccccacatttacggaacagcttgagccggaacggacgatcttatcgctgacattcgaaaaaatcggcgataaaaaatcggtgataaaaatcggcgataaaaaatcggtgataaacgagaaaatgaaggaaacgatcattgcatatcttacggatcatgcagaggcgaagaccgctgagatcgccgcatatattggcttgaagttatcacgcacaagggattatctgaatgaactgatcgcagaggatatcgttgtcgccgagggcggaaatcgcaacaggacctaccgtctgagatcctgatgccccgcggcgggaagccatgcttgacaatcctgcgcgggtgcgcgggtatgatagagtatcccctgctcggagggcgagctgttcgaagaaatagcagccggacaagaggcagactgagacgcctgtttcctgtccggctttttcgcgcaaaaaaggagatatgcgatatggattttctgaacggcaggatcaaaccaatgtacttcaataaatgacgcctctgaaccatatcggctcggaggcgtttttcgttatctctgttcaggcgggcagatcttcgggaggatctcaaggaagtgctgaccgatcttttctgcgtcatagccgttggcctcgcagatgaaccggacggtatccggcagcaggatgtagcccttcgctttctccgctttgtatttctgccactcttcgtattccttgtttgtgatttgcttcatggtggttacctctctatgctggaatgataacttgaggtttctcatacttgacatatataccaaatatcgtcacctgtgaatccgcactttctatacagttccagcggtttggacgtgttgtcgagattccctgaaaccgttacaaaactcgctccgatgcttttgagtctattgagtaatacatccacaatctttttcccaaggcctctgcctctgtacgctggaagcacctgaacccattcaatgataccctcccgacaaacctcatcaaactcagctatccccgaagcggccatttttccattgtcggcatttatatatacacataattcttcacagaaggtcttgtgctgcttccactgcagaatgtcttgttcactcacgacgatattctcatgcttgtaagactcatttatcatctcacacagttgtgttgcctgataatcaatcgacaaggtgtcgtaatcataatctatcggagacagatcattcaaatcatgctttatcctgaagaatctttgaaaattgccatactgtctattccaattactacaatgaatgattctcattgaatcgggaatggccagtgttttggccttccaatatggaatcgaaagagttccacatggattctgaaggtactcttttacatccattaaattactcctgatctgtacaaattcctgttttcccgccgtctattataccgacgaagtatgaacatttctaccaagaaaaacagccgggataccctgacttccacaacttacacttcaagcggcaaaatcggcggagaaataattaaattgtatcaatttcggcgttttttatatccagaaagcggcagttgattagtctacccgaaaagcatgaaaacgagaattgtcaccgtttattgtaagaaaatcggtgacaggaatcgaatctatggattttcgttctgccccggtgcgcttcaggtttcctgctccgcaccggggctttttcatttcagcaacaagcgttatatcggcgtctatctgcccgtttccaaaggcggtacccacgcgagggacaaccgcatgagcctttgtcaatcctgctaggccaagatccaccacgacctcagcgaccgctgatcaggcatcataatcaaaccgctcattgctgaatgtgaacagttgctttccttcatacctcttaaagatggcatagattgttttgaactcatcaatcgtgattgcgtgatttccaatcggcagagccaaactgacccccggcataccataagcatactgcttgcgggtgatatttatatgtacccaccaacacccgtaattaccgtggtaacctccgaaggtgaagccctcgccctgcagccacttgaagaatggcgctttgcagtcagccaaagatttatcacagacgagaaatgcttccggtttcccaccaccgattttcaatgtcttttcttccataggatgatcctcccgtgatcaattgatccataaagaaaagacccatcgtccgatgggtctctgaaatctgtatgacccatcgttcagcctttagcaccttaccatccggcaggttgctgtgcggtcagcggggctgtccctcgcgcactccttatggtatttccattatagcgcggggggttctccatgtcaatccggtaggggatgaaaatctccgggaccttttcggtcgggcaacgtcccggggtcacacgcaccaaaatcgcaaaaaagacatggagctgctccacatcaggggaactttgtctattgtcctgttttactggttctgttccgtcttgccctgcggggtattttgtgataaactggagaaaaatttgcaaggaagtgattggatgtcgctgcgggaaaagctgctgcgggtcgcgccggaggaatgggaaaacgagttcgtccgcatccggccgatgaccacgcgggacgacctgatctacgcgggagacggctgccgcctgacggatgagcagagggaatttgtgaaccccgtgtggttttcgctcggccgggcctatctggccccggaggatcacgatccctgcctgatcgaaaacgagcgccgggagccgatcggctttctgtgcttcacggcatgggccgatgcctacagctggagctattttctcgacgtccggcagcaggggaggggctacggaaagcgggcggcgcagctggcgctccgcctgctccggctggccgacccggatatgccggtcaagctggccgtggaggctgccaacacacgggcgcagcggctttaccgctcgctgggcttccggcagctgccggagcgggacggcgacgatctggtatacgcagcttgttaaagaggtcctcttggacttttttgccaagctgctgcggccccttcggggcctcgcaatgacgattcgggggcattttcggtctgcgataatgccgtcaaattcgcagctgcccaaggcgctcacggagcgccgctgcgatttgatctggaattttccccaacagaaagtcggaaaaaatgccgggcccggtttatgccgggtccggcgtttcacgatacaataacagagagaaccaggtgacgacattgccgccgtactgaaattcgatcccgtggcgctcggccagtgccgtgacgacgatgccatggctctccacgcagggaaacatccggtccgggtggcggcaggggccgtccggccaggcacagtgcgcgcagatggcgcacgattccgtagaaagcccgtagacctctgcaccctgcgcgcgcaggatggcggagacctgccgcgtcagctcctcgtgcgggccgcgcgtggcgagtgccgcctcggtgtccgcgatgtccgcgacctccgtcagcgatgtgatgagcaggccctgcggataggacaggcagcgcgcccggcacgcctccacggagccgacggcgggcggacaggcccatgttttgttatagcgcggacagttctcgcggcagaccgtgcggatgcgctcggagaattccagctccgccgtttcgaaccagacgtattccgccagcggcagctccgccagctgcgcctcgaccgcggcacggttcacgccttgtcctcccgcttcagatacagcagatcataggacaccggcgtgcagaacaggcggcgaatttccgccgggtcgcgtgtctgaccgaggatccacatcagcttggccacgacggcctcggtcgtcatatcataggcctccagcaggtggagatcgttcttcaggtggaagccgacgtcatagacggacagattgctgccctcgttctgcacctgcgtcgtcatgacaatggtcttttcggcctccatggcctcacgcaggacgcgctcgaagccgctgccctgataggacggcaggccgccgacgccaaagctctcgatgatgacggcgtcgttatgctcgagcaggtacgacagcatgccgcagtccgcgccggggatcattttcatgagcgcgacgcgctcaccgagcttgtcatagaacacgggcgcgggaagggcggacgggcggatatattccatcaggaagccgttctgcagcacggccagctccggatagttgatgctggagaaggcctgcaggctgacggtgcgcgttttgcgtgcgcgggtgccgagaatgacgcggccgttgaacacgatcatcacgccgcgcagatcggacacggcgcagcggaacgcatcggccagattcgtcttggaatccgtgttttcaaacacgatgggcttctgcgcgcccgtcaggatgatgggcttgggggaatactggatgagataggacagcgccgcggctgtataggccatggtgtccgtgccgtgggcgatgacgaagccgtcatattcctcatagtgggcgcggatggcgcgggcgatcgtcagccagtgcgcgggagtcacattcgtcgagtcgatggaaaacagctcttcgcaggtcacgctgcacagagatgagatctccggcacgcagcgcagcagctccgccgaggtgagcgccggggcaaggccgctcggcgtgacctccgaggcaatggtgccgcccgttccgagcatcagaaccttcttcatgattgcctcctgtccgcagtacaagcacattttgagggaaatattctactgttagtatatcatggaatatcgccggacgcaaccggcgcgattgacaaagtctctctttcgcggtaaaataatcgaagttataaaatgaggtgagacagatgctttctgttgtgatccctgcctttaatgagcaggaaatggtccccgcggccgccgggcagatcgacggcattctttcgcgcgccgggatcccgcatgaattgatctttatcgacgacggctcgcgcgacgccacttgggcggagatccgcgccgagtccgagcaccgcgataccgtgcgcggcgtccatttttcgcgcaatttccgcaaggaggccgccatttttgccggcctgcaggcggcggacggcgactgtgtcgccgtgatcgactgcgacctgcagcatccgcccgagaagctcgtggagatgtaccggctgtgggagcagggcgtcgaggtcgtcgagggcgtgaagacggaccgcggcgaggagtcgctggctcaccgcgtggccgcgaagacgttctaccgtcttatcagcgaggcgacgcacatcgacatgacgcgcgcctcggacttcaagctgctcgaccgcaaggccgtgaacgtgctgctgtccatgcgggaaaaacgcgcgttcttccgcgccctgtcgtcttggatcggcttccgcacggcggaggtgccctatgaggtgcgcgagcgcgccgcaggcgagtcgaaatggtcgacatggctgctcatcaaatatgcgctttccaacatcacggccttcacgtccctgccgctgcacctcatcacgggctgcggcgcggcgtcgttcctggctgcgcttatcgtcggcatcgtgtcgatcgtgcgtctggccatgggccgtgtcgtcaccggcctgacgggagccgtgatcctgctgctgttcctcagcggcctgatcatggtcggcctcggcatcatcggctactatctcggcaatatctatatggaaattcaggaccggccgcgctttatcgtatccgagacctgcggcgtgcggaaaaaaacctgaaagcctgttgactttttccggaattctgctatgatagtgacacaatgcaataaccttatcgagagtggcggagggactggcccgatgaagcccgacaacctgcatttgcaaggtgccaattccagcgattttatcgacagatgaggacaaaaaccttgtgccctgtcgacagcagggcgcttttttgtatcgagaaggttagaagcatacaaaaatatcagggaagaaggaacctccagatgcaaaaaagaatctttacctccgaatccgtgaccgaggggcatcctgacaaggtctgcgatcagatctccgacggcgtgctcgacgctattctggcgcaggaccccaaggcgcgtgtcgcctgtgaatgctgcgccacgaccggcatggtcatggtcatgggcgaaatttccacggaatgctatgtggacatcccccatgtggcccgcgacaccatctgccgcatcggctatgataagccggagtccggcttcaacggccacacctgcgctgtgctcaccgccatcgacgagcagtccggcgatatcgccatgggcgtgaacagctcctttgacgatgccgataccctcggtgcgggcgatcagggcatgatgttcggcttcgcctgcaacgaaacgcccgagctgatgcccgctcccatcacctatgcccagcagcttgccatgaagctgtctgccgttcgcaagtccggcgagctcgactggctgcgcccggacggcaagagtcaggtctccgtgcagtacggcgaggacggcagcgtggagcgcatcgataccgtcgtcgtttccacccagcatgccgacagcgtctcgatcagggacctgcgtgaggccgtcatcgagcgtgtcatccgcccgaccctccctgcgcggctcatcgatggggatacgaagttttatgtcaacccgaccggccgctttgtcgtaggcggcccggcggcggacagcggcctgaccggccgcaagatcatcgtggatacctacggcggctacgcggcccacggcggcggcgccttctccggcaaggacccgacgaaggtcgatcgcagcgcggcctatatggcccgttacgtcgccaagaaccttgtggcggcaggtcttgccgccaagtgccagatcgagctggcctatgccatcggcgttgcccatcccgtctctgtccttgtcgacaccttcggaacgggccgcctgtccgacgcccgcctgagtgagctggtcagcgagtgctttgacctgcgcccggcggcgatcatccgcagtctggaccttcggcgtccgatctaccagcaggtcgctgcctatggccacttcggccgcgcggacctcgacctgccgtgggagaagaccgacgccgtggagcgcatccttgcccgagcatgaccccgagcatcgaaagatccctccctgcaaaattttaattgaccagaggtgtgattatgaagctctcccggaaaatctgcgactgtgcccaatctcccatccgtaaattctacccctacgcggtcgctgcacagcagcgaggcatccgtatccaccagctgaatatcggccagcccgatatccagacgccccccgccttttttgaagccattgaggccggcaggcgtgacgtgcttgcctatgcagaatcccccggcatccccgtcctgatcgaggccatccgcgcctattatgcgcgcatcggcgcctcgtttgaaacgcaggacatcctcgtgaccaccggcggcagcgaggcgctgctcatggccatgctgtgcattctggacgagggcgacgaagtgctcatcccggagccctattacccgaactacttcacgtttatccgcatggcgggcggacgggtgcatcccatcccgacttcgccggaggacggctaccgttacgccgagcgcgcccgcatcgagccgcacatcacggaaaagacgcgcgccattctgctctcgaaccccggcaaccccaccggcacggtgctcaccccggcggagctgcgcctcatggcggatatcgcccgcgagcacggcctgtatctcatctgcgacgaggtctaccgcgagtttatctatgacggcgcagagcctgccacggcgggcagattccgcgataccgacgagaatctcattctcatcgattccgtttcgaagcgcttcagcgcctgcggcgcgcgcatcggtgcgctcatctcccgcaaccgcggcatcatgcagggcgcgctgaagctggcgcaggcccgcctgtccgtcgccacgctcgatcagctcggcgcggctgcgctctatggcgtggatcccggctacttcaatgcgacgcgtgacgaataccgccgccgccgcgacacctgctaccgcaagctgctggagatccccggcatcgtcacgacggagccgcagggcgcgttctacaccatggcaaagctgccggtggacagcgccgagcgcttccagctctatctgctgcaggaatttgaagatcatggcgagaccgtcatgtttgcccccggcagcggcttctatgccacgcccggcgcgggcatgagcgagatccgcatcgcctatgtgcgctgcgtcgaggagctggaacgctccctgaccctcctgcgcctcgccattgaacggtataaccaaaagtaaaacacagcggcccggaatgtgaccattccgggccgccgtgtatgattggggtattgatcgtacacgccattgtaggggagcggcatgccgctcccggtgatgcacctgcggaataaacagact

SEQ ID NO: 11115 - DNA, 27752 bp, Unknown
  gut microbiota DNA sequence
tgatgcacctgcggaataaacagactatcgttaaaacggtgaacgccccgaattgtcattgcgaggagcgaagcgacgtggcaatctcgggaaggcagttacgatttcgccgatcgctttcccacgaagggtcgggtactgcgagattgcaccccaagggcacttcctcgcgcttcgcgctcagggcgccacgtcggcctttggcctcctcgtaatgacaaacttggaggcgttgcgccaatgaatttgtgccgcaagtattgccaccctgcaaggcgctccctgagcgccgctacatttttctctcgcgcggcggccttgcacaacgagcgccgctacagacgcaattggcgcgtaccatttccccgtcagcctgcgccgcatgccagcgcggcggcatagaacgcatcgatctgcgcgaatacggcttcgctgcagcgcccctgcgcatcgtgcagcagggaggtgtgcgtttcgccgggcaggaggacggtccggatgttcggcgcgttctctttttgacaggctgccagcaggctcggaccgtctgccgggatggtgccgtcgtccgacccatgcagcacgagcaccggcacgccggacgccgccgcggccttcgcgccggagacgtctgccgccgcgccgaagcgcagctgctgatcgagccacaggaacggtacgcccaactccgcgaccggtccgcaccagcgtcgcgccgtctgccgcatcaggccgagcggcgtatcaaatcctgccgcgcagacggaggccgtcacgtcgtggctgccgcccagcacagccgcggcggcatagccgccccaactgtggccgaagagcagaatgggcaagccctcctgttctgcgcgggtcagggcggcatccagatcaagggcggactgcgcaagaccgcgcgtgccgctgccgccggaggccccggtgccggtcgcatcgtaggccaggacgctgtagccgctgtccacaaagtgcatcgtctccggcaggtatgtctccgcgtccgcgcccagtccgtgggcgatgacgacaagggctgccgcatcctccgccgggtagagccagcccgtgagctgcgcggagccggaggagaacgtaactgtctgccgcggatagtccgctgcgacgtcctcatagcgcacggtcagcccgtccggctcgtctgcgcgcccgaacagggcggcgttcatgacctgcacggcagcaacggagcagatgagataaactgccagcgcaaggagcaagacccgccgcagcgtgcgggattttccggacatagcgccccacctttccaatcacaatcaccggccgggccggtggcttttttctgcaaaaacggccggccctgaaaagggccggccgcctgttttctttactgcttcggctcgcggacggtctcgaccagtccggccgcaaggcctgcaaggccctgcagctccgaggggatgatgatcttcgtggccttgccgtcggcgaccttctgcatggcctcgagcgccttgagcttgatgacctgatcgttcgggcaggcgtcgttcagcatctgcatggcctccgccgttgccttctgcacggcgaggatggcctcggcctggccctgcgcacgcaggatggcggactgcttctcggcatcggcgcggaggatggcggattccttttcaccctcggcgacgaggatctgcgagcgcttcgtgccctctgcctgcaggatggcctgacggcggtcgcgctcggccttcatctgcttttccatggagttctggatgtcctgcggcggcaggatgttcttcagctccacgcgggtgaccttgatgccccaggggtcggtcgcctcgtcgaggatggcgcgcatcttcgtgttgatgacgtcgcggctcgtgagcgtctggtccagctcgagatcgccgatgatgttgcgcagcgtcgtggccgtcagcgtttccatggcgaccatcggctgctcgacgccgtaggtatagagcttcggatccgtgatctggaagtagacgacggtatcgatctgcatggtgacgttatccttcgtgataacgggctgcgggggatagtccagcacctgctccttcaggctgacgcggcgggcgatgcgctcgacgaagggcagcttgaagtgaatgccgacctcccacacctgcgagaacgcgccgaggcgctcgatgacgtaggcgcgggactgctgcacaatgcagatgtttttgatgaggatgatcaggatgaccagggcgacggcgccgatgatgagatagggaacgatcttttccataatactctctccttcgcttatttgttgggaacggggacgggtgtgacgatcagcttgacgccctcgatggcgtcgatccgcacgacggtcccgaccgcaacggggctgccgtcggcgctgcgggccgtccattccacgccggacagacggaccgcgccggtctcatgcagattgtcgatggcctccgtgacgatggcctcgcggccgatgttcccggcggcgttcgtgcggacggtgcgcggccgcaggtactttttcacgagcgggcgcagcgcggccagcagcacgacagacacggcaaagaacagcgtgatctgcagccatagctcggcatgcagcagggcggctgccagagcggccagtgcgccgccgatgaaccagacggtcgtcagggcggttgtggcgccctcgatcacggcaaagactacgatgagcgcaagccacaggaactccattcgcatggcacattcctcctttcgctgctttcagtatgacatatgcggagacgcttgtcaagatagtgcgagcaggaaattttcagcattgctccagaatatctggcagctcttccagacggtgtatttcaaaatccggcacgatgtccgggcgcggaggacggccagtacggttgaaccagcaggtgcgcagccccgcatttctgccgccgaggatgtcgctcgtcaggctgtcgccgacgatcatggccatcgcggggtcaaagtccgggatgcgcgcgaagcagtagtcaaaatagcccttttccggcttgtggaagcccgtgtcctccgaaatgaaaatttcctgaaaaaagtgggagatcccggcgctctccagacggctgtactgcgtgtccgccacgccgttcgaggccaaatagagacggaagcgcggggcgagccagctgagcagggcctctgcgccgggcacgaaccagtggccgatgccgagatagcggcggtagcggttttcggcatcctcggggtcgtgggtgcagccaagggcctgaaacagcagggaaaaacgctcaatgagcacctcctcgcgtgaaatttcaccgcgctcaaagcgctcccactgctgctgattgatgcggctgtagagcgcgagcgtctcctccgtgggggcgatgccgagctcccgcagcgtgcggaggatgccgtggcgctccgcttcgccgaagtcgagcagggtatcatcaaggtccagaaacagatcgcggatcatggcagcagcacctttcctttctcctgcgcacaggccgcagcggacatgcgcaggcggcggaatacgatcaggcagccggcccagctgagcatcatgaccggcacgccgatgtaggccgcaagcttcacccagatgttcgccagcggcaggccgaacaggagcagcgcgagcgagccgaccagcagcaccgcgccggtcagccagccgatgccgcttacgcggcgcagcaggcgcattttcggcgagggctgcggcgcttttccgctgcgcagcagcgcacctgcgcgggcatggagcaccagcaggttgacaagctccagcagcaggcagagatacatggcctcgcggccgatgagcgtgctgacgccgaagccgatgagcacgctcatgatcagaaacatgcccgcgcctccgacggccagacagccggtcagcagcacggggatatcgtgttgatcccgcatgaaagattcctcctagtcgttgcggacatagcgcgccgttccggagtcgtccgtcagcgtcagctcccggccgtcaacggtccagataaattcggcctgatagggcgcggtgccctcctgaatgtccgtgaaaagtgtctgcccgtctgcgtgccacacgccgcggatggtcccggtgtccttgccgcggaacgtgcactgcacgctgatcgtgccgtcctgcgccagcgtcatggtctcaatgagatcgccgtttcctgcgctgacccagctgccggccagctcctgcggcagggcgtccgcctgctccggcgcggcgcaggcgcacaggagcagcaggcacagcagcgctgcggcggcccgcctcactgcgcggcctccgcgccgaaaaagcgcatgcggaagctctcctcgccgctttccagcacgccgcggacatactgcgcgtccgcgtcggcggcatgctcgagcgtgagcagggccccgcggaagcattcgcggtcatacacgacctccagcccgcggaacaggccgggcgcggcctcctgcgcgcggcgcacataggccacgttgttcatgtggccgttgtcgtcgatctccgcatctgtcacgcggacggccccggcggccgtcatcgtctccggcagcgtcaggcggcgcaggcgcgttttccgctccggtgcatgcacgggcagctcccacagagcggggatctgccgcaggtcgatcatgtgccgcgcctcggcattcacgagcacccagcagtgcacggccgagccgatgacctcgccgtctgcgcagaaatcatagtcgcgcacgctcatcacgggcgttgggctgcgcagccaggtgcgcacggtcagcgcctcgtccgcagcgggcagacgtgtcagctccaaccggctgcgcacgagcatccacaggctgccgaagtccgcgaccatgcggtcgtggccgatgttcagcgcgtctgcgtggtccgtggcggcgcgctcgagcgcgcccatcagctctgcgggtgtccagatcccgtcgtgtacggggcggcagcttacttccagaatctcctgcatttcgttcctccggcttctttgggggggcaacaccgcacaattgcatcttcggccttcgccggatgtttttcaccgatccatcggttcgaaaagtttgaggtattgcgcagccgttggcggctttgccgccttacggatgcggcatgccccttgcgggtacacaaagtacatctgcacttttcaaaccttgtctcggcaaaaaatctctcgccgaatgctctcgctgaatcgtgcggtgctgcccttaattatgccttattgtaacacgtctctgcggctgcgtcaacctcgggaaagagcggcccctgcccgcaggcaggagccgcccgaaagtcagaagcggaaatagatgaacggattatacgacgagctgagaatgaacacgatgcacacgatcagcagaaggcccgaggcaaggttcgccagcaggatgcccttcgcgctcttcggctcccggcgcagcagcggcaggcagcacacgatgccgagcggcaggtagacaacggccttcagaagggagacgttcgtggcagcggctgccacccagtccgtcgcctgcgggacaaacatgagcttcagcgcatggcacagcgacgggaaatcggtcaggttgaacagcacccagccgatcagcacgaaaaacgccgtatagagccagcgcacggccttcggcagccgctccagcagctgccccagaaacagcttttccgccagcagcagaagcccgtaatacaggccccagaacaggaagttccactgtgcgccgtgccagaagccggtcagcgcccagacgaccagaatattccggatccagcgggattttttgacgcggttgccgccgagcgggatgtagacatagtcgcggaaccatgtcgacagagagatgtgccaccgccgccagaaatccgtgatggaaagggcggtataggggtggtcaaagttctccagaaaatggaagccgaacatccgccccagaccgatggccatgtcgctgtagccggagaaatcaaaataaatctgcagcgcataggccacggctgcgagccagtagagcgcggtgccgtaaacggcgctgtctccggcgtagatcgtctcggcgatgcgggcgatgttgtttgccagaatgacctttttcgcaaggccgaggataaagcggcgcagaccggccgccacatcgtcgatcgattcgcggcgttccagaatctcctgctcgaccgtctcatagcggacaatcggcccggcgatcagctgcgggaagaaactgacgtagaggagcagataaaaatagttgcgctggacgcgaatctcaccgcggtacaggtcgatcacatacgaaaggatctggaaggtatagaagctgatgccgatggggagcgtcagcttcggcagtgcgcgccatccaaacagggcggaaaggttctccgaaaagaaattcagatatttgaagacgaagagatttccgacgagcaggacgactgtgacgatcagaataagcctcttgtgcgcggtgctgcgctccatcagcaggccgccgcagtaggccgcaagtgtggcggcgagcatcagcagcaggaagcgcggctcgccccaggaataaaacaggagcgaggcgagcagcagaacgacattgcggtaaacgcggtttttgctcaggtagtaggcgacggcgaccagcgggaaaaaggcatagacaaaggtgatactgctaaataccatggctcagttctccagtgcaaagtcgggcgagatataatagtcgacatttccgatcagcaggaccttcgtgatgttgttcctgcgcagatagtcgctcagggagaagtcgcttcccatataattgcggtagtagcgcagatcgacggaatatgtccggtcaaagtgggaggccagcagcttcagaatggcgttgtcataggattcgccgatgaccagcagatttccccggtcggtccggccggtgtcaaagatgatctcgccgtcgtccccgccatagaaggcgccgtagctgagcgcaagctcgcccggcacggcgtcctgcctgccatagtctccggcgggctcaccgttgcgtgtgaccgtcatctccggataggcaaagcgatagacggtgaagggctccgagaagatgtcaagccccgttccggccgccttggagccggaaaactcgccgagcgtctcggtcgcggtcggttccagcggcgtatccgtgcagccgaggagggggagcagctcccgataggcgcggtaggagccgagataattccagtggtggtccgtccggtaaaaatactcggagaatgcggcaaaatcggggatttcatatttcagcatccggttctccggcaggttcagcatggaaaacagcagatcgtcagcatagacccgctctccggtctcaaagttgatatccgtgtccttttcaatgtagcagacaaaaaactctatgtcaggatgagcggcgaatatggcgttacaatttgcggcgcgttcctccagcgtggggcggaggacctgcagatcgcgcgtgtgatacgtcaggtaatcggagaaaagctgcacatcgccgatccggtagtagcggccgctttccagcacgggcttcagcagcgctttggtcagcttggacgacagatcattataccgggctttgaagtgctcggcaaagggagtctgatcccccaacgcggcttccagctgatcctgaaacgtgccgtcggcgtaggtccccggcgtcggcagagccgcacggtttgcatagcggttttcgtagtagttgatcttcttcgggaagaagaccgtccgcgccagaccgagcagcagcccgcagaggatcagccccacaaagacgaaattgatccctttcttccacatgctgcttccctcccgatccggcatgggcgatagcccgatttttcgcccaatgctctcgctgcactgtgcggtgctgccctaaattatatcatagggggaatgcattcgcaagcgggaaagcggaaccggcagaaagcgcttgccttttgggggaaaacgcggtataatggtgcaatcacgcagcacgggagggaaacgcttgaagctgaaaaagatgatcgataaaacgctggcgctttatctgctggtcggcgttctgaacttcatcgtctgcacggggatcatgtttctcctttataatgtggccgacgtcagcaagcactttgcgccgatcgtgaactacggcctcggcagcatcatctggtatctttcctgcaactatctgctcttccccggccacaagaccacctcgaagcagctgctgtgctttgtgctggacattgttgtgtgctatctgctgtcgtattatctcatcgggccgtatgtctcgcgcctgctgctgcgctcgcactccgtgacgcgcttcttctcgttcggcggcacggagaatatccgcggcaactgcgaaatgtccgttggttcgctcagctatgcgctgctgaactattttggccagcgctacttcgtcttcagcgaccgcttcgccgcccgtaaggacagaaataccgaagaataaagcaattccccagagcaggatgaaccgctctggggaatttcatatatcgcggcatatgtaaggaagcagcataccgttcccggcgcaatgctgccgataaagcggaccggaaggcattgtgccacagaatgcgtgcctgtttttgctcagccctccatacaccgcagtacggtctcctccgggacgatggcggagatgccgccggggtactgcgtggacaggctggcggccgtggcggcgaagcggccgatggcggtcagctcgtcctcggtcagcgcctcgggcgcgcggcccagctgcagcaggcggctgacggcgctgccgccgaagatatcgcctgcgcccgtcgtgtcgaccggcaggacgcgcggcgcggctacgcggacggctgccccggcattctgcagcaggcagcccttcggcccgcaggtgaccatggccaaacggacgccgaagtccgcaagcaggcgcgctgcgccctcctcggggccgcagttccagagaaagcgcacctcgtcatcgctgatcttgacgatatcggcctgccgcaggccccagaggatctgcgctttcgccgcatcggcatccggccacagcggcaggcggaggttcgggtcgaagctgagaagcttgccgtgcgcggcggcgtaggcaacggcctgctgcgtggcggagcgcaccggctcctgcgtcagactcaggctgccgaagtggaacaggcgcgcctcgtccagcagcgaaaggtccagctcgtcaaagcggagctgcgtatccgcgcccggcttgcgggcaaagctgaacgcgcgctcgccgccggggccgaacgtgacgaaggccagcgttgtgaacacggacggatcgcgcacgatgccctccgtgcggatcccggcctgcgccagtgtggcgcacagaaggtcgccgaacgtatctgcgccgaccttgccgagcatggcgccgctgcagccgtaggcgtgcagagcggccagaaaattccccggtgcgccgccgggatgggcggcgagggtggggtagccgtcgcggtccgtgtcgaccgtggcaaaatcgatcagcagctccccgagtgcaatggcgtccagcatgaaaatccctccgcatcagaatgaaagataataaaagatggaaagcaggtgctgccggaatcagatccccagcttttccagtgcagccatgcgcagggcgaggcagaagatctgcatggcctgctccagctcctccacgggcgggaagctcggcgcgatgcggatgttgctgtcggcggggtcgttcccgccgggataggttgctccggcgggcgtcatggtcacaccggccccggcgcacagagcgagcgtgcgcttcgccgtaccgggcatggcgtcgcacgagatgaaatagccgcccttcggctccgtccagctcgcgatgttgagcggggcgataccgcgcagggctgccagcacggcctcgaacttcgggcgcaggatggcggcgtggcgctgcataagctcgagcacatgggccttgtcctgcaggaagcggacgtggcgcagctggttgaccttgtcatagctgatggtctgcgcgccgagcagaccggagaggtacttcaggttcgcctcggacgccgccatgacggccacgcccgcaccggggaaggtgatcttggacgtcgaagcaaattcatagaccatgtcggcgttcccggcctcgcggcacagcgtgagcatgtcacggaagggaacgaactcgccgtagacctcgtgcaggcagtaggcgttgtcccacatcagggcaaagtccggcgcggcggggcgcagggcggccagccggtcaacgacggcgtcggaatagacgataccctgcggattggagtatttcggcacgcaccagatgcccttgacggccgggtcgcgcacggcggcctcgacggcgtccatgtccgggccgtccggcgtcatggcaatggggataagctccatgccgaacgactgcgacacgcggaaatggcggtcatagcccggcgcggggcacaggaagcggacggccgactcctgcgaccacgggcgcggtgagtgcagcaggccatgcgtccaggccttggcgatgaggtcatacatgaggttcaggctggcactgccgccgacgaggacctgcgagggcgtcacgcccagcagctcggcaaacaggcgcttggccgagggaatgccggtcagctcgccatagttgcgcacgtcgagcgcgccgtcgaagcagtcctccggagactgcagcacggtcagaatgccgctgaccatgtcaagctgcgcacggctcggcttgccgcgggccatgttcagagagagctccttcgccttccaggcatcgtactgctcctgcagcgcggcatattccgcgcagcgctccgaacgggtgtagtctgcatagggcttcatgatgtgacctccaaaaatttttttggtttgcccccatcttaccgcgcagcgggcggaatgtcaatcgctttcctgcattctttgcatgaaaaaaatcgcttttttgacggcggacgcaaactatgcgaattatttgcagcgcaacttgcaaaacagccggatatctgctatgataaatcagaattcgcctgaataggagaaggagacggtgattttggcacagatcgacctgacgacgggctccattcccaaaacgctgctgcgctttgcgttccccatgatctgcgggaacctgctgcagcagctttataatgtagcggacacgctcatcgtcggccggtttcttggctcggacgcgctcggcgcggtcggctcgtcctatacgctcatgacgttcctgacgtccatcctgctcggcctgtgcatgggcagcggcgcgctgttctccgtttgttgggggcagcgggaccttgccagactccggcggcagacgcatgcggccttcgtgctcatcgcggtgtgcaccgtcgtgctcaatgcggcggcctttctgctgctcgatgcgatgaaaacgctcctgtccgtcccggcggaggtctggcccctgatgcggtcgtatctgttcgtcattttcttcggcatcggcgggacgtttctttataattattacgcctcgctcctgcgcgcggtgggcaactcgctcgttccgctcctcttccttgcggcggcagccgtgctcaacattgcgctcgacctcgtgttcgtgctcgtgtgccggtggggcgtggagggcgctgcggccgcgacggtgctggcgcagtggctctccgggatcggcacggcggtctataccctcgtgcgctgcccggagctgcgcgcccgccgggaggagcggcgcatcaccggcagcatgctgcgggagcttctgagcgcctcggtgctgacgtgcctgcagcagtccgtgatgaacctcggcatcctcatggtgcagggacgcatcaacagcttcggccccgtgatcatggcggcgttcgcagccgccgtgaagatcgactcgtttgcctatatgccgctgcaggacttcggcaatgcgttctccacgttcattgcacagaactacggcgcgcagcagccggagcgcatccgccgcggcatccgcacggccgtgctcctgtcgtcggtctttgccgtgtgcgtctcggcctgcgtcgtgctgcttgctgcgccgctgctggggctgttcctgcagccgggcgaggcggagatcctgcaggcgggcgtgacctatctgcgcatcgcgggcgcgttctatgtgggcatcggcgggctgttcctgctctatggcctgtaccgcgccgtcggcagaccgggtatgtcgctcgtgctgacggtcatctcgctcggcacgcgcgtggcgctggcctacgcgctttcggccgtcccggccatcggcgtcgtgggcatatggtggtccatccccatcggctgggcgcttgcggatctcacgggcgtgctcgtctggcggcgcgccgggcgaaagttgacagaaaattcacaccccggcgcgaaaatgcgttgaaaagccctgtgtggtgtgatatgattggagcatcattcggaaagcgagaaacattatggatctggaacacaacgaaaacgaagaactggaagtgaccccggccgagccggaggcggccccggaggccgaaccggaaaccgcgccggtccctgaggcggagccggaggagaagccggaggagaagtctgcggaaaagaagcccggcatgtccaagggcgcaaagatcgccattttcctggcggcgctggctctcgtggcggccatcgcggcctgcgtcctgctcatcacgggccgcaaggatcacccggccgggacggaggcccagcagacggaggcgactgaggcaacggacggcacgaccgagaccgtcgcggacaagacgctcgaagcgggcgaggaggtcacgacgacctacggcaaggcggccaacctcatcgacgccgacaacttcggcaagaacgccgtcacggacaacgccgcctataccacgagcacggcggaggccggcgatgtgcagatgcgcacggccgttgcgcgcgacgcgacgggctactgcctgacgaatgccgacctgcagatctactactggatggaattctaccagctcatgaacaactatggctcctatgcctccatgctgggtctggactacacgaaggcgctggccctgcaggacgccccgagcggcggaacgtgggagcagtatttcctgacgagcgccacaaacaacttcgccgagatccgcgccctgtatctggcggcgcaggaggcgggctatgagctgccggagacggaggccaagtccatcgaggacgtgctggacccggagggcagctttgccaagagcgcggcggacaacggctatgacgatgtcgacgcctatctgcaggtcaacttcggcaagggcgtcacaaccgagatctatcacgactatctgctgacgtattatacggcggtgaactattataagaacgtgctgtacggcgagtctgccaatgcgctgacggatgccgagatcgaggcctattatgacgagaacgcccagagctatatcgatcagggcgtgacgaaggtcaacaacgtctccgtccgccacatcctcatccagcccgagggcgagaaggacagcgacggcaactacagcgatgaggcgaaggcagccgccaaggcggaggccgagcgcatccttgccctctggcaggccgatcccacggaggacaacttcaagacgcttgcgctggagtacaatcaggaccccggctccaaggacaacggcggcctgtatgaggacttccagcccggcaagatggtcacggagttcaacgactggtgcttcgacgagagccgccagcccggcgattgtgagatcgtcgagacgacccatggctaccacatcatctatttcatcggccagaccgagacccgcgcctggttcgacacggcgaaggacgacatggcttccgccgcagctggtgaaaagatcacagagctgaaaacaaagtaccctgtagagttcaacttcaataatgtcgtgatctacgacctgctgagcgcttccgtctcggcatcctgacacgaagacagcacgggtgcgccgcggcagcagcggcgcacccgtgctgagcttgtcaaaaaagaatttttgacaagctctcaaacgagacccgtttcactgggctctcgtttgaaaaggctgcggctcgctgcatcgcacgaagggcacgcctgcggcgcatccttcgcacgtttgcgagccgagcggtattttctccgacgtacacgccgccggagaaaatgatttccattttctttgcgcctgcgggcgcaaactctgcgaggctttttcgacagtctgccgggtgcgccgcggaagcagcggcgcacccgtgctttttctgtttttttgaaccggaaggagagaatgaaccatgcaggaaacggaattccaatttgcgggcgcgcaggggacggagcttcccgcgcgcctgtggctgccggacgggcagccacgcctcgtgctgcagatcagccacggtatgacggagcacagcggacgctacgacacgctggctgccgcgctggcagagcatggcattgcctgcgcggcttttgacctacgtgggcatggccgcaatccgggcagccgtacctgtgccgacatggggccggacggctgggagcagtcgctttctgatctgcagcgcttttgcgagagactgcgggagagcttccccggtgtgccgttgggaatgctgggcttttccctcggctccttcctgctgcgggacgcgctctgtcggggcatggtcgctccggcgggggtgatccttgcgggaacgggcacgcagccgggcgcggtgcttgccgtcatacaggcgatcgtccggggccagctgcgccgggcaaagcccggcggtacgacgccgctggtgcagaagctttcctttggcgcctataaccggaaatttgcgccgaaccgcacccgggcggactggctctgcgccgacgaagaagcgctcgaccgctactgcgccgacccgctgtgccggccggatatctcagcggcgctgtttctggagctgctgagcgccatgcgccggaccggcggaaagcgcgcgcttgcgagctggaaccgctgcccaatcctgctgctgtccggcgcggacgatcctgtcggcgcgatgggaagcggggtaaggcagctcggcgcggcgatggaacgggcgggactccccgtgcagacggtcctgctgccgggcgcgcggcatgatatcttccatgaggaggcgggcggcgccgccgcgcaggcgcgcagccgcattctgcgcttctgcgaaacgatactggcggagtcggagaagccgcggaatcaatcgcctgcggagaaataggggcgcggaagtagctcccttcccacaaaaaccggagacccggcgaaagctgctgtgaagtgctttcgtcgggtctccggctgattttatgcctattattcctccgtcagcaggtgacgggccagctcttcgttctctgcggccagctcccgcaggctgcggatattttcggcctcgaacatctgctcggccatggccgtgtcgatgaggtcgcacagcgaggcggcgttcgcctcctccagcgggaggtagaggtcctgtccgaggtagtcgaggaagccgctgaccttcgggtcgtagacgacgccgactatcggcacgccctgcccggcggcaaagatcagcgtgtgcagccgcatggcgatgacgagcgacatccggcggatgagtgccacgatctccgtgccgttgctcccggcctccagcagcagatacgggcagcgcagctgcgcggcgacggcgttcagcgcggcgcggtcacggcacggctccatggcatagagcaccggcgtcaggccgtactcccggtgggcgtattccgccgcgttcgcaaaggcggcgatgtgacggtcgaagtccttccacgggcgcagggcgaacagggcgtagcgcgtgccgtctgccagaccgctgtggtgcaggaagctgtggatggcgggcgtatcgcccggatcgatcagcagggcggggtccgccgtcaggcggatctccggcgtcgtcacgccgagggcgcggagcgtctcctcggagtagcggtcgcgcagggagatgatctcggcatagcggttgagcgttttggcggtgcgttcgcagttgcgcgggcgcgagacggggccgacgccgcagccatagagcatgacgcggcagcccgcgcgggcggccatgcggatgctcgaaaggtaatagaggagcgagcgcgtgctcgtggtgtcctgaatgagggtgccgccgccgctgaggtagagcttcgcgtggcgcatcctgcggcggatggcgagcagccggaacgtatagagcgaatcgacgcaggcggccgcgcgcgtctccttcggcgtgcggctgagggcgcagatcggcagatcagggtcgatgtggcgcagctgggcaacgatggcgtcgagaatggcgttgtcaccgccgttgcccttgccgtaggccccgcagatcacgacgccgtcgcgctcaagcttcgggcggcggaagcggcggatgatgatctcgtaataatgcttctgcttttcgaccatggcctgcacggagaagtcgcgcttcgtcttttcatagagcgcctcgcccatgccgcggcgctttgcggcatctgtcgccagcgtgagcatgtgggccgtgagcgcggagacatcctgcggctcgaacagcaggccgttttcgccgtcgtcgatgaggtagggcacgccgccgacgttcgaggcgatggtcgcgcagtgcatgcgcgcgccctccgtcagggcataggggaaggtctcggacagcgacgtgagcacattgacatccagcgcctgatagaagctgttgacgtcctcgagccagccggggaagaataccgtgccctccggacacagctccttggccagcgcgcggatctctccggcctgttcaccgtcgcccgcgatgacaaggcggatgtccggcgcctgcttcacggccgcggcaaaggcgcgcacgagcgtcgtcatatccttgacgggggagatgcgggcggcaatgccgaacacgacggtcctgtccgtcggcgtcaggccgatgccgcgcagccactcatcccgcgggacggtcttgagcggggtggagaagtcgacgccgttatacagcgggaaaatgcgctgcgggtcgaacccgcgcgaaataaggagctggcgcatgccgtccgaaacgccgatccacgcgtcaaagcggcgcagcgcgaccttgttgatgttgccgtaggtcagcgcggccagcgggcgaccgagatagtcaagccggtagtcgctgtggatggtggagatgacggggatgcgcgcctgccgctgcacgagcgcaccgatcatgttcgcgcgggcaccgtggcagtgcagcagctggcagtcgtcgtgccggatgatggcaaggatgcgcttgcgcaccgccatggggttgctgccttcaatgacggtcgtcgggatgccgagacagcgggcctcctcggcgaacggtccctccataaagcagatcaggtggacatcctccgtgcggttcaggccctgcagcagggaaagaacatgcgttttcgcgccgccgacatcgccgccggagatcagatggatgagtttcatacggtcatacctcaaaatgggcagatcagcttgtcaaaaaaagtctctgcgggctttttcgccaagctgctttcagaattgcaaaataagtttttgtgtttttattttgcaatcctgccgctgcggcgggggatcaaacgcggaaggacaccctgacggtttcctttcacacgtttcttcccttcgaagcttttgacttggcaggttttgacaacctgatatcacttgtgcctcttgttgcctcttgcaattccgcggcaaatctgatagaatcagcttgcctgaatattcattataatatattttgcggaaagaagcaatcggatttctcacgttttttccgccaactggaggttatcttatgaaaatcgtcaagaacggccgcctgttcggcaagctgaacatcgtcgatgtactcatcctgcttgtcgtgatcgccgctgtggccttcctcgccgtgcgcatggtgggcggaagcggcggcgaaacgatcgctgccgacgagccgagtgcgcaggcgaacctgcgctacaccgtcctgtgcgaggacatgcccctgatgcaggcggagaacgccgtgactgccgtgacggcggaggactatgagctgaagcttgacgacgattccatccttaaggtcagtccgaatcagatcttcaacagcaacaagttccaggatgcgcagatcacctcggcggaaattctgccgcaggacgacagcgcagacggccagcgcgtgacggtccgctttgtgatcgaggccgctgccaagaacaccgtcggttccttcgtcgtcggcacgcaggaggtccgcatcggccgcgactatacggtcaagaccgtggatatcgagatgctcggcacggtcagcgccatggagaagcttcatggatgagctgctgaggaccagtctgctctggcggctgttcgcggcgcttgcggccttgtaccaccgcacgttcctgccgcggatgtttgcggcgatccaccgcgcgtttgcggagtctttgcccggccgggcactgcgccgcctgctcggcgggcagcccgccgtggagcgctcggcctaccgcaggctgatggatcgcggcaatgcgtggctgtgcggcatcggggcgcgcgtcgtgccggtactggaggacagccttgcctaccgcatttaccgccgcgtcatggcagcgctgcggaacagcctcctgctcggctggctgtttgcgggcggcatgacgggctttctgctgttcctgttctcgtcctatgcgatcgtggactatctgctgcgcgacgtactgcagctggcggctattgccgccgtctgggatgagctgctgatgctcttctcgctcgtgtgggtcatccaccgccgcgtcgacacaaggcgcccgctttccagcacggccaacggcatcggcctgtggatcgcgttctatctcacagtgggcgtgctcctgctgatgacggtccgccctgcgccgaccgtgaatttcacgggcttccgcgcgagcatggaatatctggcggtgttctatcttgtcacgcatctcatccgcgacgagcgcgatttccgtgagatgtacctcaccatggtcatcattgccacggtgctggccctgcacggcatctggcagttcatcatcggtgtgcccattcctgcaagctggacggacgccgccgaaggcgcggtgcgcacgcgcgtctactccatcttcagcaatccgaacattatgggcgcctatatgatcctgttcgcgccgatgaccatcggtctggcctatgcctgcgagcgcccttcccagaaggtgctgttctggctgtgcggtcttgccatgtgtgcgggctgcctgttcacgatgtcgcgcggcgcgtggctcgcgctggccattgcggccgtgctgttcgccctgctcatcgaccgccgcctgctggccctgatgctcgtgtgcggcgcggtggcctgcacgctgccgttcgtgcgcagccgcatcggctacctgttcacaccgcagttcgcggactcgaacgcccgcggcggccgcgcgaagcgctgggccacggccatcggctacctcaaggccacggatcctgttttcggcatgggctatggcatgtacggcggcgccgtcgcggtgcagaatcccgtcctgccgtgggtcgagtatatgtatgttgataactattacgtcaagatcctcacggagaacggcattgtcggcgtgacggccttcggcatgatgctgcttggcctcgtcggcaacggtctgcgcggctgtgtgcgcacggcaaagacccgctggtcacccctgtgcgccggtatgctgtgcggcctcatcggcgtgctgatccacagcgtgtttgagagcatctgggaggagccgtatatgatggccctgttctttgccgtcgcagccatgctggcctgggccggcctgctgcgccgccggacacaggaaaccgcctgaaagcatacgttgtaaaaatgctgtaaaatatgttggaatcccaacatattttgcagcgttttttatttttcttgcaatttatgaaaaatccttggaaaaaatgtgaaaaaatatttaagaaaacacttgtttttccgacgcggacgtattacaatgggggaacaatactggcgctggccggttacatcatatcaaggaggaaaacgtatgaaaaagaagctgaagcagctgcttgcgctggtcctgacccttgcggtcgtcatgggcttcgcgctgccggccgccgcggccgatcctggccccagggtcacgatcgaaaaggtcagcaatgacgccgtgactgcggaaccggaaatgcatacagccgaaacgaaggaagatacgccgcaatatgcagacaccgacatggtccgtgtctccattacgctggcgggcgcttcgaccgtcgatgcgggctatgccacgcgcggcatcgcgaacaatgctgcggcggacatctaccgcacgggtctgaaggtccagcagcaggcgatggcacagcgcatctcacaggatgtgctcggcggcgaggcgctcgatgtcgtctggaacatgacgctcctgacgaacacgatctctgccaacgtgccctatggcaagatcgaggcgatcgaagcgcttgacggcgtggcttccgtcacgctcgagaaccgctatgagccggatgtcgtctccaccggcgatgccgatcccgacatggctacctccggcgcgatgatcggctccacggccgcttgggcagacggctacaccggcgcgggcagccgcatcgcggtcatcgacaccggtacggacaccgaccacatctcctttgacggcaaggcgttcgagtattccctcgagcagctggctgccgatgcgggcaagagcaaggacgagttcgtcgcttctctggatctgctcgatgttgacgagatcgccgctgttctgccgaagctgaacatcagcaagcttgtccccgatgcgagcaagctctatctcaccagcaagctcccgttcgcgttcaactatgtggacgaggacttcgacatcacgcacgataatgacaaacagggtgagcacggctcccacgtcgccggtatcgccacggcgaaccgctatgtctccgacggcaagggcggctatgaaaaggcgctcgattccgtgtttgtgcagggcgttgcacccgatgcccagctcatcacgatgaaggtcttcggcaagggcggcggtgcatatgattccgactacatggtcgccatcgaagacgccgtgatgctcggctgcgacgccgtgaacctgtctctcggctccggcaacgcgggctttaccacccctgatgcgaagtatcagagcatcctggataagctggccgagaccgacaccgtcgtctccatctctgcaggcaattcctccagctggccggaaaactctgttaacggcacgggtgccctgtatctggacgatgtgaacttcgccaccggcggctctcccggctcctacaagaactccttcggcgtggcctccgtggataattccggcacgaccggctactccttctcctatggcgacggcgcgaaggtcttctacaccgataccgcggacagcggctatacgaacaaggcctttgcaacgctcgatacctctgccgacggcagcggcaccgaatatgagtatgtctacttcgagaacaccggcgcggatgccgacggcaacagcctcctgacggactatgccgatgtcgtctccggcaagatcgcctttgtcttccgcggcacgagctccttctatcagaagcacatggccgtagctgcagcgggcgccgccggcgcagtcgtctgcaacaaccaggcaggcgtgatccgcatggatctgtccgactccaccgcgaccatcccgtgcatcagcatcctgcagacggaagcggccgatatcaaggcggcctccaccccggtctatgccgaggacggcacgaccgtgctctactacaccggcaagctgaccgtctctggcaagatgagcacgagcaccggttcctccggttcctacaccatgagcgacttcagctcctggggtgttccgagtgatctgagcatgaagccggagatcacggctcccggcggcaacatctattccgtcaacggtgccgtggcaggcggtcaggcctatgaggtcatgagcggcacgtccatggcggctccgcaggtcgccggtatggcagccctcgtggcgcagtacatccgcgaaaacggtctgaaggaaaagaccggcgtctccgtgcgtcatctggcccagagcctgctgatgtccacggccgagcccgtctatgatgccagcgccgaatcctggtattccatcctgaggcagggcgcaggccttgccaacgtttccaatgcgatccatgccgagagctacgtccttgtgaacggccagcccgacggcaaggtcaaggtggagctcggcgacgatcccgaccgcacgggcgtctactccgcagacttcaccctgaacaaccttacggacgaggccattgaatacaccctctccgccgatgtcttcacgcaggctccggcctctgtcgacggcgtcctgtatcttctgccgaagaccgtgtccatggcagccaatgttgtctggacggttgacggcaaggtcctgaccgctccgtcggagctcactgcctatgacttcgacaaggacggcgacaccgatgccgacgacgcacagctcctgctcgacgacgtcacggccggcgcgggcaagctcaaggctgatgtcgacggcgacggcgacaccgacacgcacgatgtctccgagctgctgaagctcatctccgctgcaaaggtcgttctcccggccgatggcagcatctccgtccatgtgacgttctccctcatcgacgaggagaaggaattccttgacgcctactacacgaacggcgcttatgtcgaggccttcctgtatgccaatcccgtttccgcggaagacggtgtcgagcgcgtttcccattccatccccgtgctgggcttctacggcaactggtccgatgcctccatgttcgataagggcacgctgtccgagtactggtacgagaaggagacccgcaacccgtatctcccggattccgacggttctcccaacatgttcggcaacatggtcaccgtcaagtatgccaacgaggacggcgagtactactacttcggcaacccgcttgccgaggacgacgagtatgtgcccgcgcgcaacgccctgaacaacgagaacggcgatcagatcttcaagctctactttgcctccatccgtaatgcgggcgatgccaagtatgtcatctccgatgcggagaccggtgaggtctatgtagaagaggatcttggcccggtttctgccgccttctactatgccaacggcggaagctggcaggacacgcagaaggccgtgaacctcggctggtccggtacgaaggccaacggcgagaagctccccgagggcacgacggtcaacatctccctcgtgctggctccggagtattaccgcaaggccgacggtacctatgactgggatgctctcggcaggggcgcgagcctgagcacgatgaccaccatcgacaacacggctccggagatcgaggacgtgtccgtcagtctggtggacggctccctcgacgtcgcagcgaaggacaacgagtatgtctccgtcgtcgctctgtatgatgcggccggctcgaaggcgctgacctatgtcgcgccgaatcaggaaactgccggtgagacgcagcatgtccgtctggatgtgagcaaggtcgtcggcaagacgttcctgctgcaggtctatgactatgccatgaacgtctccacctataaggtctcctatgatttcctgcccgatatcgacggctactacaccttcttcgacctgaataaaaagcagtggtacacctacaccgaggacggctccgagtccgccgccatgggcgcgacgaacctgaagctctacgctgccgagtatgccgacggctatgtcttcgccattgacgagaaaaatgccctgtatgtcatgccggacaacgacttcgccaatgtgacgaagatcgccgacctcggcgcagcctccggcccgctgagctatgacttctttgtcagcgacatggcctataacgcagcggagaaggaaatgtacttcctcgcatactccgaggccaatgagctcggcgcttcctatctgttcaagctcgacctgctgaccggcgcaacgtcgctcgtcggcgagatgggcaaggacatctggacgctggcctccgacggctccaatggcttctatggccagggcacgttcgacaacaagctctatcacttcacggctgctacgttcgcagagccggaggatctcggcgcactggacgacgagctgtccatctacatggcgcagtcctcgctggcatgggatgccaagaaccagaagctcgttttcacgctggcgacagcgtcgagcttcacgggccagatcctcaattctgcgatctacaccatcgatccgacgacgcgcgagagcaagaagcttgcggatcattccagcctgtccgtcatcctcggctgctatgtcaaggcgggccgcacggacgacgcctcccattttgctcccagcaccgaggccatggcggtctccctgtccgaaagcacgctgtccctccttgtcaacgaaaaggccacgctgaccgcgcaggccaacccgtggacgctgagcgaccgcagcgtgacgtggtccagctccgatgattcggttgtgaccgtcaaaaacggcgtcgtgaccggcgtcggcgagggcagcgccgttatcacggcagcctctgcggtcgatcctgaggtcaaggcggagtgctatgttactgttactacgctccacatcaccgtggaaggtgcgctgcaggataaggacggtcatgcccagttctatcagtggaatctggagaacaagaactggacgcccggcaagctcatcaaggacggcgagatcagcatcgagtccacgacgctggcaagctctgacctcatgtacctgatggatgcgacggcggattcctgggccatgcacaagatcaacaccgccacgggcgaggacctcggctccgccaacggcgcaggcgtcccgctgtgggatatggcctactcttctctcttcagcaccgaggagcaggatcagatcgtgggtgtctattactactacctcttctcgccgaaggatccgatgaatctggatgcatacggcttcaagcttcagagcttcctgcagcaggtcggtgcaagctacttcaccgccatcacctctgcgggcgagacgacggtcaagctcaagagcggcgagaccgtcccggccgagatgttccttgcgctggacaataagggcaatatgtgggtcctcaacctctattacaccgaagcggacggctatagcctgagcggcggctgctacgagaccacgctgcctgagctggccttcggcggccatgaggactccatgtactgctcgctcgtcatggccgacgagggaacgacggacggcctgacgctcttcctgtcctacttcaccggcgacaccaatgagctctatatgctcaacctcatgcagagctccgacggcctgtacttcgacgcgacggatgtcggcaatgtcggcgattccgtctggcccgcgacggtcaaccgtgtctacggcaatgccagcatcaagggcatccagactgcggaggccgctgcggagaagaacgatatcgagctcaccgcgcagaccgtgtccgcagagaagatcgagcgcagcacacaggaagcctccggcagcctcaacacggtttcgaatgccgcagctcctgccgcgcagcgcatcgctgccgtgaagggcggctccatgaccgccaacggcgatgtagacctgaccctgacggccgacgagaccacgacgaacggcctgcttgagatcacctgggatccgtccctgatggactatgtctccggtgtgagcacggcgcagctctcgagcttccagcccgccgagggcaagcttctcttcggctatgctgccgaaaaggagatcgccagcgacgccgttctggcaaacctgaagttccgtccgaaggacgatgtccactgcgacctcgaggtgcaggtcaagacgctgcagcgcaatgcggaaagcggccttgatctcagcgagaccatcgttgtcaagagcgacggtgtcgagcacaactggggcgaatggattgttacgaagcagccgacctgcttcgcgccgggcgaggagacccgcgtctgcgccgactgcggtgcagagcagacccgcgggatccccgcaagcaccgagaactgcccgtccaaggccttctccgacctggacaacacgcagtggtatcatgagggcgtggattacgtgctgaacaacgagctcatgctcggcgtcggcggcagcctgttcgagccggacggcacggtgacccgtgcgcagctcgctatggtgctgtaccgcgtggccggcaagcctgatgtgaagaacaccgccaatccgttcaaggatgtcaccgagggcgtctggtatgccgacgccgtcaagtgggcggcggaagccggtgtcgtcaagggcatcagcgccgacgagttcgctcccgaggtgcccgttacccgtcaggagatcgctacgatgctctatcgcttcgccaaggccgaggccgttgcggaggataagctcgccgctttcccggatgcagcctccgtcgccgattgggcgaaggacgccatgaactgggcagtcgcctccggcctcatcaacggtgtgaaggccgccgacggcacggtcacgctcgatgcacagtccggtgcaacgcgtgcgcagatcgcaacgctgctcatgcgcttcctcaagggctgatctcataagtaaaaaatttccctcccggttcgccgggagggaaatttttttaatgaatactgaaaactgaaaaatgaagaatgaataatagtggggaacggatcgactggcccgcagattttgcaatacaagttcagcggcgctaggttccagacttgtcattgcgaggagggcgaaagcccgacgcggcaatctcgggaaggcacttgcagctcgcacaagccgccgttaaaatggtgcgtaccgattgcgtctgtagcggcgctcactgcgcagccgttggcggctttgccgccttacggatgcggcgtgccccttgcgggtagtgagcgccttgtaggggaacattcaaccgtagaagtgctctggtgcaccactgcaccaccctgacgtgtcattccgaggagtgaagcgacgtgggaatctcgcagtacccggttgaatgacaggatactcccggcgaaaacgtaactgccttcccgagattgccacgtcggccgttggcctcctcgcaatgacaaatctgggggcctcgcgccatagag

SEQ ID NO: 11116 - DNA, 4776 bp, Unknown
  gut microbiota DNA sequence
acgtacatctggcagcctatatcccattctccatgacggaattttgaggccggtccaaaataggacttgatttctgtcgaacgatatggcataatttaactacagttaaaaccacaatcaaacggatgcttcaagcttcccccaagccaaaaaggaggaactcctatgaaaaaacgcatcgtgagcctgctgctggcgctgtgcctgctggccgggcttctgcctgccgtgaccccgcaggcggacgccgtcatcagcaccgtcatcggcaccagtctgaaaatgtgcacctcgctcgtcaagggcggcatatacgcctgcaggaacgggagcgagtatgacaacgccgggcagggcgtgctggccgtgttcaagtatgcgggcagcgatctgctcggcatcgacttcggcggcagctccagcggccagacgaaggagaccgtcatccagaaggtcgacctgagcaaggtcgaggcggagctcagcagcatcagcaagcagctcgaaaagaacagcgctgccatccatcagctggaacggaccgtctcgaacggcattgccagtctctcgcagcagatggagaatctgagcgggcagatccagaatgcaacgctcgagctgaagtacagcacctacctcaacacgttctttgagttcttcaaccagtattacgaggccctgagctactatgaccgccttgtgacggatatgctggacgaatccgcttcgcccgcctatcagaagaacatctacgaccagttctactccctccagaacgtggaatacagcggcaacctgcactctgccgtcgacaagctcggccgctatctgcagggcaagtacatctattccggtcccggcagcgttgtggacgtcctgacgcagtattacatcctcgcctatcagggcggcggcaagacggaggaggaggcgcgcgccgcggctgcgcagagcacgcaggacatgatcgtctacctctactacgcctatgtcatgggcgcgtattatgagcaggcgatcgccctgtaccagacggcctacatcacggaaaacggcggcctctatcagacggatttcggcacgatgatctcgcagaagcagatcgacgcgaccgtcaccgccctctggagcgacgtcgagcagacggcgggctgcattctgggcgacctgcgctcgaattatcatcaggacgtggcctttgaggtcgtctaccagacgccgggcggcaggatgctgaaccgcaccatcaccggcgacagcttcgtcatcgagaacggggccaatttctggctgcgcgacccggcggaggagctggcaaagtattttgacgaatccctcagcgaggccttctccggcatcgcgaaattcaccatccgcgcccaaagcgctgcggatccgacctatctgcagatccacgacaacgcgttcttccatgtgaagaccacggaagagggcgggtttgaatacggccgcagattcctcaagctcgacgtggagttcggcggcaagacgatgcagaccatcacgctcgtgctctataagcagatcgacagcggcccgtttgcgggcggcctcggcacggaggactatccgtatatcattataacggcggatcagttcgccgccatttcgccgcaggatacctcgaagcccagctatgcggactgtcagtttatcctgcataatgagctgaatatggagggcaagtccttcccgggtatgcggaacttcagcggcacgtttgacggaaacggccacgagatctacaatgtggttctgacgggcgtgggcggcgatacggcccataccgtcggcctgttcggcgagctgaccggcacagtgcgcaacctcgtcgtgcgcaatgccacggtgaccggcctgacggccgacggcgactccggcggccgctcgggcgacctctgtgtcggcgttcttgcgggtctggtcaacggcggcaggatcgaatactgcgcggtctacgacagctcggtcacgggcgagcacaacggcgcaggcgttgcctatgccggcggcgcggtcggcaagctggcaggcaaggaaaccggcgaggccggcgaggccgccctgcgcggtgtcgtctgtgtggatacctcggtccgtgcggtcacgacgaaggcggccaacccgcaggaattccttccgtgggcggacggcagcgcgatcgcgggcggtctgatcggctattacctgacggggaccataaacgagtgcggctatatccagtccgagaagttccagggctccatcagcgccaagggtgcaacgggcgcggcggcaggcggcctgaccggctatgagcgtgcgccgttctccaatctgatgtggctggcgctcggcgctgcgccgaaggtcgagaagcagaacgcctctgcggaggaccgttactatcaggtcggccttctgacgggcaacggctatgcggccaatgcggtctatcacctctggggcagccgcgcgtccgagcgcggaagcacgccgcttaacggcgacccgtggtggcagctccagtggagcacgaaggcagtcgacaagatcaccacgaaggccctgcaggaccatatcgatggggtaaactggaaggaaaagccgtatttcgacctcgaggcctacacggagcgcgaggacggcgcgggcctgtatccggagttcgacctcggcacgagtggctcggaatatcaggccgttctgctgacggacggcccgaacaggaagaactatgtcgagggcgactatctcaccctctccggcctgaacgtctggcaggatgtcggcttccatgtggaggaaggtgccaagtacccgtatttcgagatcacggagggcgcaaatctgatcaacaagccgctgccggccggagaataccagttcgccgtgcgggcgtccaacggttatcgcgtcacctacaagatcacggtgaagcctacggagcacatctacatctcggctacgacggagccgacctgcacggagcctggcttcacgaatctgacgtgcctgcactgcggcctgacgaagcgggccggagagctggaggcgctgggccacgatgtcgtgacggacgccgccgtcccgccgacgtgcgtttccgacggcttgaccgagggcagccactgcgcgcgctgcggagaggtcttcacggcgcagacgacggtcccgtctacgggcgagcatgcccatgtggtcacgccgggtaaggcggccacctgcacggagccgggcctgagcgaaagcgaggcctgccccggctgcggccttgtgttccgcgaggcgactgtgctcccggccctcggccatgacatgctcgaccacaccatcctcgccccgacctgcacgacggacggcatgcagcagagtgtctgcagccgctgcgagctgattggcccgctgaagtccgttcccgcgacgggccacgacatgcagacccgcaccgtccttgccccgacctgcacggccgcgggcatggagcaggaggtctgcacgcactgcggcgagaccggtgcgctgacgaatctgcctgcgctcggccacgattatgcggccgtcgtgacggagccgacgtgcgaaacgccgggcttcacgacgcacacctgcggccgctgcggcgaccactttaccgacagctacatcgcccccacgggccacacctacggcgatggcgtcgtgacgcgcgagccgacctgcacccgcgagggcgagatgacctacacctgctcctgcggcaagactcacacggagccgatcgcgaagctggcgcacagctatgtgccgcagatcgtcgagccgacgtgcacggagcttggctacacggcctatgtctgcgcgcactgcggcgaccggacgacgggcgactatgtccgcgagctgggccatgactggaacgccggaacggtcgtgcaggctccgcgcctgacgaaggagggcctgctggagcagacctgcagacgctgcggcgcggagcagaagacggtgctcccggtcctcgagtcctgcgccgggacgatctgcccgagccatgactatcacgatgcgccggagttcggccactggagccatgcaggcatcgattacacgctggagctcggcctgttccgcggcacgtctgatacggaattctcgccgaacgtcgccatgacgcgcgccatgctcgtcaccgtgctttatcgcctcgacggccagaaggagccgacgggcgcgaacccgttcacggatgtcgagccggacagctggtacaccgaggccgtgatctgggccgtggagaacgagatcgtcctcggcatgggcgacggcacgttcgccccggaggcggagatcacgcgtgagcagatggcagccatcctgtatcgctatgcggcctatcgcggcgacgatatgacgacggatgccgatcttgcggccttcccggacgaggagcgcgtcagcgcctatgcccgcgaggcgctggcttgggccgtggaccgcggccttatcaacggcgtggcgcagggcggcgagagctggctcgagccgcaggcgggcgcgacccgcgcgcaggtggcaacgatcctcatgcgcttcctgaagcagaaataagcaacgataacgcgcagcagcgccgctcatccgggcggcgctgctgtcgttaaaaacgtacaaaccgattgcgtctgtagcggcgctcactgagcgccaagcaggctgacgttgtttgcggtacaaattcagtggcgcaaggcttccaagtttgtcattgcgaggccccaaaggggccgtggcaat

SEQ ID NO: 11117 - DNA, 15289 bp, Unknown
  gut microbiota DNA sequence
cggttttgtttccaaacataggtcaaagcggctatggccactttttcacgaggcaaagccggcacaacttttttcgatcattttgcatcgaatatcccccgggggagcttccggaaccgaatttcgtatgctaaaatgcatcacgagaacgggcgaaagggcccgaaatgacaggaggaccacccccaatgaaacgaattcttgcactgctgctggtgctgagtgccgttctggcgctggccgcatgcagcaaaaccccggcagtgaccgaagacgaaggcacgacgctcgtctacggcagcggcgactacacccgcatcaaccccgccatggatgagcacggcgagatcaacgtgctgctcttcagcggtctgaccgcccacaacggcagcaacgaggtcgtttccggtctggctgaatcgtgggaatacgatgagagcgcctgcacctacaccttccacctgcgcgacggcgtgaagtggcatgacggcgagccgttcacggccgaggacgtaaagttcacgatcgaagccatcatggaccccgaaaacggctcggaaaacgcgccgaacttcgaggatgtggaggagatcaccgttcccgacgacaagaccgtcgtgttccgcctgtccgcaccgaacgtggcctttcttgactatatgaccatggccattctgccgcagcacctgctgcagggcaaggacatgcaggagtcggacttcttccgccatccggtcggcaccggcccgtataagctggagagctgggacgccgggcagtccatcgtgttggtcaaaaacgaggattattacctcggtgcgccgaagatcgaccgcatcatcttcaagatcgtcacggacgacaatgcacaggctctgcagctgaagtccggcgagatcgatctggccctgctcgatccgaaaaacgcaaaggactttacggacaaggagggctatacctgctatgacatgacgacggcagactaccgcggcattctcttcaacttctggaacgactactggacggagaaccgcgacctcatccccgccatctgctacggcattgaccggcaggccatcatcgactctgtcctgctcgggcagggcatggccgcctacggtcccctgcagcgcaacatttataacgatcctgacgtttcgcactatgactatgacccggaaaaggcaaagaccattctggaggacgcaggctgcacgatgagtgaaaacggcttctacgagcgaaacggcgaggagatcggctttgtcatcagcgtgatggccggtgagcaggaccgcatcgacattgcacaggctgccgcacagcagctgcgcgatatcggcatcaactgcacggtcgacattcccgcacagatggactggggcggacagatggcctgcctcatcggctggggcagcccattcgacgctgacgaccacacctataaggtgttcggcacggacaagggcgcaaactactccggctactccaatgccgccgtggacagctacctgaagctggcccgcgagacctccgacccggagcagcgccgccagtattacgccaagttccaggaggctctggccgccgatcccgcctatgccttcatctgctacatcgacgcgaactatgtcgccgtcgacggtctgcagggcatcgcggcggataccgtactcggccaccacggcgtcggcattttctggaatgttcaggaatggacgattgagaaataacaacggaaaaaagcatcgggaggctcgcagaaccgggcctcccgcatgtacgttttaacaggtgatcctatggcagagctactggaagtaaaaaatctgtccgtcagctttttcaccccggcgggagaggtccaggccgtgcgcgacgtcagcttttcgctgcgcgcgggtgaggtcctcgccatcgtgggcgaatccggctgcggcaaaagcgtgctgtgtaagagcatcctgcacctgctgccgccgagcgcgcggcgcaagagcggcacgatcgcggtaaatggccgtgatatcacgcggctgcgggaacgcgagctgcagaagcttcgcggctcattgttttccatggtatttcaggacccgatgactgcgctgaaccccagcatgaccgtcggcgcgcagctggcggccgctgtccgtgttcatgcgccccgcctgcgcggcgcggctctggagcagcgcgtgctcgagctgatgcgccttgtcggcatcgaccggccggaggagcggcgtggcctgtatccgcaccacttttccggcggcatgcgccagcgcgtcgtgctggccattgcgctggcgggcgacccgtcgatcctgtttgccgacgagccgacgaccgcgctggacgtgaccattcaggcccagattctcgatctgctgcgcgaaattcagcagaagctcggcacggcaacggttttcgtcacgcacgacctcggcgctgtggcgcgcgtggcggatcgtgtggccgtcatgtacgcagggaagatcatggagctcggcacggcggaggatatcttctacgatccgcgccacccctacacctggggcctgctgcagtcgctcccggcgctgtcccgcgggaagccgcggctgcataccattcccggcatgccgcccacgctgatcgacccgccgaagggcgatgccttcgcctgccgcaacgaatatgcgcttgccatcgactatgaggaggagccgccgatgttccgcatttccgacacccattttgccgcgacgtggctgctcgacccccgggccccgcacatcacgccgccgatcggaggcgagcgccatggctgagccgcttctcgaggtgcgcggtctgacgcacgccttcccgctcgggcgaagggccgtgctccgcgctgtggatcacgtctcgttcacgctccggcgcggcgaggttctcggtctcgtcggcgaatccggctccggcaaatcgaccatcgcgcgctgcgtgatgaatctgctgcggccgcagagcgggcagatcctctatcgcggcatcgacatctgtgaccgccgcgccttccgcgcgaaccgccgcacgctgcaggcagagcggcagatcatctttcaggactccggctcgagcctgaacgggcgcatgcgcgtgtgcgatatcattgcagagcccatgcgcatccagcacgtccgcccgccgcgcggcagctaccgcgccgaggcggaattccagatgcgctatgttggtctggacgcgggctatctggacaaataccccggtgagctttccggcgggcagcgccagcgcgtcgccattgcgcgcgccctgtccatggagccggagctgctcgttgcggacgagccggtcgcctcgctggatgtctccattcaggcgcagatcatcaatctgtttcgccatctgcaggaggagcacgggttctccttcctgtttattgcccacgatctggctgtcgtggaattcctctgtgaccgcgtcggcgtgctgtatcagggaaggctcgtggagctggccccgacggcatcgctgttcgccgcgccgcagcacccctatacgtgcgcgctgctctcgtccattcccatcccggacccgcgcctcgagcgcgcccgcaggccgctcgtctttgaggggccgctgccggacggcggcacatggacggaggtcgcaccggagcattacgttctgctggaaggagggggcgccgtatgaaggtccgccggtttttcctgcggctgctgccgcgcctcggcattttcgtgctgagcgtcctgctgctgtccgttctgacattctatatctcccgcctggcccccggcgacccgcttgtctcctactacggcgaccgcgtggaaaaaatgtcccccgccgagcgcgaatgggctgaggacaagctcggcctgaatgatcccctgcccacgcagtacgcccgctggttcagccgcgcgctgcacggcgatttcggcatctcctataaatataagatagatgttctggagctgatcggtgaccgcattggcaacaccctgctgctcggcgggctcggcttcgtgctgctgttcatactggctctgctgctcggcgcgctgtgcgcatggaaggaggaccggccgctcgaccgcatcctctgcaagcttggcacggtgacgagctgcatcccggaattctggctgtcactgatgctgatcctgctgttttccgtcacgctgcgctggctgccgagctccggggcctacagcgtcggccacgcggacgatgtcggcgaccggatcgtgcacctgatcctgccgatgtccgtcgtcgtgctgagccacctgtggtactatgcctacctcgtgcgcaaccggctggtggaggagctgcgcgcggactatgtgctgctggcgcgcagcgagggaatgggccgggcgcacatcgtgctgcggcagtgcctgcgcaatgtgcttccgtcctatcttagcctcatggccatctccgtgccgcatgtgatgggcgggacctatatcgtggaggccgtgttctcctatcccggcctcggcacactgtcctacgagagcgcgcgctacaaggactacaacctgctgatggtgctgtgcctgctctccggcgcagtcgtcatcgcatgcagtctgctggcgcaggccatgaacgcgcggctcgacccgcgccttcgcccggcggaacgggaggtgacttcaaaatgacagacgaccgctttcgtctggtcggcgtccggccgcagtcgcccgcagcaccggtacgccgcgcgccgtggtaccgcggcaagccgattttttcggccgccgttctgacgctcatcgtgctcggctgcctgttctgcgaggcgctcctgacgcacgatccgacctatctcgaccttgcgcactgcaatgaagcgccgtcgcgggaatttctcttcgggacggacccgatgggccgcgatattttctccatgatctggtacggcgggcgcatttcgctgaccatcggcgttctgtccacgctgctgtccacagccatcgccattctgttcggcacggtcagcggctgcgcgccggactggctggaccgtctcctgatgcggctgacggaaattctgctgagcgtgccgaacctgctgctcgtcgtgctgctgcaggccattctgggcacggcaaatgtgctcacgctctcgctcgtcatcgggctgacgagctgggccagcatcgccaaggtcgttcgcacggaggtgcgcaggctgcgcagcagcgaatatgtgctggcctcgcgctgcatgggcggcggcttcttccacgtcctgcggcagcaccttgcgccgaatttcttctcgtccatctcgttcatggtcgttatgaacatccgcagcgccatcacggcggaatcgacgctgagcttcctcggcatcggcctgccgatcgaggtcgtctcgtggggcagcatgctttccctgtccgaaaaggctctgctcacggacgcatggtggatcatcgtcatccccggtgtgttccttgtggcaacgctgctgtgcatcacggagctggccaacaccatgcgccgctcgacccgcgaacgcacgctataaaacaggattgggaccatcggctaccgccggtggtcccaatcgttttatttctgttccgggaagagccgcacaatggcctgcgccgccgctgcctgctcggcgcgctttttgctcgtgccggagccggtaccgacctccctgccgttgagcagaacgcggacgttgaactccttgcagtggtccgggcctgtctccgagatgagctcatagctcagctgctgcgattttttgcgctgcacgagctcctgcagctccgtcttataatcgtgggtcttttccgcctcggcgagctgcggcaggatgagccgcgtcacgatgtcgctggccacggcaaagcctccgtccagatagctggcagccacaacggcctccataacatcgcagaggatgctcgggcggcggcggccgccgctttgatcctcgccgtttccgagcagcagatgctcgccgagcgagagacgctccgccacggcggcaaggctcttttcgcagacgagctccgcgcggatgcgcgtcagatcgccttcgagctttttggggaaagtccggtacagatactccgccgtcacgaagccgacaatggaatccccaaggaattccagccgctcatagctgcgcagtgggtcctgatagatctcgtttgcacaggaggtgtgggtcagcgccatgcgcagaagctccggatcgcggaacttgtagcccaacgccttttccagcttattcagcatgttcttcctccctgggcaggatcatctgcccgatattggcacgaatttcctcgcagaagccgctctcgaccgcgcggatggcctgccggatcgcgccgcggatggcggcgtcgtcggacgagccgtgcgccttgatgaccgggcggctgatgccgatgacgatggacccgcccgtttcgcggtagtccatggtcttgcggatgccgttgatgccctttttgcacagcagcgcgccgagcatcgtcagcggattgcggtagaacatctgcttcatcatgtcggacatgaacatggccgtgccctccatggtcttgagcaggacgttgccggagaagccgtccgccacgataacatccgccgcgccgaacggcacatcgcgcgcctcgacattgccgacgaagtggatagtcccctgctcaccggcgcgcttcagaagctgatgggcctcgcggtggagtgggtcgcccttcgtgtcctccgcgccgttgttcagaaggcccacgcgcggcgactcgatgccgagcgccttctgcgcgtagaacgagcccatgcagccgaactgcagcaggaattccggcgtgcactcggcattcgcgcccgcatcgatgagaatggcgtggccgtccttcgtcggaaggaccggcgagaacgccgcgcggcggataccgcggatgcgcttgacgagcagcgtggccgccgtgagcagcgcgccggtattgccggccgagatgaacgcatcaccgccgccctgcgccagcattcttgcgcccagcacgagcgaagagttcggatgctgcttcacgaccgcggcgggatcgcagtgcatgtccaccacatcctcggcattggcaagctccacgccgtccgggagcgtatcccagccctgagccttcatgctggcaaggatgtccgcaccgcggccgaccagaacgatctgcacgccgaactccttggccgcctccagtgcaccgcgcaccacggcatccggggcgttgtcgcctcccattgcatccagaatgattttcatgcctgttccctcatttctccatggcctccaggtgcgcaagcgaccggttggcaatggccagattcttgtttgcttttccacgcacccgctgctcgagcggggcgatgatgccgaaattcacattcatcggctggaatgatgccacggtgctgtcgctgacatagtgcgccagcgcgccgatggccgtcacggtgccgaagtccgggacgggccttccctccagccgcgccgccatgctgacggcggcaagatagccggaggcgcacgattcgacatagccctccacgcccgtcatctgcccggcgaaggcgaccatggggtcgcgccggtctgcgtagcacgcgtcgagcagcttcggtgaattcagaaacgtgttgcggtgcatcacgccgtagcggacgaattccgcatcgtgcagcgccgggatcatggagaacacgcgcttctgctccggaaaacgcaggtgcgtctggaacccgacgagattgtagatgtttccggccgcattgtcgcgccggagctgcacaacggcatagggctcgcggcccgttgccgggtcccgcaggccgacgggcttcagagggccgtagcgcagcgtgtcctcgccgcggcgggccatgacctcgaccggcatgcagccctcaaagacgtttttgtcctcaaagccgtgcacctccgcttcctcggcggcggccagctcccggacgaaggcctgatattcctcgcgcgtcatggcgcagttgatgtaatccgcgctcccgcggtcatagcgggaggcgtaccacgccttcgtcatatcgatggactccagcgtgacgagcggcgcagccgcgtcaaagaaatgcagataatccgtctggccgaaatagcggccgatggcctcgctcatggcgtcggacgtcagggggcctgtcgcgatgatgaccggccccgccgggacctcggtcacctcctcggagatgaccgtgatattcgggtggctgcggatgcgctctgtcaccataccggaaaagccgtagcggtcgacggcaaggcagccgcccgcctcgacgcgtgtggcgtcggcgcactgcaggatgaggctcccgagccgccgcagctcctccttgagcaggccgacggcattttccagccggtcgccgcgcagggagttggagcagacaagctccgcaaaatccgcgcagtggtgcgcaggggtcatttttaccggcttcatctcggacaggcggacggcaaagccgcgctcggcaagctgccatgcggcctcactgcccgcaagtcccgcgccgatcacgcgtacttcggtcatgcttcgctctccgtttttgtctttttgcgtgcggcaggctttttctccgccgcttttttcgtggtcttcgcagtttttgcggccttggcggccttggccgtcttcccggtcttcgtcgttttggccgttttggcgggcttcttttcggtctcctccgcagccggggcgatctcctcggcattctcgacggtgtccgtcgtggccttcggcatgcggcgcttataaccgcgcttatcctccggcaggaagtccgggcacttttcgttgatgcagaacggcttcatctggccgcggccggactttttgaacatcgtctgcccgcagctcgggcaatcctgcgccgtgggcacgtcccacgtcataaagccgcactccgcgccgcgctcgcaggcgtagtagacatagcccttttttgacttgcgcttgagcatcccactgccgcagcgcgggcagcggcccggcatacgctcgacgagcggcttggtattcttgcactccgggaagccagggcaggccaaaaaccggccgaagcggccgctcttgatgaccattttgcgcccgcacagctcacagacctcatcggtctcttcatccggcaccttgatgcgcacaccgtcgagagctttctcggcatcctccatctcgcggtggaaatcctgatagaaatcgcgcaggacggtcttccagccgacctttccggcctcgacctcgtcgagctggtgctccatattcgccgtgaactcgacatcgatgatgtcgcggaagcgctcgatcatcagctcggtcacgacacggccgagcggcgtcggccagaggcgcttgtccttcttgatgacgtactcgcggtcctggatcgtcgcgacgatcgacgcataggtcgacgggcggcccacgccgcgctcttccatcgccttgacgagcgtcgcctcggtgtagcgcgcgggcggctgggtgaaatgctgggccttttcctgcttttcggcagtcaggcgttcggagccgtcgagatcgggcagcgaggaagagcgctcctcggcctcgtcgtcgcggccctcttcatacacggcggtaaagccggagaatttcagaatctggtcgctggcgcggaaggcatggcccgcgcagcgcgcgtcgatctgcacggcgtcatagcgtgcatcggacatctggcaggcgacgaagcggctccagatcagcttgtacagccggtactgctcgcgcgtcaggtctgcctgaatgctctcggggtcgagccggacattgctggggcgaatggcctcgtgcgcgtcctgcgcgccctccttcttgcggaaatggcggggctggccgggatagtaggccgggccgtagcgatcggtgataaaatcacgcgcagcggccagcgcctcctcggacaggcgcagggagtcggtacgcatataggtgatgaggccgacggtgccctcgccgctgatgtcaacgccctcatagagctgctgcgcaacggccatcgtgcggcgcggcgtcatattgagcttgcgggaggcctcctgctgcagcgtggaggtgatgaacggcggcgtcggcgagcggcgcttttccgtgcgcttgatgcccgcaatggtgaattcctgcccggcgatgtcgcgcaggacctcgtcggcctcggcctcgctgtgcagctcgcgcttcttttcctcgccgtaatagtgcgccgtgaagctgcccggcttgttcaggcagcgcagcagcacgtcgatcgtccagtattccttcggctcaaaggcctcgatctcctgctcgcgctccacgacaagacgcgtggcaacagactgcacgcgcccggcggacagaccgcggcggatcttcttccacagcagtggactgagctggtagccgacgatgcggtcgagaatgcggcgggcctgctgggcatccaccagattataatcgatgccgcgcggctcctgaatgctgcgcgttacgacgtttttcgtgatctcgttgaacgtcacgcgctccgtcttgtcgtccggcagctccagcagctccttcagatgccacgagatcgcctctccctcgcggtcagggtcagttgcaagatagatgtgctttgcggctttggaagcgctgcgcagctcagagatgatcgcggccttgctggccagtggctgatagtccggttcaaaatcgtgctccagatcgacgcccatcttgctcttgggcaggtcgcgcaggtggcccatgcaggcctcgacgcgataatccgggccgagatattttccaatggtctttgctttagacggtgactcgacgatcaccagattcgatccctttgtcatgaagggaacctccatatatccattatcctccggcgcgctgatagcggttaccgggaagctttttggccagccccttgatctggagcatggtcatggccgcaagcaggcgctgcggcggaaggcccgtatgctccgtgagaagatccgcaaggatcggctccggcgtcagggcggcatagaccgccgcttcgtcgccggacagggcgggcggtgctttctttctgtcactataaggccttgcaggcggattgtcaatgtcttttttgtcgagggctggggacttttccggtgaaggcgctgccgggcgggccggttttgccagtctctccggcaggggctgcgcagggacggccgctgcgtaatgcgacccaaagcgctgctccatcacctcgcggcggcgaccgtccgccagcttgcccggaaacaggtgcgtgtattcctgcagcagctcccagccgttttcgggcatgagcgcaccctcgcgcagcaggcgattcgtcccctcgcacgaggcgacgccgagattgcctggaatggcaaatacgtccctgccctgctccagcgccagccgcgccgtgatgagcgcaccgctctgcgccgaggcctcgaccacgagaacgccaacggaaaggccgctcagaatacggttgcgcaccgggaaattgccgcgcatcgggctcgtccccggcgggtattcgctcaggaggcagcctctcgacgcgatctgcgcaaacagctggccgttttccggtggataggcgatgtcgagcccgcaggccagcacacaaacgaccggctccggcaggtccatcgcgctctgcagcgccatggtatcgatgccgcgtgcaccgccggacatcacaagcccgccgcttgcggcgatcaggcgggagaactgcttggcgtgcagcaggccgtaggcgctgcaccggcgtgagccgacaacggcgatcgcggcctcgtggtcaaaatccggcagacggccctgataatacaaaagcgcaggcgggtctgcaatgttgcgcagccgctcgggataggcaggctccgcataggtcagaaggcggatgtcaaaacggtcgcactgcgccagaatgcgctccgcgccgtccagcgttttgtcgagcagcggctcgagccagctccgccgcaggccttcctccgcctgcagcgcggcccggtccatggcataaatgcgctctgccgtgccgaaccggcgcagcagctccgcgcggccccggaccccgatgccgcttcgcgttgccagccaaacccagtgcttctgcatctgcgcgccctccttccgtgttctcccgcgctacggccgcatctgccacagcacgatcgccgccgcgacggccgcattgagcgactcgcagcgcggctgcatgggaatgatgatctgccggtccgaggcggcgagcagctccgggcaaatgccctgtccctcgctgccgatgacgacaagatggcgcatcagatcgacctcgcgcagatcgcacgccgtgtcggacagcgccgtcgccgcaatggggatcccggcggcatggcagacacggaggacgtcctccatcggtgcgctctgcggcggacggcggaacaccgcgcccatggaggcgcgcaccgtcttttcggaaaacggatcggcgcagccgttcgtcagcaggaccggcaggtcgaaggcgtcggccgtgcgcaggatcgtgccgaggtttccggggtcctggatgcggtcgagcaggagcatgccgggctgcacccggagcgcgccctcctgcggcaggcgcagggagaataaaacgccctgcggcgtgcgcatactcgaaacgctctgcatcaacgacgcagggacctcgaccagacgtgccgacgatgggagtgccgggcagcgctccggctcgctcgtcaaaacggccgtcacctcgggataccacttgagtgcctcctccagaagcttccagccgtccgccacaaattcgccgcagctctcgcgataggcgcgcgaggtctgcagcttccgcatgtgctgcacgagcggattgtgactgcttgtgatacgctccattcgggaggccctcctctggtttgatttctatattaaatagtatagcacatcacttttcggaaatcaatgcatgttttcccgccgcatcgtgcggccagttgcgtcaaaatgcgaaatatgctataatgcttacagatacgatattccgggagacgatcggcagcggcagcagcgcaacgattatggatttcatctatgataatcaggcgttcgccttgaattattccaccaacaacggcagcagctttaccacctattactatgtcttgaacctgcaaggcgatgtggtcaagttggtcgatggcggcggcacgtctgtggcttcctatgcctatgacgcatggggcaatatcctttcaagctccggctccaaggcagaaatcaaccctctgcgctaccgtgggtactactacgacaccgagactgggttctattacctccaaagcagatattacgacccggtaacacatcggttcatcaacgccgacagctactccagcgcaggccaaggaattattggctataatatgtttgcatattgcaataatagcccagttattcaagccgatcataccggggagtttggcctattaacactggtcagcgctgtggtaagtgcagctgttaatgttgctacaacatatattgcagccaaagcaacaggccaagaatatactcttaccgatgcacttgtatcggctgcaataggagcagtaaatgcaattccgggcgctgggccttttattgcaggtggaatttcgggcgcatactctgcatatacggcggttaaaaatggagctactgctggtgaggctgcgctatgcttcgcagtatccgctactgcaaccacggcaagcattggaaatttggcaaatctcgggactgagtctgctttacgcattgcagcaactgcaagtgcagacttagtattcggaacagggtataattgcatagctgcaacaacaaacaaggccgtatctgtgaaggctgaagaaaggaaagcatcaggcacacaaacaaccagtacgactcgttctcgtaaaacgcaaaaacgcggaaacaaacgtacagggtataccatgtgcttgtactgacggtgaatacatgataataaaatccgacaaagggaatatagtttttattatattttcctatatactgttatcactcatcgggggactttttgtttctgagaacaatggcctaaccagcgcagtctgcatggggctgcttgtttggattataggatccatcttctgcataaggtggtatattgctgtttttcgtaaaattgcaataggttcaagcggtgtaactatctcattatttcacaaaatcaaattttatccctgggattccatgtcaatatattacgaatcatatcaaaatcagctgggcctgcgcctacagtataagggcaccgtaatactttctccacgcaggtttaaaaaaccgaagcatatttctcctcttatgtactgcattgtattccatccgtattcatttacatttataaacttttatgaggagtcaataatgaaagatgctccaaatgtatatcctgttaaaaagcaagagtttctttcaaaaatgactgccctaggtattattgactccaactcattcctatctgcctagcagaaaattaaacaatatttatttaacattggccgactgcaaggcatctgcgacacaatcgctgccttatcattttacaaaagatgcagtgtgcggtacaatgccttgcagccatgctttgcttgcattcacaaataatagctcaaaatcttttggaacttcctcacatggtggcaagtgtgctgtcagctaccgaataaaaagtggaaagagcaaaatcaaggaggtatcaactcaaatgaaagacgtaatcaaaacatttgttcaaatcgtacacattttgtcgtttgggggtctgttgctttgtggggcgcttggagttgtatatgaaatcattggacctgccaaatatgaacaattactgtcttcgtttggtatctctaatggatttgaacgcacttggctttgggctgtgatgatgttgattttgttactctctacccactttattaaagcaaaattattatctaaataacaaccggaagctggaaaggcgccgggcaggctgcactggaaggcatgggcgacggcgctcttaccggcgcaatcactggcgcaatacaaggcggcatgagcggctattccggttatttgaaaaatggcgcatgctttgttgccggaac

SEQ ID NO: 11118 - DNA, 8075 bp, Unknown
  gut microbiota DNA sequence
ctcctcggaatgacaaatctggtggctttgcgccacgaaattaacacttcaatatctgcaactgcccatggcgctcactgagcgccgctacaggcgcaattggtgcatgccattttatcgatacccggtacgaatcgtcagtgcgtcgccgggagcggcgtgccgctcccctacgatggtgcgcctcatgatttgcccgattgcggtttttccggcggtgtgctatactatatccataaaccaatgataggggaggcgctgccatgtcttttttatactggctcgaatccatccgctgcccgtttctcgacgccgtcatgcaggcgttcacctgcttcggcgaggagctggcgttcctgctgctggcgctgacgatcttctggtgtgtcagcaaggaggagggctattatctgctgtttgtcggcttcttcggcacggtgctcaatcagttcctcaagctgctgtgccgcatcccgcggccgtgggtgcgcgacccgagcttcacgatcgtggaaagcgcgcgcagcggggcgggcggctattccttcccgtccggccacacgcagaacgccgtcggcacgctcggcggcattgcccgctggcacaaaaatcgcgcgctgcgcatcgtgtgcatcgtgctcgcggcgctgacggcattttcccgcatgtatctcggcgtgcacacgccgctggacgtcagcgtggcggctgtgacggccgttgtgctgatcttcgtgatctatcctatcgtgcgcagcgcggcagaggacccgaaaaaaatggccgttctgctcggcgtgatgaccgtcgtggcgctggcctatgtgatctatgcgaattttgcccgtttcccggcggacgtcgacccggacaacctctttgagggccgcaagaactcctgctcgctgctgggtgcgctgctcggcttctgcgtgggctacacgctggagcggaagtatatccgctttgagacgaaggccgtctggtgggcgcaggtgctcaaggtgttcggcggagcggcgctgctgctggctgtcaagcagggtctgaagctcctgttcgccgccgtgggctttacctggatcggcacacatgccatccgctatttcttcgtggtgctgctggcggcgacggtctggccgctgacgttccggtggttcgcacgactggggaggaaacaagcatgaattatgcagctatcaagacctgtgatatcgcaaacggccccggcgtgcggacaagcctgttcgtctcgggctgcacgcaccactgcaagggctgcttccagcccgaaacatgggatttttcctatggcgagccgtttacgcaggacgtcatcgacacgatcctgcattctctggagccggactatgtggccgggctgaccctgcttggcggcgagccgttcgagcctgccaaccagcccgccgtggcggaactgctgcggcagctgcgcgcgagctgcccgggcaagaatgtctgggcctttacgggcttcctgctcgaccgggacctgctgtccggccgggtcggcgatgcggcccttgtgcggcagatgctcggctgcatcgacgtgctggtggacggcccgtttgtgctggagaaaaaggaccttgcgctgcggttccgcggctcgtcgaatcagcgcctgatcgacgttccggcaacgttaagctccggagagatcgtcctgtgggacgacggctatcagcgtggagggcattatgatgcaaaaggtacccgttaaaattctgcgcgagggcgcggcgctcccaacctacggcacggccagctcggccggggccgatctgcgcgcctgtctggacgctcccgtcgtgcttgcgcccggcgagacgcgcctgatccccatcggcatcgccatggagatcccggagggctatgtcggtctggtatttgcccgcagcgggcttgccagccgccgcgatctggccccggccaacaaggtcggcgttgtcgactccgactatcgcggggaattcttcgtccccatgcacaaccacggcgcacagccgcagaccatcgagccgggcgagcgcattgcccagttcatcctcacaccctatctcacggcgcagttctttgagacggagacactgacggacactgcgcgcggcgagggcggcttcggctccacgggggcgaaataatggcgggctttcttccgatcaacgcgcgcgagatgcgcgccctcggctgggagcggccggactttgtctatgtcctcggcgacgcctatgtcgaccacccgtcgttcggccatgccatcatcagccgcgtgctcgagcgtgcgggctaccgtgtggccatgctgccgcagccggactggcgcgatccgtcgtccgtgctggagtttggcgagccgcgcctcggcttccttgtgacgggcggcaatatggactccatggtcaatcactattccgtcggccgccaccgccgccgcacggatgcctatacgcccggcggcgtgacgggcaagcggccggactatgcgacggtcgtctactgcaacctcatccgccgcagctttccgaagatcccgatcctcatcggcggcatcgaggccagcctgcgccgcctggcacactatgactactggtctgacagcctgaagcgctccatcctgctcgattcgcaggccgacctcctgctctacggcatgggcgagcgcgctatcgtcgaggtcgcggacgccatgaacagcgggctggatattcacgatatcacctttgtgaacggcacggcctaccgcacgcgcgactgctccggcgtggtggacgccatcacgctgccgtcctatgacgagctgcgcgccgaccgccgccgctacgccgagagcttcgccgttcagtaccgcaacaccgatccgttttccgccaggtgcctcatcgagccgtacggccgcgagttcgtggtgcagaacccgccgcagccgccgctttccacgcaggagatggacgacgtctacgctctgccgtatcaggacacctatcacccgtcctaccgcaaggcgggcggcgtgcccgccatcgccgaggtgcagttcagcctcgtctcgaaccgcggctgcttcggcggctgttcgttctgcgcgctgacgttccatcaggggcgcatcattcagacacgcagccacgactccctgctggccgaggcggcgcgcatgacgcatcatcccgatttcaagggctatatccacgacgtcggcggcccgacggccaatttccgccagcccgcctgcgaaaaacagctgacgcacggggcctgccagaaccggcagtgcctgtttccgacgccgtgccgcaatctgcgggcggaccatacggattatgtaaacctgctgcgtgagctgcgcgccatccccggtgtgaagaaggtcttcatccgcagcggcatccgctttgactatctgctggccgacgaggatccgaccttcctgcgcgaactggtggagtaccacgtctccggccagctcaaggtcgcgccggagcacgtttcggatcaggtcctgcgctatatgggaaagcctcgccacgcggtctatgaaaaattctgccgcaaatatgccgcgctgaacgaaaagctcggcaaaaagcagtatctcgtgccctatcttatgagctcccaccccggctgtggcctgcgcgaggccgtggagctggcggaatatgtccgcgacctcggctatatgccggaacaggtgcaggatttctatcctacgccctcgacgctctcgaccgtcatgtactatacgggcctcgatccccggacgatggagccgatctatgtgccgacggacccgcacgaaaaagaaatgcagcgcgcgctcatccagtaccgcgacccgaagaactatgcccttatccacgaggcccttgtcaaggccgggcgcacggacctgatcggctatggcccgaagtgcctcatccggccgcgccgcggcgaggcagaaaaggcgccgcacccggcgcagaagcagcccgcacaaaagcgccccgcgcagaagcgggagaggcccgcagaaaagaaacctgcggcaaagccgcgcaaggcgcagcctgccgcaaaggagccgcacagagcggagcgcggggaggcgttcggcaagccgacggccgcccagctccggcaggcggagcgctatctgaagacccgaaagaaaaagcagactgtcaaaaaaccaaccaagccaaaagcttcagggggaagaaacgtgtgaaaggaaaccgtcagggtgtcctttcgcgtttgatcgccagccgcggcgggactttttgacaagctgaaaggatggaaccgatatgagaccttccaactatgatctgcaggcgcaggcggcggggcacagcttcgccgcgcaggacctcgatgccatcgcggcgcgattcgccctgcggtgcgatgagacctatctctatctggagcttctgcatgagccgctgcgcctttcccgcgcggacggcgcggccgagcggcagcacggcggcgtctggatgcctgcgcccttcggcgcggccatgacggcctatgatctgctgagcaatccgaacggcttccccgttctggccgggcagtggtgctcgcacgacagcttcaacgccgtgcggggcggcacgctgcaggggcagctgaaggcctccgtcacgccgcccgccgcccagcatttctccggccggatcgaccggctgcggcaggccgtggcacggctcggcggcacaccaacggacggccccggcgatttttccgccgtgctgccggtgctgccgttcttcccggtgctgctgcgcttctgggaggcggacgacgaattcccggcccagctgcagttcctgtgggaccggaactccatgcgctacctgacgtatgaaacgtcgttctatacccacggcgcgatcttggaccgtctgctcgaggcggacatgtaatactgattcctgattaaaacatttcatcaggaatcccgtgtgctacgcacactcgcatcgtgctgacgcacgctgcgccgtctcatgcagaatctgacgcgccctcggcgctataaaaagcttttaaagctttttatcagattctagtataacacttttgtgaatgaccttgcaaaccattgaattaccgtggtataatgagataaaatacaatgagggcagtaactgcaggggctgtcgagtcccttcggcagaaaagagccgccgatggccaagccgtgcggtgctgccccatacaaaaaggagtcctgactatgttttctgcatcggagcgtgttctctatggcaagcgccagctgatcgaggtgatctgtcagctccgttttccgacgatcctttccatcagcgcgaaggagcctgccgaatttcaggaggccatccgcgccgagttcccgcgctatgcgcgcaatctggaaaagctcccgcccaaggtgatcggccagccgggcgccatgaagctcgaggagcagccgacggtcgtgaactatcagttcctgacggccgcaggcgactggaaggtcaacctgacaaacaccttccttgcgctggccacgccggtctatacgacgtgggaggattttgcccggaagctcgacgaggtgctggcacagttcgtcgccatctatcacccggcgtattttgagcgcatcggcctgcgctacatcaacggcttttcccgccgcgccctcggtctggagggcgtgccgttccgcgaccttattcagcccgcctatcttggcctgatggcggaggacgacgtgcaggagcagagcgtccagcgcgtcacgcaggatgtggagatggcgctggcgggcggctgccgcttgaagctgcactgcggccccggtatggtcaagcgcggcaatgtcgaggacaaggaggtccgctttattctggacaacgacgtcttcatgaacggcaagatcgagctgaagcactccgccggagcgctcaacaccgtccatacccatgcggaccgcattttccgcggcgcgatcacggatcagctccacgacgccatggagccgcagccgctgtaatactgttttctgattaaaatctttcatcagaaaggttccgcctttggcgtaaccaatttcgcgattttggaaaaatcacgaaatctcgtctcataatgatcttcatattaaaaccttccattttatgaatgaaaggttttaattgaatatcagtataatttccatgcgaggtgaggcgcaatgccgtttttctatgtagactggtactatatcgttctggtgctcccggcggtgatcctgtcgctctgggccagcgcccatgtcaagagcacgttccgccgctacagtcaggtgcgcaatgcgcgcggcatgaccggcgcggaggccgccatggcggtgctgcgcgcgcacggcgtgaccgatgtgcgcgtggagcatgtgtcaggcgatctgacggatcattttgacccgaagggccacgttatccgcctgtcagatgccgtgtacaatgtcgcaacgcccgccgcagtcggcgtggccgcgcacgaggcgggccatgccgtgcagtatgcgcggcactacgcgccgatctatatccgcgcggccatcgtccccgtgacgaacatcggctcgcggctctccatgccgctgatcgttctgggtcttgtcctgagcggccttggccagatcttttactatgtggcgctggcgggcgtggcctgctatggcctctgcgtcgtgttccagctcgtcaccctgccgacggagttcaacgccagccaccgcgccctgcgcgccatcgaggagagcgccctgctgctgccggaggagcagaccgcggcaaagcgtgtgctcacagctgcggccctgacctatgtggccgcgctgagcgtgaccattatgcagttcctgcgtctgctgctcatcgtggcgggcgggaaccggaggagagactgactatggacgaacgcaccgaacagggaagacgcttcctcatgggctatcgtgacgacgataccacggaatttgtctccgatcaggagaaaaagctgccgcagcctccgctgtgcaaggctccgatgggcggcgagcggacggtgctgccgcgcgatttttccgcgttgccggagggcggcggcctgtatgacctgctgacgcggcggcgcagcgccagaatttatacggagggggagctcagtctgctgcagctttcgttcctgctctgggccacgcagggcgtgcgcgccatgcgcggccgggcctatgccacgctgcgcaccgttccgagcggcggtgcgcgccatgcctttgagacgtacctcgtcgtccgttatgtcgagggcctgcgccccggtgcatatcactatctgccgatggagcatgcgcttgtgttcctgcatcccgtcgagcggctcgaggatgttgtttccgacacgctctgcggccagagctgggcggcaaaggccagcgtaatcttctactggtccgttgtgccctatcgcgcggagtggcgttacggtccctatgcctatgcgccgctgctcgtcgatgccgggcatgtgggcgaaaatctctatctcgcctgcgcgtcgcagggcctcggcacctgcggcctgcgcgccttccgccatgagctgtgctgcgagctgttcgggctggacggcgaggaggaattcgtcatttatgccgccccggtcggcacggtccgcccggaggataccgcacaggaggcggcgttctatcagttcgtcgaggacgagaatttataaggcaacaccgcacaattgcagcttcggccttcgccggatatttttcgccgatccatcggtttgaaaaacttgaaatacacaaagtattcctgcgcttttcaaaccttggcccgacaaaaaatctctcgccgaatgctctcgctgaattgtgcggtgctgcctatataccggctgctttttcggcagccggtgatttttatgtgggccattgtaggggagcggacagccgggcccggcgcagcacttacgatttgcatcggctgccggtaaaaacgtacaaaccgattgcgtctgtggcagtggtcagtgtgtcaagagcaact

SEQ ID NO: 11119 - DNA, 6765 bp, Unknown
  gut microbiota DNA sequence
ccgctcttgcaattgaatcagaggttccctagaaaagcctaacagacttttgcgagaaacaacggagagggccgaggccctctccgttgtgctgtgttcagttttccgttccggaaacgagctttgtgtagcgcatgatgatcgttgcgacctcggcgcgcgtagcggagttctgcggagcgatcgtgttgtccggcatgccgttgatgatgccgacggcgaccgcccagctcagggcctccttcgcgtagtcactgaccctggcggcgtcggtgaatttcttggcaaggtcagtcgtgtcgccgacatcgagaccgcggaattttgcgaagcggtagaggatcgtgacgatctgctcacgcgtgatctggtcgtccggggcgaacaggccgtcgccgatgccgttgacgatcttgttctccgagcaccagttcacggctgcggtgtaccacgagccggccggaacgtcggtgaacggcgtcttaccgacattgtcggaattcggggaaccggcgatgcgccacaggacggtaacgagctcggcgcgcgtcatggcggcgtccgggtcgaagctcatttcgcttctgccgcgcagcaggctgttctgatagcagtagtagacggcctcggcgaaccagtcggtgtcgtccacatccacgaacggcatatccatggtcgagatcttgccgcagcggtcgcagtggtaatacaccgtgccgtcgtcggccacgaccttggagaagctgtggccggagggcttgtcgtactttgtctcataggtctcgccgcattcgcacttcacgctcagatggccctgcacggagcaggtcgtcggaacgtcctcgagaatggtggtcttgtgcatcgtgccgttcttgaggtcgaagtgataggcagtcgtgccgatgagcatccagccggtcttgtattccccggcgaggaagtacatctgcttgccgctcgtcttgtccgtggcccagccggtgtagttcgcaggtgcggtctcgccgcagacggagcagatgagggtcttgtgcaggcggtcaaagacgaaggagtggccgtcgcggcaggcgttgtcgtgctcgacggtgaacgtgtccacgacggaaccgttcaggtcataggccgtcacggtcagctcgctgcgggtcgtgttcacgagcaggtagagcgcctgatagctctggctgatcttggcaaagtggaatgcgggatcatccacggcggcgtagttgacgtcgcgggacttttcgcccatatcgccgcagatgacataggtcgtgcccttttcggcaacctctccgccggtcagctgctcggtgcgtgcataggcgtgatcgtggccggagaagacaacgtcgatcccggcggcatcgatcgcggcggggagaatgcggttataggctgcgctcgagcccttggggtttgtgtagtatggcggctggtggaccgtcaggagcttccattcgcacgtcgtcttcgcggcatcctcctgcagccaggcggccgctgcgttcaggtctgcattgcagttcaccacggcgatgtagacattgccgtattccacggagtagtagtccgcatccggcgtgccgaagatattcatcgcatgaccggcactcaggtcgccgtagtattcgtggttgccgaggacctgcacgatgggggaggcggggaaatcttcggagaagacgtccagaatttcgttccatgcggtcaggctgccagcattgtcaatgaagtcacccgtctggatgccgaagtccgtgttcgcgttgccgatggcctcggcgatctgatgtatgacctcgatatcggcggcatcagcctcgacattaccgctgagctgcgtgtcgcccatgacgaagaacgacgtctctgcgcctgactcagccgtggtgaatgtgcggacatcggaccagtggccctccacgccgtcaccgacgcggtaggaataggtcgttgcgggcgtcaggcccgtcagtgtgacggagttgaccagcgaggcctgatagccgtccgtgaacgagcggaccgtgctcgtgccctgtgcggtggtaaagctgtagtttccggaaatgtaggcttcctccgtcgtgtactgcacgacggcattgcgcgcggtgtaatccggcgctgcgaaccagctgatgttctgggtcgttgcaggagcctgcacggcgttcagacggatgtttgtcggcgcgacttctgtgctgccgatgccattcgtcacgccgctgcagcggaaggaaaggcctgcctcacccttggcgtagacggtgaacttctcaccggccgtctggcagaatcggttcgtcacgagcacaccagcggcgttcgtcgtgccgagaagcacgtcatcctggccatccacgacggagaagatctgcacgcggccgggggccttgccgtctgccgtcttgacatagagcttgccgttgccgccgacggtcatgatgtccgccgtcagctcataggccgccgtcacgccgacattctgcgcgggctgggcaaagctcagcgtcgtgccgccgtcggtgaagctgcccttttccagcgtgtaggtcagcagcgagccgcgggcagccgcgctcgggacatggaacttcacggtcgcaatggcgccgagcttcggagaagcggaggttgcctgcagcttcagaacgttcttttcataggtataagtgccggtgtagccgttttcaaacgagacctccggcgcaccgaacgtatccgtcaggcgcagctccatcgtgacggagccgatcttgcgggaaccggcggcattcagcgtcagggcatagtcctcgccgatgacggcattcgcctcgccggtcagcgtgaccgtgccgtaggccgtcgaagcggcattcacggtgaagtagcgtgtttcggtcgtcacgtttccgaagccatcacagacggagacggtgacgctgtgcgtgccgttcggcagcagaacgctgacgctggcgctgctctccgtggaggccgtgagcgtctggcgctggccgtcaacggagatggcggtcttggcggggctgatgccggtggcgttttcacctgccgggtcatggaattcggccgtgagcgtcaggcggttcgtcttcagctccgtcgtgccgtcctcggcaagctcggccgcaccggccttcacggcgtcgatgaccgggttctcgaggtcgtcgaccgtgtcgccgtagacaacgcggaagttatcaaagtacaggctgccgcttgccatggagcccatggggatcttatcgccgttttcattggcggagccgccgggaatgtaggtcagcagcacgagcggctggccgttgaggatcttcagcggatgatccttcgtgacatatttggcaaacggacggaggtctgcctcacagtacatccagccctcccagtagatgccggtatactgcagggagcggccctcctgcgtggtaaagtgcagataggagcgcttataggtgccgctggcctcgtcgtaataggcgatctgcgtccacagccagtagttcggcgtgcctttgggcgcgtagacccagacgccgaggccggacggggtgccatcgagcgagataccgctgtagagatccgtctttgcggcgtcgcttgtatcggcgtaatagaggtactcgttgacattgcggtagccggggagcagatcggtgtagtcatagtcgaggcgcatggagtagtcgccgaagcgggtctcgccctcgtcgccattcacgacctgcaccgttgcggagtgctccttcatataggaggcgtgccaggtgaacaggctgtagcctgcgctgccgagcacatagcaggcgggatagtaggtctcgtcggtattgtcggcgatgtaggtgccgccgaactggaacgggcccttttccgtcacggtcgcgggcgcatttatctccttattccagttgatgaaggtcagctccatgctttcgtcgccgaacgaagcgccgtactgtgcgttgccccagtcgtactcggcgccctgcatgagcttaccctcggcgtccggctcaaagtcgagcaggacctgcggcattctgccgatctccacatggatgctgtcggtcagctttgtaccgtcgtgcttcgtgtagctgacggtaatgtcagcctccagcgtctcacgggccttgacggccgtgaacgtattgccggagaacgagccgatgtcggagggctgcttaccgggatcggtcggcatgatggtccagtcgaatacatagccgcccatatccatcagacgtgtgccgctcttggccgtcaggccgaggtcggacgactcctggaaggagaggttcagcgtttcggcggcaaagaagagctcctccggctcctgtacctccacgctagtcgtgccgagcacggtcttgccctgcagaagctgagccgtcacagtgccgcacttgccgttcgagcggaacaggccgttcgcgtcgatggtgccgaagctgctgtcctccagcccccagctcacgttggctggcaggtcggcgggatagccgttggagtcgacgcccgtggcagtgaactgcacggaagcgcctgcaaggaagaggtcgttcttcggcgagagcgcggcgtggtcaaagcggccggtcggctgcgccgtcgagacgatcatcagggtcgaggcgacaacgcgctcggggccgtcggatgggtggttctggatggtaagcttattgctgccctcgtggcgggaggcgtaggtcgcggagccgccgccgtcgaggtagatggctttgacgcagccctgcgcctgcaggacctcggccatttcatagacggtcatgccgtcggacaggccctgacggccgtcagccatgaagatgacgagcgtgccatccgccttcagaccgatggagttgcggggggccttatagctggcgtccaggccatcctggatcttgccgtccttcagcagccagaacgggccggagatggcttcggcgacgtcgtccgtgggggtgccgtagtcgcggatgtcatagctgccgtccttcagaacggcgaaatacggctcgagccagtcgtcgttctcgtgtgtctggatgaggtggccttccatgataagatagccgcggcactgtgccgtctgcatattatagtagtcggcgttcacagccgtaacgacggtctcgcccgttgcggcctcataggcggcggcctgggacgtggtcgtcttcagatcccagccgaggttcttcgcggtctccgcgcggctctcggccgtgctgcccgccgtgtagtagttgggataggatgccttgagcttcacggaagcaccgggggtgatggtggccatatagccaagcacctgtgcgctgccgctggcgttgttcagaatgacctgcgattccgtcaggccgttcacgatcggatagttcgtctgcgagatcaggaccttgtcggccggggcgctgaagtccgggtcggagcccgccgcaaatgcggccggaagcaggccggtgagcagcgcgcagacaagcagggtacacaagatccgccggatgaccggcattcttctgctgaccatgatgtactgtcctcctaataaattgatggaaggaagttccttcttcgacatgaaatgtcagttgcatgatagcatatggggcgggaagtgtcaagcgaggccgccagaagttgtgaatagtgcacaaaaatgcagccaaatatttggaaacaacgctgatcgaccggtggcatgtgttctagctgatgtgatgttaaattcttgttagccggatcggccggccttgcttttttctgtaaaagccggtataataggggaaacatgcgggccggtccggctggccccggagaattgaggagtgagacaatgaaacgactgcttttgctctgcctgacggcggctgtgctggtatcctgcctcggcctgtcggttcaggctgcgcccaccctgtcgtggacagaattctatacaatgggggatgccgcctcggcgcacacccgcatcgatccgatcgagctggacgggacgacgacgctcttcctgccagccagcgtatcgcggaaggcggtcccggtgtattttacgctttccgagaagaacgccgttgtgacggcgacgggaagccgcggctccgtggcgctcaagagcggcgatacgctggacctgaccgccctgtgcgagggcacggacgatacgatcacgctgcgtgcccgctccgggagtatgcaggcagagaagcgcgtgacgttcctgcggtatgacaatgtgtcgacgatgttcctcgtgagcgacgatcccgtgaacgagggccgtgagtgggtcgagtccagcgaggacaaatccaacagggccaagggcagcatggctctgctcgcagcggacggcgaatccgtctacgacggcaagctgacgcagatcaagggccgcggcaattcgacctggaagggagccaagcgcccctatcagatcaagctggacaaaaagaccgacctgctccagaccggcgacagcgccgataaggccaagacgtgggtcctgctggcaaatttctatgatccgtccgctgtccgcaacatgcttgcgctcgacctcggccgcgcgctgcagatggagtgcaacatgggctatcgcccggtgtgcctgttctatgacggcgagttccgcggcctgtacctcctgacggagaaggtggaggtcaacgagggccgtgtgaacgtgacggacctcgaaaaggcgaacgacaaggtcgtgtatccggg

SEQ ID NO: 11120 - DNA, 6538 bp, Unknown
  gut microbiota DNA sequence
gtaccatgttggataacaagtgagcctcggcaaaaacgtaaccggttgcaggagattcccacgtcgcttcgctcctcggaatgacacatcagggcggcacggtaatgggaacggtgcgctgcaccgaattggtgctgcgattgccgcttcgcggacgggcctggctgtccccgcccctacaacgcacggctgacagctttgaaaaactgtccgctttccattttcaattttccacttttcccagatccgtatatcctaaaatttttatataaagaggtatttgccatggagatctatctcgcatccaaatccccgcggcggaaagagctgctcgagcgcatgggcctggaattcacggtccgtgccgtaaacaccaacgagaccatggaccccttccgtcatccctccgatgaggtcgcccgcgtcagccttgaaaaggcgaaggccgtgcagccgcactgcatgccggacgacatcatcatctcggccgacaccatcgtggtgtgcgattcgctcgtcatgggcaagccccactccgagagcgaggccttttccatgctgcgccgcctgtccgggcgcgaccatcaggtcatgagcggcctgaccgtcctgcacggcgacgactgcgagaatctgaccgtcaccacgacgctgcgcatgcgcaccctgtccgacgaggagatccgcgcctacatcgccaccggcgagccgatggacaaggcgggcgcctacgccattcagggccttgcggccatgttcgtcatcggtctggacggcgattactataacgtgatggggctgccggtgtgcccgctggccatgatcctgcgtaaattcggcgtgaagctgctcggctgctgatctctctgccccaggattggagtttacccttgaaaaagctttttcgcggccgcgtcaggctcatcctgccgctggccgtccttctggctgccgccacggccctgaccgccgcgctctcgggcacggcgtggggctcgcgcaccgtgcaggcagtgctcacgccgtttcgcagcgggttttccgcgctgacgcggcaggcggagcggtactataactatctgttcaactatgaatccctctcggccgagaacgactatctgcgccgtcagatcagctccatggagaacgaggtccgcacggccgactccctgcagcgcgaaaacgagcgcctgaaggagctgctcggcctgcaggaggagcacgaggactatcgcttcaacgaggcctacatcgtctcgtgggattcctcgagctggaagagcacgttcaccatcggcaagggcacgcgctccgggctggagaccggcatggtcgtcgtgacggagtacggccaggtcgtcggcctcatcacggacatcggcccgaactgggccacggtcacgaccgtgctcgacacgtcgctggagatcagcgcctccgtcgcctcggcgggctacaccggcgtggtgcagggcgcgtatacgacgaacgcctccggcaagctgcgcatgaactacctgccctcggatgccgtcctgcgcaataacgatcaggtcgtcacgaccggctcgaccgtctatcccaagggcctgatcctcggctatgtcgaggacgcgggcttcgacgagaccggcgtggcgaagtatgccatgctgcgccccgccgccgatctcgaggacctcgagcaggtcttcgtcattacggactatgtcagcgaataaggcggtgagcggccatgcttgacaagctctatatcacgccgcgccagtggctgcgcatcctgcgctggacgctctatgccgccctgttcctgctggcccttctcgtgcagaccgtcgtcttcggcaaccgcacgatcctgggcgcgcatccggacctcgtggccattgtcatcacctgcgtctgcctgcgcgaaggcccggagcgcggcggcacgttcgccctcatcgcctcgctcgtctggtgcctgtccggcatcgatcagggcagcgtctgcctgctcgtgctcacggtcctgcccgtgctcggcagcatcctgtgccgcgccgtgctggcaaaccgctttctgccgtcgctgctcgtctgctttgtcacgcttgccgtggagcagggcctcatcctcctgatgaagcacttcttcgcgggcgtcgcgtgggagcaggccgggcgcgccctgcgctgcctgctcgtgacgctcccggtgcagcctgcggtctacggcctcgtcaaatgcatcgcaaaaatcggagagtaccatgaatcaacataagtttgccttccgcgtgggcgtgctcgtgctgctcatcgccgtcatggcgggcgtgttctccgtccgcctgcacaatgtgcagatcgcgcaggccgcggagcaggatcccacgcccagcggctccgtgacgtatcacacgcgcgtgacggctgcccgcggcgaaattctggaccgcaacggcaacgtcctcgtcgggaaccgcgccagctataatctcgtcatcgtccgcgaggtgctcatgagcgccgacgcgccgaacgagaacctccgccgcctggtggacctgtgcagcgagctggggctggaatacacggaccatttccccgtcacgcaggaaaagccctatgcctatgtcgacagcggctcatccctgtgggacggctatttccgcaccttcctcaccgagcgcggctgggatacggacgtctctgccccgcagctcatccgctggctcaaggagatttaccacctgcccgccgactggacggaggaggagtgccgccgtgtgatctcgctgcgttatgagctggacctgcggcgctatatcggcacgctggacacctatgtgctcatgacggacgtcgacgccctgtcgctcgcggccatcacggagctgaacatccccggcctcaacgtcgagacctcgagcgtccgccagtacaacaccacgctcgccgcccacatcctcggcaccatcggcaagatggacggcacggactgggagacctatgagagcaagggctacgccatggatgcctatatcggcaaggacgggctggagcaggccttcgaggaggagctgcacggctcggacggtacgcgcgtgacgaccatcaccgccgacggcaacatccttgaggagcactatgccgtcgaccccgtcgcgggcaacaacatcgaaacgaccatcgaccttggcctgcagaaggtcgcggaggaatcgctggccgcgaagatcctcagcctgcgcgagaacggcgttggcgtctccggcaacggcaaggacgccgagggcggcgccgtcgttgtcatgaaggtcaagaccggcgaggtgctggcctgcgcgagctacccgacctatgacctttccacctataatacgaactataacgagctggctgccgatccctacaagccgttcaacaaccgcgcgctcggcctgccctatccgcccggctcgacctataagatggtcacgaccatcgccgccatcgacagcgggaccatcagccgctggacggagatcgaagatgagggcgtctacacccgctttgaggacgcaggctatatgccgcgctgtatgctctacaccacgacgggcgcgacgcacggtctcatcaatgtcatgaaggcgctggccgtttcctgcaactactatttctatgaggcgggctaccgcaccggcatcactgccatcgacaacaccgccaaggccctcggcctcggtgagccgaccggcatcgagctgccggaggccgtcggccgccgcgccaaccccgagacgaagaaggagctttatgacgagggccacgacggctggtacgacgccgataccgtcgccgcgtccatcggccagtcggaaaaccgcttcacgcccctgcagctgtgctcctatacggcggcgctcgccaaccgcggcgtgcgctacaaggccacactgctcaagcgcgtcctctcgtcggattatcagaagctcatccgcgagaaccagcccgttgtggccagcacgcttaacatctcggacgaggcctacgccgcctattccgagggcatgcgcgaggccgtcacctccggcacggcctacagtgcctttgtcggctatgacgtggccgtctgcgccaagaccggcacggcccagcacggctccggcggctcggacaacgcctcgttcgtgctctatgccccggcggacgacccggagatcgccattgcggtctatgtggaaaagggcgcgcagggcggcacgctcggcaccatcgcccgcgatattctgacggcctacttctccgaagccggctccacggataccgtccccgccgaaaataccctgaactgaaaagcaggcgggccgcccggcggcccgcctttccgtttatggcgtgcactcccgaattgtcattgcgagggcgcttcgcgcccgtggcaatctcgggaaggcactgtcagcccgtacacgccattgtaggggagcggcatgccgctcccggcgcgacggcggcgattcgtaaaggctgacgataaaaaagtacacaccgattgcgtctgtagcggcgctcactgcgcagccgttggcggctttgccgccttacggatgcggcgtgccccttgcgggttgtgagcgcctaaggcagttgcaaatttccgggtactccgccgaccgcaccgactttcaaatttgtcattgcgatgccccgaaggggccgtggcaatctcgtgcaggcagttacgatttcgccgatggctttcctgtaatccgacaaagtactgcgagattcccacgtcgcttcgctcctcgcaatgacaacctttcggcgttcaccgttttgctgacaacctgtttcttacaccggtgcagcgccgggcgaggcatgccgcgcacccacaacgcgccatcgatgtcccgcctgtttttcgccatcaatttccgggcataattccccttaccggcgcgtatatatgaccatacggcacaggggaggagacggtggaacatggcaaaggaaccaatggacgggccgcatgagctgcggctggagaaccgggcgcggctgagcgtaaacggcgtgcgcgaggtggagagcttcgacgaggaatccgtcgtgctgcacacgacaaagggcgtcctcgtcatccgcggccagcagctgcacctgcagacgctctccatcgacggcggacaggtcgccgtggacgggaccgtggacgcaatgtcctatgaggaggcgcagcgaaagggcggcctgttctcgcgcctgctgcgctgaatggagcagccgctgctgctgcaggcccggcagttcctgctgtccgccgccctcggggcggcgctcggcctgcattacgatctgctgcgcggcctgcgccgctgggcgcgctggctgacgcacccgctcgacctctggttcgcgctgagcgtgcttgcggcgaatctgtggtttgccctgcgcatcggcggcgggcagttccgcatcttcgccctcgtgggcagcgcgttgggcgcagcgggctattttgccgggccgagccgcctgcttctgcccgtttttggaagcttctggaaactttttacggcccccggacgcctccttgcccgcggaagcaaaaaatttttcgaaaaaacgggaattttttcgaaaaacatcttttcatcggcgaaaaaatcggttacaataaaaaacagacaccgccgcatgcggcggtacgataccaacagcgtgggaggagagcaggatgcgcctgcgaaaatcatcactcattacaaaacttctgatcctcgcggtcatgatctacgcgatcgtgacggtggtcaccctccagccgcagatcagcgactcgcgccagcaggcagcggctctgcaggcagacgtcgccagcgcgcagcaggccaatctggctctggagcaggacatcgccaacgtcgggacggatgaggccgtgatgaagatcgcgcgggaacgcctgaatctcgtcgaagacggcgaaatgatttttatcgacagcgacaaataaacggagggcaatacggcgtatatggagttcacggtcggcgcattactcgagggcaaggtcaagtccatcacaaaattcggcgcattcatcaccctgccggaaaaccgcacgggcatggtgcacatttcggaggtcgccaatacatatgtcagcgacatccacgatcatctgacggaggggcaggacgtcaaggtcaaggtcatcggcattgacccggcgggcaagatcagcctttccatcaagcggacgcaggagccggagcggcgcgagcgccgtcctcagcaggaccgccgtccgcagcaggacagacgccccccgcgtcaggacagtgcgcccaagggtccgcagacctttgaggagaagctgaagcagttcatgtcggactccgacagccgcatcgcgggctgccgccagtatgagcacaagacaaagtcccggagaagataaaacgagcgcctgctgcagctgcagcaggcgtttttcgtggtgagattgcaggggagcggcatgccgctcccggcacggtactagcgactggta

SEQ ID NO: 11121 - DNA, 1199 bp, Unknown
  gut microbiota DNA sequence
cgcttcgctcctcagaatgacaaacttgggggtctcatgccataaaatacatgccctgaatattgccagcctgcaaggcgctcactgagcgcccagtacggggcaattcaacggcagaagggcgctggtgcaccgccgtattcccctgacgtgtcattgcgaggaggccataggccgacgcggcaatctcgcagtacacgccggaacacaggaaagccccggcgaattcgatagtgcctgcttgagattcccacgtcgcttcgctcctcagaatgacaaacttgggggtctcatgccataaaatacatgccctgaatattgccagcctgcaaggcgctcactacccgcaaggggcacgccgcatccgtaaggcggcaaagccgccaacggctgcgcagtgagcgccgctacagacgcaattggttggtacgtttttatcggtaccttgtacgaactggaagtgccttcccgagattgccacgtcggctgcgcctcctcgcaatgacaagtcgggggcggttgccgttttgacgatggctcgttccgaagggcagtgccttcccgagattgcccctccgaccgcaccggttctcagatttgtcattgcgaggccccgaaggggccgtggcaatctcgcagtactcagttggatgacaagaaagcctcggcgaattcgagggctgttgcaggagattcccacgtcgcttcgctcctcggaatgacaaatccgggggcctgcaccaccgattgcacctgccaaatgcgggcgcattcccccacaaccactcaccattccagtcccattcccaaaatacacacaaaggagatcacaccatgttctgtacgaaatgcggaaacaagatccgggatgacgcgaaattctgcacgttctgcggtgcgccggtgcgccgtcctgtcccgcctgctcctgtcgagccgcaaacgcccggctcagtcccgaatgccggggaaatgcctcccgtcgaaccgcccgttcccggcgtgatcccgcccgtggttcccgtgccggacgagccccccatccccgccgaaccggtcatccctgaagagcccgccgttcccgaggagcccgtcgtccctgacgagcccgtcgtctccgaagagcccgttgtccccgaagagcccgttgtccccgaggagcccgttgttcccgaggagcccgttgtccccgaggagcc

SEQ ID NO: 11122 - DNA, 2663 bp, Unknown
  gut microbiota DNA sequence
agcccgttgtccccgaggagcccgttttccctgaagagcccgccttctccgacatgccccccattcccccggagccgcccgtctccaacatgcctcccatcccggacgcggccccgcgcaagcgccgcaataccggtatgctcgtctcactcatcgcgctgggcgttgtggtcgtcggcgcggccgtcggcggcttcctgctgtggcacggcatgaacgccaagctcgagcgcgagcgctccgaccatgcgctggagcagagtcaggccgaggcccagctgagcgacctgcaggacgccctcgaccagtccaacgaaaactatgacgccctgtataacgactactacgacctcgtgcaggaatactccctcctgcagcagcagaacgagaacgtctccgacctgcaggcccagtacgatgccctgtccgacgcctatgacgagctgtccaaaaattacaacgaatttgccgatatggcagagttctacaacagcaatgcctgcgtcgccagcgacggcaacgactattaccacacctacgcctgcgaggactgggaccgtcaggccttctacatcttcaacacggcctatgccgaaaacgagctgggactcaagccctgcccgaagtgccgctgaggcacgggaaaggatcatccatggaaccgaaattttctgttgacacgaccattgacgccgatatccagtatgaggcgtccaagagccttatgccgcgctatgtgcagctgctgacgtgggtctgcttcggcctgtccgtcgtgctgctgggcatcatggtctggcagtacgttatgacgaagaacaccatgcatctcgtgctggcccttctgctcgtgctcgtggtgggctatgccctgttcaaccagctccgcggcccgcgcacggccctgcgccgctggcagcagaacatccagacgaagtacggctcgaacgccctgcacctgcacacggatttttatgacctcaccctcgcccagaccctgcaggagaacggcgaggtcctcgacgccggttattccaccatcacggagctgcgcgagacggagcatctgttcctcctgcactgcggccgccagcagtggtactttgtgaataaggccggttttacgaagggcacgccggacgaattccgcacgttcatctccgaaaggatcgggggctgatcatgcgcagcaattccggcaagccgctgggcatttacgtccacatccccttctgcaagagcaagtgcgaatactgcgacttctactccctcggcggcagccgcgatcgccgcacgacggaccagtacctgcaggcgctggccgaccacatccgcgaaacgggccgccttgcgccggactacacggtcgacaccgtctacttcggcggcggcacgccgagcttcttcggcgcggagaatctggaaaaaattctcgacgagctgcagaagcgcttccacttcggcgcggaccccgagatcacgctcgaagccaaccccgacagcgtcacaccgcaggggctcaagcggctggtccgcgcgggcttcaaccgcatctccatcggcgtgcagtccgatcaggacgacatgctcaagcgcctcggccgtccgcatacctacgagcaggcgcgcatggccgtcgtccgcgcgcgcgaggcgggctttgccaacctctcgctcgacctgatgttcggcctgccgaaccagacgctcaccggctggcgcgacacgctcgagaacgtcctgcgcctcaagccggagcacatgtcctgctacgccctcaaggtcgagccgaacacgcccctgtgggagtaccgcgactgcgccaacctcccgaatgacgacgtgcaggccgatatgtaccttgccgcctcggagatcctgcaggaccacggctacgagcactacgagatttccaattttgccaagcccggcttccgctcccgccacaatctgaagtactggacgggcggcgagtacctcggcttcggcccctgcgccgcctcggacttcgcgggcaagcgcttcaccatcgagccggacctgcgcacctatgtcgagggcatcgcccaccacggctccgtcctctcggagtgcgagaccatccccccgcgcgagcgcgccggggaatacgtcatgctccgctcgcgcatcgtctccgggctggacgcgcaggagtacgagcgcagctacctgctgccctttgcgccgctgcagcagctgctcgagcgctttgccgggcacggccttgccgcgcagaacggctcgcgctggtacctgaccccccgcggctggctcgtctcgaaccgcatcatcctcgcgctgcaggatgcacaggaaaaatccaccccgctggccaagaagcggtaatgcgttgtaggggccgggctgtcccctcccggctgcgcacttccgacccgtaccggctatcgttaaaacggtaaagtctcccgacttgtcattgcgaggagcgaagcgacgtggcgccctgagcgcgcagcgcgaggaagtgcccttggggtgcaatctcgggaaggcatttgcagcccgtaccggctgtcgttaaatggtgtgcaccactgtaggggccgggctgtcccctcccggctgcgcacttccgacccgtaccggctatcgttaaaacggtaaagtctcccgacttgtca

SEQ ID NO: 11123 - DNA, 188607 bp, Unknown
  gut microbiota DNA sequence
ggcgtacttgcatcccgtactggccgccattaaaacggtaacggcccccgaattgtcattccgaggagcgaagcgacgtgggaatctcgtgcaggcagttacgatttcgccggggtctccctgttattcaaccgggtactgcgagattgcaccccaagggcacttcctcgcgctgcgcgctcagggcgccacgtcggcctttggcctcctcgcaatgacaaacttggggggcttacgccatagaatccatgccactgatattgcaagtccgcaaggcgctccctgagcgccgctacagacgcaattggtgctcaccattttatcggcagcctgtgccgaccgacagcagtgcgccgggagcggcatgccgctcccctacaacgcactgccgatccccgtctcttgcaattttacgatcaaaacagccgtgctgcggtttctcccgcagcacggctgtttgcaacatcttatttcacatcggcattgatgccgtgctcgtcgaaggcacgcagcagcaggtccatatcggacgggatggagatcggctcgccgcaggccttgatggcattggcgacgtccttcaggccgttgccggtcacgacggacacgactgtcgcatccttcggcaggacgccctgctcgcacagcttcttcacaccggccgtgccggtcacaccggcgggctcgccgaacacgccgcaggtgcggccgagcagcttctgcgccgccatgatctcggcgtcggagacattcacgaccagaccgttcgactcgcggatggccatgagcgccttgtccgcattgcgcggcacgccgacggcgatggagtcggccagcgtgttctcctccatgggctcccacgggcgattttccgcaatggcgcggttgatggggcagcagccctcggcctgcgcggagatgaggcgcggcagacggtcgatgaggccgacggcatgaaggtccttcaggcccttccacagaccggcgatcgtgcagccgtcgccgacggaaatggcgatgaagtccggcatctgccagtcgagctgctcggcgatctcataggcgaccgtcttcttgccctcggaaaggtagggattgatggctgcattgcggttgtaccagccccagcggtcgatggcctgcttcgacagctcaaacgtgtcctcatagctgccctgcacggagatgacggtcgcgccgaatgtcatgagctgggcgaccttgcccttcggcgcgcgggacgggacgaaaataaacgtctggagcccggcggccgcagcgttgcccgcgagggacgaggcagcgttgcccgtggacgagcaggcgatgacatgcgcgcctgcctcctgcgccttggcgacggccatggcggaggcgcggtccttcagcgaggctgtggggttctggccgtcgtccttgacccagagcttcgcgatgccgagttcctttgcaaggcggtcggcctcatacagcggcgaccagccgacgcgcagcgggggcgcgggcgtctccggctcgacgggcagcagctcgcggtagcgccacatggagcgctccgtgcggttcttcagcgtctcgcgggtcaggacggtcctgatccggtcatagtcatagatgatgtcgaggatgccgccgcattcgcagttcgtcagattcggaacggcgggatattcccggccgcagcgcacgcagcggccgcattttacatggttcatcgcttcggttcctttctccgggcttcccggtcgtgtttttccagtgctcgtttcatccgggcacggcggcgctcgtcccggcggcgctgccgggggtaccattcatagaactgctcgtcgccgacaagggcgtgcagccgatccagctcccggcggcgcaggatcgcagccagcaggacggtcagcagcacaaagtaaagcgccagcgccggcagaaagagcgcgccgagccgtttggcgttcagaaagatcgccgcggcgatcagaacattgccgatggacgccgctaggatcagcgcgacctgcacggccgggatgagcggcgcgagcgcatcgcgcagacagttccggaatggtttcatggggcctccgtggatgaaaaccgtgccggagcgggatgacccaccccggcacgggctgattgtcaaaattctaagattctaaggcagcactgcataattcagcaagagcattcgtcgagagattttttgtcgagacaaggtttgaaaagtgcagatgtactttgtgtacccgcaaggggcatgccgcatccgtaaggcggcaaagccgccaacggctgcgcaatacctcaaacttttcgaaccgatggatcggcgaaaaatatccggcgaaggccgaagctgcaattgtgcggggttgccctaattacagcgtcttgaggatgccgacctcgtcgttgaaggcgtcgatgagcgtatcgaggtccttcgcctgtgcatggacggcgtcccaggtgcccttcgtgtcgtaccactgggcgttgaggtcttcgacgttcatgccctgctgctcgacccaggtgtaatacttcaggttgtgcacgcgcttgcgctccgtgtaggtcagctcgagcatgctgtcggtcttcaggccgagcatatgcagcgcatggtccttctcggcctcgaaggcggagtaggcgccgtgctgggcgttgagctcttccacgcgggacttgtacatgacggcggagtccgtcagaacggtgacaacgacgtcgtcctcggtcagctcatagtatttggccatcttgatgcagcacagcacgttggcgatgccggagatgcccatccaggtgaacttttcgatctgctcgtccgtcatgccaagggacttcaggtactcctgaccctccttgcagttgaacagacgcagcaggcgctgggagtcctcgtcgtcgatggcaatggccatgtcggtgttcttcacgttatggacccagggaatgtgcttgtcgccgataccctcgatgcggtggccaccgaagccgttgtccagaatggtcgggcactgcagggcctcgccgacggcgagcttcatgccgggatagcgctccttcagcaggtcgccggaggacatcgtgccggcggagccggaggtgaagcaggcaccggccagacgctggccgggctttttcacggcctcgaacagatcggccagggcgtagcccgtgacattgtagtgccacagcgggttgcccatttcggcaaattggttgaagatcatcatggacggatccttcttcagctcccacgtcttgtcgaagatctccttgacgttggactcgcagcccggcgtggcgatgatctgaccggcgatggacttcagccagtcaaagcgctccttggacatatcctgcggcaggatggcgacggagtcgcaggccagcagcttggagttgaaggcgccgccgcggcagtagttgccggtggacggccacacggcgtgatgataggtggcgtcgaactgaccggtcacaaggcgcggagccaggcagccgaacgaagcgccgaccttatggcagcccgtggggaaccacttgccggacatggcaaggatgcggcacggcacgccggacaggctggaggggatctccacataattcggggtgtgctgatacagaccgccgaactccttggcctcgttgtgccaggaaatgcggaacaggttgacggggtcgacgtcccacaggccggtatgggtcagcttttccttgattttctccgggatgagatccggattctgcatctgcgcgatggtcgggatgatgatgtggttttccttggccttctcgatgttgtgcttcaggccttccttgttgatgcgaagatcaatcattgctctttcctccagtttttacgtcaagataagaatatagcgtgtatttggaaatgccaaaatgtttcgcgatcttgtcgccggattttgtgacgagcagcgcgccgtgctcattgaggaaatggatggcgcgcaccttgtcctccttgctcatcagggcgaccggcttgccgatgaggcggtcggactgctcgatgagatcgtcgagcaggtcgttgacattgtgcgtgatgcggggcgtctcttccccggcggggtgggcggacgtcagcccggcgagcgcctgctcggccatggccagcgcggaaatatcaaagttgatgcagaaaatggcgcacacgcgcccggattcgtcgcggatgtagatggacgacgatttcagcagcttgccgtccggcgtgcgggtgagatagcacagctggtcctccggcgcgcggccgtccttgccgagctgctcgagcacgacctgcgagggaccgtcgccgagcttgcggccggagacatggccgttttcaatggccacgacggagtgtgatgtgctgcgctccgagatctcgtgcacaacgacctcgcagttgcttccaaactgcgccgcgaggcctctcgccatctggcggagcgtttccagttcattcggtttcagcaatcgcagcgcccctttcttcggatgggaagctctgaaaaatcctctgcggcggatgccggagcttttccgccgatccatcggttcggggaacttgaaatacacaaagtattcctgcgttccccaaacctcgcctcgacgaaaaatctctcgccctccgctcttgctgatttcttccgagcttccctgttgggaaaactctgaagaaatcctctgcggcggatgccggagcttttccgccgatccatcggttcggggaacttgaaatacacaaagtattcctgcgttccccaaacctcgcctcgacgaaaaatctctcgccatccgctcttgctgatttcttccgagcttccctgttgggaaactctgaagaaatccctcacgcatactgcccgctgtcaggcttgtcattgcgaggccccgcaaggggccgtggcaatctcgcgggatcattccggatttttgaggatccccggcgaatacgaaatatggtgcctgagagccccacgccgcttcgctccttggaatgacgaacttccggtttttgccggtcagagcgtccctgtttggattttcctgaccctatgataccattatagccgggagaaatcaattgttttttccaaaatttttttgttttgaaaaaaatttgtttgacttctgtgcaggatatggtaagataggagcagagaaccgcagactgcctgcatatccgcactgcggtacggaatgaatagataatggagggtaccacgatggattttgaagcaatcaaacgtgcggccgagggctatcgtgccgacatgagccgtttcctgcgggacatgatcgccatccccagtgaaagctgcgaagaaaagggcgtcgtcatgcgcatcaagcaggagctggagaagctcggctatgacagggtcgagatcgatcagcttggcaacgtcatcggctggatgggcacgggcgagaagatcatcgccatcgattcccacatcgataccgtcggcatcggcaaccgcgccaactggacgaacgacccctatgagggctatgagacggacgacatcatctacggacgcggcggctccgaccaggagggcggcatggcctccgctgcctacggcgcgaagatcatgaaggatcttggtctcatccccgagggctataagatcatggtcgtcggctccgtgcaggaggaggactgcgacggcatgtgctggcagtccatcgtcaatgaatatttcaacggaccggaggatgcccgcagcaagatcgagttcgtcatctccaccgagccgacggacggcggcatctatcgcggccaccgcggccgtatggagatccgcgtcgacatgcacggtgtctcctgccacggctccgctccggagcgcggtgacaacgccatccacaagatggccgaggtcctgctgaacgtccgcgacctcaacgagaacgacgccgccgatgacaaggagatcaagggccttgtcaagatgctcgacccgaagtacaaccccgagcattgggaagacgcgcgcttcctcggccgcggcacctgcacgacgtcgcagatcttctacacgtccccgtcccgctgcgccgttgcggactcctgctccatctccatcgaccgccgtatgacggcaggtgagacctacaagtcctgcctgaaggagatcgaggacctgcccgcctgcagaaagtacgccaaggacgtcaaggtctcgatgtatatgtatgaccgtcccgcatggaccggccacgtctatgagacggagtgcttcttcccgacgtggatcaacaaggaatccgccgcccatgtgcaggcccttgtcgatgcgcaccacgctctgtggggcgataagcgcctctgggccgacgagaccgcgcgctccaagcgtgaaggccgtccgctgaccgacaagtggacgttctccacgaacggcgtttccatccagggccgctacggcatcccgtgcgtcggctttggccccggcgccgagtcgcaggcccatgcgccgaacgagatcacctggaagcaggacctcgtcgtctgcgccgcgctctacgccgccgttcccggcctgtacaagcccgaaaacaagatcaccgaggccgagttccgtcaggagctgaccggcaacgatatcaagtgatttttccgtccatccgataaaaagcaagcagcccggctctgccgggcttccgaccaaccaaaatatgaaataggagaacgatcatgagtaagactgttgaactggcaagacacctcgaaaagctccatatcaataacatgtataagaccgacttctactggacgtgggacaagacggacgacgagatcgacgccgtcttcaccgtggccgacgccctgcgcgacctgcgcgagcgcaacaagtccacgaaggtcttcaattccggcctcggcatctccctgttccgcgacaactccacccgtacccgcttctcgttcgcctctgcgtgcaacctgctgggtctcgaggagcaggtcctcgatgagaagaaatcccagatcgcccacggcgagaccgtccgcgagactgcgaacatggtctccttcatggccgacgtcatcggcatccgcgacgatatgtacatccatcagggccacgagtaccagaagacgtttatggacgctctggaagagggctaccgcgacggcatcctcgagcagcgcccgacgctcgtgaacctgcagtgcgacgtcgaccatccgacgcagtgcatggccgacatgctgcatgtcatccactacttcggcggcgttgagaacctgaagggcaagaaggtcgccatgacgtgggcctattccccgtcctacggcaagccgctgtctgttccgcagggcgtcatcggcctgttcacccgcttcggcatggatgtcacgctggcccatccggagggctatgacgtcttccccgaggtcgaggagatcgcccgtaagaactgcgagaagtacggctccaagttccacaagacgaacgacatgaaggaagccttccgggacgccgacatcgtctatccgaagtcctgggctccgttcaaggccatggaaaagcgctccgagctctatgtcaagggcgaccagaagggcatcgacgagctggagaaggagctcctcgcgcagaatgccgagcacaaggactggacctgcagcgaggagatgatgaagctcacgaaggacggcaaggcgctgtatctgcactgcctgcccgccgacatctccggcctgagctgcccggagggcgaggtcgacaactctgtatttgaccgctatctcgtgccgctgtacaagcaggcctccttcaagccgtatatcatcgctgccatgatcttcctggcgcaggtcaaggaccccgtcaaggctctcatggagctcgacgctgccgacaacaagcgcaagatgttctgagccgcacagcaggaggataattaccatgggaaaacgcatcgtcatcgcgctgggcggcaacgcgctgggcagcacgccctatgagcagctcgcccttgttacggaaacggcaaagccgatcgtagacctcatcgagcagggcaacgaggtcgtcattgcgcacggcaacggcccgcaggtcggtatgatcaatctgggcatggccacggccgccgaggccggcgccatcaagtccgatatgcccttccccgagtgcggcgccatgagccagggctacatcggctatcacctgcagaacgccatcggcaacgagcttgccgcgcgcggcctgcagaaggacgtcgccaccgtcgtcacgcaggtgctggtggacgagaacgatcccgccttccagaagcccacgaagcccgtcggcgcgttctatgacaaggccacggccgagcgtatcgccgccgaaaagggctacaccatggtcgaggacgcgggccgcggctaccgccaggtcgttccctcaccgaagcccgtggacgtcatcgaaaagaacaccgtccgcgccctgatcaacggcggctgcgtcgtgatcacggtcggcggcggcggcatccccgttgtgcgccgggacggcaagctctacggcacgcccgccgtcatcgataaggactttgcctctgccaagctcgcagagctcgtgcaggccgacgccctcgtcatcctgacggcggtggaccgcgtctgcatcaactggggcaagccggaccagaagagccttgcggaaatgaccgttgcggaagcggagcgctactgcgaggaggggcatttcgcccccggctccatgctgccgaaggtcagggccgccgtttcgttcgccaagaccggcgggcaggccatcatcgcctcgctcgcacaggccggagccgccgtccgcggcgaggccggtacggtcgtccatctctgatattgcctgttcccttcccggggagcaaagggcctgctgcatgaaccccgcagcaggcccttctgcaatatgggataacacatatgcagggaagcggcacgcgggaaatgaaactggaaagtggaaaatttcacaagaccgccggtcatgcgctgtaggggaggggcatgcccctcccggcaccgcaccggcgggaagtgcgggccaatgttaaaaaggcaatggccccctaagtttgtcattgcgaggccccaaaggggccgtggcaatctcgggaaggcacttgcagttcgtaccggctgccgttaaaatggcatgcaccgattgcgtctgtagcggcgctcagggagcgccatgggcagttgcaagtttccaggcactcacgccgaccgcacacacctccaagtttgtcattgcgaggcctcaacggggccgtggcaatctcctgcagccggttgcgtcttcgccgatgcctttcctgtgatccagcaaggtactgcgagattgccacgtcggcctccggcctcctcgcaatgacaaatcgggagtatttgccattttaacggcagcttgttgattgcgccggtgcagcgccgggagcggcatgccgctcccctacaaggcgtgtgcggtcgacgatagtgccaccaaacctgcagcttgcaaggcgctccctgagcgccgctacagacgtaatcggtttgtacgttttatcggcagcctgtgcgtatcgccggtgcagcaccaggccctgcggcgaacctgtttttctttcttgcctttttcggcaaaatacgatatcattagcttagtaaacattgcacaggcgtttcccaaataccgatataaggagctggcaacatgctggaacagtcgatcctgcagaattatcttgacatcctgcgcgaagagcttgtcccggcgaccggctgcacggagccgatcgccattgcctactgcgccgcgacccttcgggagctgctgggcgctctgcccgagcaggtagacgccgccgtcagcggcaacattctgaaaaacgtcaaaagcgtcgtcgtaccgaataccggcgggcgcaagggcattgcccccgccattgccgtcggcctcgttgcgggcgacgcggcgcgcgacctgcaggtcatctccgccgtgacggaagagcagcttgcggagctggacgcttacctgcagcgggtggatatttccgtctcgtgcagccactctccctgccagctcgacatcgatctgcgcggcagctgcggcggccacacggcccgcgtgcgcatcacaaaccatcacacgaatatcgtctgccttgagcgcgacggcgaggtcctgcgggagcttcccgttgtggcctccgccgaggagcaccgcgcggacaagagcctgctgaatgtggcggacatcctgcgctttgcggccgaggtgccgctcgaggacctgctgcccctgctggagccgcaggtcagctgcaactccgccattgccgaggagggcctccgcggcgcatggggcgcgcagatcgggcgcattttactggaggattacggggatgatatcaagcagcgggccaaggcctatgcggccgccggctcggatgcccgcatgagcggctgcgaaatgcccgtcgtcatcctctccggctccggcaatcagggcatcacggcctgcatgcccgtcgtggcctatgcccgccacatcggcgcgacccgcgagcagctctaccgcgcgctggccgtttccgaccttgtcaccgtccaccagaagaccggcatcggccgcctctccgcctactgcggggccatctccgccggggtcggcgcgggcgcgggcatctgctacctgctcggcggcgactatgacgccgtggcgcacacggtcgtcaacgccgtggccatcctctccggcaccatctgcgacggcgcgaagccgtcctgcgcggccaagatcgccgctgccgtggatgcgggcatcatgggctaccgcatgtatctgcaccaccgcgaattccgccacggcgagggcatcgtcggcagcaatgttgacgacacgatcgccaaggtcggcgtgctggcgcagcagggcatgcggcagacggaccgcacgatcctcgatatcatgcaggatcgctgcagctgagcgcccgcgttccttcaaaaatcgttttccggtccgtcataatttggacatatcaggcggatatactacaagcacagcaaggagctgaacaccatggagcaaaacgagcgcatcgactccgctgcaggcgagcctgtatcggcctgcaaacgaagaaagcacctgcggctggcggccctcgctgtaagctgcgccctgctcggcggtatcgccggaggcgcggcaacgggactgcttctgcagggccgcgagcgagcggccatgcggccggccggtcgtcagacggccgtatccggggcagagagcacgggcgcggagccgtccgcagcgcgtgtagcttcgactgcgggagaattgaccccgacgcagctctatgagcactatgcgccctgcgtcgtcggtgtgctgaacctcagcgcggtcacggacctctatggaaaggacaccatgcaggccagcaccggctcaggcgttctcctcacgggagacggcgagatcctgacgaattaccacgtcgtcaaggactgcacgcagctcaccgtcacgctgtatgacggcacggagcacacggcaaagctcctcggctatgaggaggacagcgacatcgccctgctgaagatcgacggcagcggctaccgccacgcgcgcctcggagattccgaccggctacgcatcggcacggaggttgctgccatcggcaacccgctcggcgacctggactacagcctgaacgtcggctatatcagcgcgaaggatcgcgacgtcgatctggacggcccctccatccgcatgatgcagctcgacgccgccatcaatcccggcaactccggcggcccgctgttcgacctgcgcggcaatgtcgtcggcgtgacaacggcgaaatattccggcgagaccgtcaccggcgcgacgatcgagggcatcggctttgccatccccatcaacgacgtccgcgagatcctctcggagctgcgggaatacggccgcgtgccgaaccgcgcccagctcggcgtgatggtcggcacggtctattcgacgaacacggctcgcagcggccgggtgcaggtgcgggatgtcacaaaggattccgccggcgcccatgcgggcctgcgcgacggcgactttatccttgcgcttgatgactacaccgtgcgtacgctttccgacctcagcgcggcgctgcggcactaccgcggcggccagcacgcgacgctcaccatcgagcgctacggcaagacgttccgcctgcccatcgtgtttgacagcaaggacgatgcggtgcagaacgaagagccaacaacatcggccaatgcgctggagccgtccgagcaggacagcacccggccctgatccgatgtcttccatagatcgcatcccctccctttttcatgctttttctcttttttctctctctttctttcttttctacgaaatgtaccgtccggcttgccgggcggtacatttcgtttttgcgaaacgggctggcgaaaaagctgcccagccggaggtttcggagggaagacaaggggaaaacatcggggtatcctcggtatggcaaagagcctccgctttgtcattccgaggagcgaagcgacgtgggaatctccggtaaaatgtttcgaattcgccgagattttcctgaaattcagaacagtcctgcgagattgccacggcccctgcggggcctcgcaatgacaagactgggacatttgacaagccgggaaccgtctgggagtctcagactgtcaaaaagtctccgctttgcagaataatgccaacgtcatatcgaaacaacctgttgcaaggcaagcgcgtgtatgctataatgcagaaaaacgttggaacaatttcggcttcctgccgtctaatcttgcaaagagagaaggaacgaccggcgcggccggcgccggtccgcaaacacaggaggagagagcatgagacagggtgtcatctgtatgctgatcgcggcgctggtgctgcagcttgcgggcggcgtggtcgcaggcggtgcagagccgctggccatgacaacacaggagaccattcgaacggtcgccgtctccggcgtgccgaccgcgctgatgcgtggggccagactcccggagcgtatgccgtcgttccatacggacgcggcctgccatctggcggacagctggcagagctggtccggcatggtatggttctcgtctccggacggtgagcatatcagcaagccgctcccggcgggaaccgtcacggagccgggtgtgtattattatctcggcctcgtgctcgagccggatggccttgcgtccttttccgacgcaccgtccgtaacggtctgcgggacgacggccgccgtgcagcggctcgaggacggcaggctgttcgtctgcgtgcgctacggcagcgacgacggccgcctggagggcctcctgcccgaaacgctgccgttccgcgatgtctcgcgccgtgcgtggtattttgagagcgtcgcctatgcctaccggcaggggctgatgagcggaacgggcacgacggaattcgagccggatacggccacgtcccgcgccatgctcgtgcaggtgctttaccgtctggcgggtcagcccgccgcgtccggaagcgacttctccgatgtcggcgacggcgtgtggtatgccgatgccgtctcgtgggccgccggggcgcagatcgtcaacggctacggcaacgggcgcttcggcccggacgaccccgtcacacgcgaacagacggcggccatcctctatcgctatgccgcgtggtatgaccttgccggggacggcgaggcgcccctctccggctatccggacgccgggacggtcagcagctgggcgcgcagcgccatgggctgggccgtcggcgcgggttatctgaccggctctgccgaggacggcgccgttctgctccgcccgcaggcgcttgccgtccgcgcgcagaccgccgcgatcctggcccgcttctgccgcagcctgcagaagcaggagcacgccatgccgcgcgcggactatttcacggcccgcggcacgacggtactctacctgccgctcgacaaccgtcccgtcaacgacctgcgcgtcgaggcgctggcggacagcaccggtatgaatgtgctgctgccgccggaggacctctatgccacgcggctcgacgggcagacgacgaatgccaacggcacgcagtacggcgacacgcatgctctcctgcagtgggtgctggacaatgaggacgcctgcgatgtgctgatcgtcagcatggaccagctgctctccggcggccttgtgaacagccgctgggaggacgggatggacctgacgtgggagcaggatgccatcgacacgctttcacagatcgctgcacgcaagccggtctatgtgttcgacacggtgatgcgccttgccacgaccgccggctatcagggactcgacagcgaggcctaccgcctgttccgcagctacggcatggccgagcgcggcgagctgaccggtcacaacctgacggtcgataacatcattgcaggctacccctacggcgcggacggcgaacggatcgaaacgacgttggatgacgagctggtggagcattatctggctgcccgcgcgcgcaagctgcggctgacggactatctgctgcgccatgccgagagctttgcggcctgtgtcgtcggtgttgacgactcagctgcgcgcatctccgtgcagacaaatgagatccgctatctgcagcggctgctcggcaaaaactgcgctctgttttgcggaacggacgagcttggcatgatggcctttacgcgtgcctatgccgactgcgccggatggaacagccgcctgtccgtgcactatttcggcggctatgaggacagcgtggccgatgcctacgatacctcgacgctccgcgagtccgtggagcagcatatcacggcgctcggcgcggagcttgcggactggagcgaacagtcagatgctgtcgtgctggtgctcacgcgcggcgcttcctccacggagtgcagccggtatctggcagcttgggaggagaactgccggaatggtgtcccgacgatcgtcatcgatgcctcatctgccacgcagcatctgccgcagcagctggaggatacctcgctgcaatggctcatgggctacagcgcgtggggcacggcggccaattccgtcggcatcgcgctctccatgggtctgacgcgcctgcagtggctgcagggcgagcaggacccgcagccggaggacagcgaggcctttgcgcgcgagctgatcttcgcctatatgaaggatatcgcctactgccgctattgccgcccgacgatcaaggacctgacgccggagggcatcgagcaggccctgctcaggcagaatatgacgacccgcgtcgagacggccctgaaggacacggcgcttgtgaccgggccggacggcgtgacggactatgtgatcccggaattccgtctgacagacttctccgcaccgcttggacgaagctatgagatccgcttccgcatcctgttcccgaatgcgggtccgtggatcacggagcagtaaaaaatgggagctgcggttcattgccgcagctccctgatttgtttgatcacgtcaatccctccggctcagctggatggattgacgttttcattatacttcacatgcggtccggggcggagaagcccagcagatcgatgcactcctccagcgcgcgcctggcaaggcggatgagggcgaggtagcccgcctgcttctgcttgtccggctcggccagaatacgcgtctcatggtagaagcgattcaccgcgcccgcaagctcataggcataggcgcagatcacgttcggtgcggagtcacggtaggccatctgcagggcgtccggcatctgcgccagctccagctgcagcgccttggcgctctcgctgtcggccggggccatggcccagtcgccctcgccgccgcagcggttcaggatggacttgatgcggacgatggtgtagagcaggtaggggccggtgttgccctcgaacgcggcaaagcgctcgagatcgaaaatatagtccttcgtggcgaggttcgacaggtcgccgtatttcagcgccgcgatggcgatgcagcgggctgtggcgtccagctcgtcctcggggacggtctggttctcgcggattttgtccgtgacataggtcacgatgtcggaaatgagcgtttccagacgcatgacgccgcctgcgcgggtcttgaagggcttgccgtccttgccgttcatcgtgccgaagccgatgtgctgcagctccgtctccggcgggacgagatggcccttgcgcgccgtgcggaacacctgctcgaagtgcagactctggcgcttgtccgtcaggtacagcagcttgtccggatggtaatcctccatgcgctgcacgatggtggccagatccgtcgtggcatacagcgtcgcgccgtcgctcttgacgaggatgcacggcggcagttccttgcggtcgccctcctcggccacgggcacaacaagcgcgccctcgctctcgacaagcacgccctcggccttcagcttctcgagcatcggggggatgtagggctgcgcgtcgctttcgcctttccagacgtcgaagctgacgttcagattgtcatagttcttacgcagatcggccacggagacctgcatgatgtggcgccacagggcatagtagccgggacggcgctgctgcacggcaaacgtgatctcgtgagcgcgggcggcgaagggctcgtcctccttcgagcgggcgctggccgtggggtagatctcctccagctcggagatcgtgaacggcgcttcctcgggatacgggccggtgaagctctcgtcaaaatagggcaggtccggcttgcggcgctccagctcggcgatgatcaggccgatctgcaggccccagtcgcccagatgaatgtcgccgacgacattgtcgccgaagtagcggtagatgcgcttgatgctctcgccgatgatggcggaacgcaggtggccgatgtgcaggggctttgccacgttcggcccgccgtagtcgagcacgacgccgcggggctcgcgctcaccggtcacgccgaggcgctcgctctggcgcatctgctccaaatgggcggctagatatgcaggctgcacacgcaggttgataaagccgggctttacggcctcggccgaggcaaagacgctgccgtcctgcaggcggtccacaacgtcctgcgcaatgacgagcggggctttgtggtgctgctttgcggcgggcatggcgccgttgcactgaaattcgcacagatcggggcggtttgagaccgtcacgcggccgcaggccgggtcatatccggcggcggaaaacgcctccgccacaacggcggacagccggtcgatcagcttttccatgggcgatcagactccttatcgttcgataaacgaaataatatacaatgataacagaaattttgccggatgtccagtgcggaacgaattattccggcagctcgcggtacatggcggctgcgtcgtccttgcgcacggcgtcggccacggccagcacctccacggcaagcgtccgctggccgaaggcgatgcgcagcacgtcgccgggctttacgtcgcaggacgccttggccgggcggccgttcacggtcacgcgcgcgttgtcgcacgcttcatttgccacggtgcggcgcttgatgaggcgcgacaccttgagaaatttatccagtctcataggaccctcccaatcagcttttctggccgcgcagctcgatgatgcggtcgcggagcacggcggcgtattcgtattccatctgctttgcggcggcgcgcatctccttttcgagctttgcgatctcgcgctcgcgttcggcggccgtcattttcacgccgtcgcgccgctgggcctcgccctcggcctgcgtgatctcgatgagctcgcgcacgtccttcacgatggtcttcggcacgatgccgtgggccttgttataggcgtcctggatgccgcggcggcgctccgtctcgtcgatggcggcgcgcatggcgggcgtgatcttgtcggcgtacatgatgacgcggccctcggcgttgcgcgcggcgcggccgatggtctggatgagactcgtctcgctgcggaggaagccctccttgtccgcatccagaatggcgacgagcgagacctccggcagatcgagtccctcgcgcagcaggttgatgccgacgagcacgtcaaattttgccatgcgcaggtcgcgcaggatctccatgcgctcaagcgctgcgacgtcggagtgcatatagcgcacgcggatgccggcgttctgcaggtacgtcgtcagatcctcggccattttctttgtcagcgtcgtgacgagcacgcgctccttgcgctcgatgatgcggttgcattcgccgatgaggtcgtcgacctgcccgtcgatgggccggacctcgaccttcgggtccagcaggcccgtcggacggatgacctgctcggcgatctgcccggcgcggctgcgctcgtattcgcccggcgtggcggagacgtagatggcctgatggaccttttcctcgaattccgggaacgtcagtgggcggttgtcgaacgcgctcggcaggcggaagccgtattccaccaggctctccttgcgcgagcggtcacccgcatacatcgcgcgcacctgcggcagcgtgacatggctctcgtccacgaacagcagaaagtccttcgggaagtaatccagcagcgtcatgggcggcgtgccgggcgcacggccggaaatgacgcgggaatagttctcgatgccgctgcagaagccgatctcctgcagcatctcgatgtcatacatcgtgcgctggcggatgcgctgggcctcaagcagcttgtcgtgctccttgaaccagcgctcacgctcctccatctcgcgctcgatctcgaggatggcgcggttgagcttgtcccgcgaggcgacgtagtgcgaggcggggtagatggccacatggctgatgacgcgctccggcatgccgctgacggcgttgatctcggagatgcggtcgatctcgtcgccgaagaactccacacggatggcccggccggaccagtagacggggtaaatctccacggtatcgccgcgcacgcggaacgtgtttcgggtgaaattcaggtcgtttcgctcgtagcgaatttccacaagcttctgcatcagctcctcgcgggacttttccatgcccgtgcggagcgagatgaccatgtttttatagtcgatggggtcgcccagaccgtagatgcacgaaacggacgagacgacgatgacgtcccgccgctcgaacagcgacgacgtcgcgctgtggcgcagccgctcgatctcgtcgttgatggcggaatccttttcaatataggtgtccgtgtgggcgatataggcctccggctggtagtagtcgtagtaggaaatgaagtattccacggcgttttccgggaagaactcccggaattccgagcacagctgagccgcaagcgtcttgttgtgcgccagcacgagcgtcgggcggttcaggttcgcaatgaccgaggccatcgtgaacgtcttgcccgagccggtcacgccgagcagcacctgctcgtccagcccgaggcggacgccctccgtcagcttgcggatggcctccggctggtcgccagtggcgctgtagggtgcgtgcagcttgaaatccatggggtctcctttcgctcagtcaaaaacgtacatgccgaaaaaggccagcaggcccggcccgcagtcatattccatgctgcattgctccgcgagcctgcgcacgaagatgcagtaggccgacatgcaggaataatacaggtccgggtagcggcagggctcgtgttccacgatggcgcacgtctcacacagggcgcagccgctggccccgacggggaagccgggcacgtccgcgcggcgcagacggccgagcaggcgcagcgttgcggcgttgtgctccttttttgcggccttgatggccttgctgtcgctgtagtccgcgatctcccagatcgtctggagcacgagggcatggcggtgcgcctgaatgcgcgcgcgcatctcgtccggcgtgccgcagtcgggcgggcaggagtaatttgcgccgtattttccgcagagattctcggcacaaagcggccggaacgacgggtcaaagggaatgtccttcgtgtcggtcacgaccgccgccgcgaagccctcctctgccgctatggatgtcatttcttcccaggtcatatcctgcgcctccaatcaaggaattatcataatattctagcatgttccggagaaaaatgcaacatttcgggccgaatattgtagggcctgcggcaagcggaaagtttccggtcgtgcgttgtaggggagcggacagccgggcccggcgcagcacaaacgatttgtaccagctaccgttaaaatggaaaaagctatcgacttgtcattgcgagggcgctttgcgcccgtggcaatctcgggaaggcacttgcagtctgtacaagctactgttaaaacggtgtgcaccaattgcgtctgtagcggcgctcagtgagcgccatgcaggccagcagcatgtggcacatggattctgtggcgtgacgcctccagaattgtcattgcgagggcgctttgcgcccgtggcaatctcgcagtacctggccggattgtgggaaagctgtcggcgaaatcgtaattgcctgcacgagattgccacgtcggcctccggcctcctcgcaatgacaaacctttggccttccctgttttatcgacagcctgttcggatcggcagcaatgcgccgggcccggctgtccgctccccagcttgtcaaaaaagtcccttcgggcctttttcgccaagctgcttccagaattgcaaaatagaatattgtagcattttattttgcaattctgccgctgcggcgggtgattgaacgcgaaaggacaccctgacggtttcctttcacacttttcttccctccgaaactttcggctgggcaggctttttgacagtctggggagaggcatgccgctcccctacaacgctccgtgtgcgcccggtgagtgaacggtcctctttttgttttccgcatgtcccgccgcccctgccggttcctctgtaacgggcagcaaaaacccgcagcggctggctgcgggtttcgggctaggtcttacggatgaatttttcgccgcatttcgggcagcggatgcacagcttgccgcggtgcttcgggacccggacggtctgcccgcacgacgggcagcgaaaatagcggttgttgcggtcgcgcagccgcatccacagctgcaggaaccggcggttctcccgctcgcggcggctgagattccgcgaaaacatgcggaccatggcgaggatcagcagaccgtacatcaacagtgacaggatcggtgcgatgatgccgcggtagaccgtgctggtccgcagcgcgtaggtcaggatggtgttggtgaggctcaggatgacggccagcaccagcaagagcatattcagttgatcagaaccgtagcggccgtacatccatttgcggatgcttgcgcccaaacgtcggaacatagttatcacctgagaacaattataatgcggtgaggcggatttacaaccctttccccggaatatttacgatttgtttacgaatttattgcagggctgccccggcgcagaacgatcaccgcgacctccggccggttgaacaggcgaaagtgcacgtttgtatagccaagcccgcggctgacatacagggccgtttcgccctgccggtaaagcccggcatcccatgcggggaacagccgccggtccgtgccgaacagcccgcccacgaacggcagccgcacgacgccgccgtggcagtgcccggccagcacggcctgcacgccgagggcgctccattgcggcaattggtcgttacggtgcgtcagcagcaggagaaaggcggcctctccggcctccgcgcggatattcgcgatcagctccgcaggcgttttgcgctctgccgggccgcaggggtcatccgttccggcgacgatgagcgcgtcttctccgcgccggagcacgcgccagtcatcctgcagcaccgtcacgccgcaggtgcgcatctgcgccagaatgccgcgcaggccgggcacgcgccattcgtgattgcccgtcacataatacacgggggcaatggcacacagaccgcgcagcagcggcggcagcatggcaaggtccgtgtgctcgtcaaacagatcgccgtcgatgcagataaggtccggctccgcccggcgcacggccgcaagcaggcggcggctgccccggccgaacacgcggccgtgcaggtcagccagctccacgatgcgaagcccgtcgaacgcgggcggcagggcaggggagacgagtgcggtctcggtcgtctgcaggctgcagtttccccacagcaggaatccggcggcaagcagggccgtcagcacgagcaggacggcggttttccggcggcgcatggcggcttcctccctttcaagagcttttttgcacagttgtattgtatgccggagaaaagtttgctataatgaaaaaataaaaaataaggcagcaccgcacaattgcagcgagagcattcagcgagagattttttgccgggacaaggtttgaaaagtgcagacgtactttgtgtacccgcaaggggcatgccgcatccgtaaggcggcaaagccgccaacggctgcgcaatacttcaaacttttcgaaccgatggatcggcgaaaaatatccggtgaaggccgaagctgcaattgcgcggggctgccctaactgggatgtgtatctggtgtgaagtacggaatctggaacaccgccctgccggacagcgccgcggtcgatgcgctgcagcaggcgggctattcgcctttgacggcgcgcgtgctggccgggcgcggctgcgggactccgcagcaggcgcaggagctgctgtgcgcggacgcgccgctgtttgacccctttctcctgcgggagatggaccgcgccgtgcagacggtgcggcaggcgctgcagctcgggcagcgcatcgccgtgttcggcgattatgacgtggacggcatcacggccacctgcctgctgacggattttctgcgcggcatgggtgcggactgcgtcgtccatatccccgggcggctcgaggagggctacggcctgaacgccggggccatccgccagctccgtgcgcagggtgtgcggctcatcatcacggtggactgcggcatcacggcgctggaggaggccgagctctgccgggagctgggcgtgacgctcgtcatcacggaccatcatgaatgcaaggagcagctgccgcagtgcgcggccgttgtggacccgcaccggccggaccggacgtatccgcacacgatgctctccggcgtcggcatcgcattcaagctggccgctgcgctcagcggcgatcaggacggcgtcgcccggcgctattgcgatctcatctgcctcggcacgatcgcagacgtcatgacgctgcagggcgagaaccgccgccttgtcgtcatgggcctcgaggccctgcgtcagccgcagcggctgggcctgcgcgccctcatccatgcctgcggctgcgacgagcaggagatcactgccgggaccatcggctatatactcgcgccgcgtgtcaacgccgccgggcgtatggagcaggctgagctggccgtgcgcctgtttctgacgcagaacccgcaggaggccgaccggctggccgaaacgctctgccgcctgaaccgcgagcggcagaccatcgaatccgaaatttacagtgaggccgtcagccgcctgcacggcgcaccggacggcgcgatcgtcctagcgggtgagcactggcatcagggcgtcgtcggcatcgtggcctcgcgcctttccgaggaattctgccgcccgacgttcctgatctgcctggacggcgaacgcggcaaggcctcgtcccgctcctacggcggctttaacctgtttgcctcgctgacggagctctccggcctgcttgagggttacggcggccatgagcttgccgccgggttcacgatcgcccggaagaatatcgacgccttccgcgcggccatgtgccgctgcgccgcggcctatgcggcgtccgctccggtggaggccacgctgcaggtcgactgtgagatcgaggcgtccctcctgacggaggagaacgtccgcggcctttcgcagctcgagccgtgcggcgcgggctgcccgaagccggtgctcagcctgagcggcctgactgtggagcatgccatggccgtcggcagcggcaagcatctgcgcctgcgtctgcaggctccggacggcacgcccgtgcaggccattttcttctcggccgggcgtctgtcggcaaagctccgtcccggcgaccgggtcgacgcagcctttacgccgcagatcaacgaattccgcggccgccgcacggtgcagctcaatctgatcgacctgcgccgcgtcgagccgacgaagctctatgaccgtttccgcgcgcatgaggcgctgcggccggacgagctgcagacgctggccccggaccgcgaggatgtgatcggcgtgtggaacttcctccgccgtgcggcccccggcggcgcggagctgcgggacaataccgaccgcctctgcctgcagatcgcggcgtcctctccccggccgcaggcggcgcgccgcgccattgcctgcctggagatcctggccgagctcggccttgtgtctctgcggcgcagcggcagcgccattgcggtgcgcatcgtgccgcaccggacgaacccactggaaaacagcgtgctgttctgcacgctccgcaagctcaaagcaggtgattgaatggaaacctttcaggaacactatctcagcatgaagcgcaccatcgcggcgcgcaagctgaatgtcgatatggccctcatcgaccgcgccgtggactacgcgcgcgaaaagcacaaggaccagaagcgcaaggacggctcgccctatatcatccatccgttggccgtggcggagatcgtcgcggagatcggcctcgatacggacgccatcctgggcgcgctgctgcacgactgcatcgaggacacggactcgacctacgatgatatcgcccgcaatttcggcccgacggtcgcctcgctcgtcgagggcgtcacaaagctgacgcgtgtggagtattccacgctcgaggagcagcagatggagaacctgcgcaagatgttcatggccatgagcaaggacatccgcgtcatcctcatcaagatcgccgaccgcctgcacaacacccgcaccatgcagttccagagcccggaaaagcagatctccaagtcccgcgagaccatggacatctatgcgccgctggcccaccggctcggcatgcagaagatcaaatgggagctggaggataccagcctcaaatatctggatcccgagggctataacgagatcatgcgctatctcaacgcccatcaggccgaggcggacgcctttatgaaggccatccagagcaagatcaccacgcgcctttcggcagtcggcatccacggctccatttatggccgcatcaagcatgtctattccatttaccgcaagatgaaggcccagaacaagacgatcgacgagctctacgatatgtatgcgttccgcgtcatcgtcgattccatcccggactgctataatgtcctcggtcacatccacgacctgttcaatctggtccccggccgcttcaaggactatatctccacgccaaagcccaacatgtaccagagcctgcacacgacggtcatcggccagcagggcatcccgttcgaggtgcagatccgcacctgggagatgcacgagacggcggaatacggcatcgcggcccactggaagtacaagcagggcgtcgcgggcggtgatgaaaagcagtttgaatgggtccgccgcctgctggaaacgcagcaggactccgatgcggaggattatatccactccctcaaggtcgatatgttcgacgacgaggtctttgtcttcacgccgaagggcaaggtcatgtccctgccgtccggctccacccccatcgactttgcctatgccatccattccggcgtcggcaacgccatggtcggcgcaaaggtcaacaaccgcattgcaagctatgatcagcagctgtgcaacggcgacatcgtcgaggttctgacctcgaaaacggccaagggcccgagccgcgactggctgaatatctgcaagagcaacggcgcgcgcacgaagatcaagcagtggttcaaaaaggaaaagcgcgaggagaacatcgtgcacggcaaggcgagcttcgagggcgagatgcgccgcgccaatgtcaatcccgccgtgctgcaggatgccgagctgctgccgggccttttgaaaaagctggcattcgaatgcctggacgatatgtatgctgccatcggctatggcggcctgacggcggcaaaggcgtttggccgcatccgcgacgatctgatccgcgccacgcgccagacgcctgcgcccccggtccgcgaggtgcagaagcagcccgagccgggcaagggcggccgccacaaggattccggcgtcatcgtcgaggatatcgattcctgcatgatcaaattctcgcgctgctgcacgccggtgccgggcgacgacatcgtcggctttattacaaagggctacggcgtgtccatccaccgccgcgactgccgcaacgcagccggtgcatccgatccgaagcaggccggacgctgggtcaaggtcgcgtggagcacggaggacaagccgttctccaccacatttgagatcgattccacggaccgcagcggcatctggctcgatatcgccacggcgctgagcgcggccaagctgaaggtcacggagctctccggccgtgatatgcctgccggaaaggcgcgcaccgtcgcgacctttgaggtgcgcaacgtgcaggagctggagaccatccgcacgaagatccgcgccattgacggcgtgatcgatgtgagaagagggcagaactgatgagagctgtgatcacgcgcgtaaaaagcgcctccgtttccattgcgggcagcgtcgtgggcgagatcggccacggcctgctcatcctgctcggcgtcggcccggacgacacgccggagctgtgcgaaaagctggccgacaaggcactcggcctgcgtattttctgcgatgaggcggggaaaatgaaccgctctctcgccgatatcggcgggcaggtgctcgtcgtcagccagttcacgctctatgccgactgccgcaagggcaagcggccgagcttcacgggcgcggctctgccggagctggccgtcccgctgtatgagcagttcctgcaggagtgccgcagccgcggctttgcgccgcagcacggccggttcggcgccgatatgcttgtcgcctcggaaaacgacggccccgtcaccatcctgctcgatacggacgagctgctccagccgaggaggggctgatcccggaaaaccgcagacgccattgcccaccgatgattgcagggagcggcatcctcgacgccccgtggggcaccctgcaaatttccgaccgctctgccgaccgcacgcgctgccaaatttgactgtagcggcgctcagtgagcgccttgcaggctggaaagttatagggcggcatcgtcgaccgtacccgccttgtaggggaggggcattgccgaccggtacaggctgtcgttaaaatggtgatggcccccgaattgtcattgcgagggcgctttgcgcccgtggcaatctcgcagtacccggtcggatcgtggggaagctatcggcgaaatcgcagctgccttcccaagattgccacggccccttcgggacctcgcaatgacaaatctgggtatctcaagccatggaatccctgccaaaggaatcgcaactgcctatggcgctcactgagcgccgctacattttctctcgcccggtgggcctgcgcagggaacgccgctacagatgcaattggtttgtacgctttatcgttgcccctgtaagcacaacacagaaaagagcgcccggatgaagaatttgtttcgaaccaaattcggaaaacgcgttctcatcggcggcatcctgctgctagccgcggccctctgcggctttgccgctgtgctgtcgtccttcctgccggagccctggaatggccttgcagccaacggctgcgtcgtgctgttcctccgcctgcatgcaaagcgcaaggctgagtcggacggcggcacgctggggcggaacgtcggcgaagcgtacgataacactaccgaggccggaagcagcgtctcggtctatacctattccggcgcgctgggggtcccctatgcgtttgtccgatgactgaaaaggaggatcccatgaaggtctattccctgatgctgggcagctaccagaccaattgctatctcgctgcggatgacgacggcgtctgcgccgtcatcgatcccggctatacgccagagcgcgtgctggaggcggcgcagcgctatggcctgaccatccgcgctgtcctgctgacgcacggtcattttgaccatgtcggcggcgtgcgcggcgtggcggaggcggcgcgctgccccgtctggctgtgcgaggcggacacggtcctgcccgagcgcctgacggccgggccgctgtattacaccgacacctatgccgacggtgacactgtcgaggtcggaagcctgcgctttaccgtgctggagacgccgggccacacgcccggctccgtgtgcctcctgtgcgagaacgtcctgttctccggcgacacactctttgcaggctcctgcggccgtgtcgatctggcaggcggcgttccggcgcagatgggcacgagcctgaagcggctggcggagctgcccggcaactatgccgtcctgcccggccacggcccggccacgacactggatgccgagcgcgcggacaatccctatctgcgggaggcgatggcatgaagctgctcctgcgcggccacgacgaccgctatgccgtcgagcagctccagctcgccctgttcccggaggaaccgatggagccggtgacggagccgttttccggtgacggggcggtttcgtccctgcataccggcgcggtctggctcacggccacggccgagatcacgctgcacggcaaaacgggccgcgcctgccgccgcctgcgcgcggcggaggccgatgtgcctgcgcgccgccgcctgctgcagaacacctattatgaggcggccatgtgcctgcgtgagccgcccgcctggggcagcctgtccggcgtccgcccgacgaagctcacgacgcgcgctctgctggagggcaggacgcccgccgaggcggaaaagctcctgcgtacgcgctaccatgtctcgccggagcgcagccgcctgtgcgtcgaggcctcggaggccacggtacaggcagcgcagctgctgcggccgcaggatgtttccgtctatgtcggcattcccttctgcccgacacgctgcgcctactgcagcttcgtcagctcgtccatcgagcgcttttccggcctgttggagccgtatctcgacgcgctggtgcgcgagatcgcccacacgggcgacctgctgcgcgcgtccggccggacggtccgcacgctgtatatcggcggcggcacgcccacgacgctctcgtcggcccagctgcgcaggctcatggaggcgctgcggacacatattgacttgacagagctggtagaatatacggtggaaggcggccgtccggacacgctcgatgccgaaaagctcgaaacgatcgcgtccatgggctgcggccgcatgagcatcaacccccagaccatgaacgacgccgtccttgcgcgggtcggccgccgccataccgcggcgcagaccgcggccgcctatgaggcggcgcgcgcagcgggctatgacgctgtgaatatggaccttatcgcgggcctgcccggcgatgaccccgcgtcgtttgccgattcgctgcggcaggtgctggcgctggccccggagaatgtgaccgtccacacgctggccctcaaaaagggcgcggacctctatgccgagcggatggagcttccctcggcggacgatgtggcgcagatgctggccggggcggaggcctcgctccgcgcggcgggctacacgccctactacctctaccggcagaaatacatgtccggcagctttgagaacatcggctggtgccgcccgggcacggccggactttacaacatctatatgatggaagagatgcattccatcgtgtcgctcggcggcggggccatgacgaagatcaacctgcccgacggccgtctggagcgcttccacaatcccaaattcccgcagcagtatctcgagcgcatcgacgacgttctggctcagaaggacgcggcgttccgcctgctgtgaggcacggaaaggaaatttatggacactttattttccaatgtgacgatcgtgaccatggacgaggccatgcacgtctactttgatgcctacctcggcgtgacggacggcaaaatcagctatctcgcgcgcgaggcccccaaggagaagacaaagcgccttgtccccggtgagggcatggtgctcatgcccggcctcatcaactgccacacgcatctgccgatgtccgtgctgcgcggctatgccgacgatgtcgagctttcgagctggctcaacgactatatcttcccgcatgaggaccggctcgacggccgcagcgccaaggcggcagccctgctgtccattgcagagtgcgtccgcttcggcacgacgtccatctcggatatgtataacttctgcgacgagatcgccgaggctgtggccgagtccggcatcaaggccaacattgcccgcggcgcgacactgttcggcgaggacttcgactttgaaacgcaccccgcctgccgcgagcttgtcgccctgaaggaaaagtgggacggctatgacaacggccgcatccgcgtcgaggcctccgtgcacggcgaatatacctcggactaccgcctttgggacgcgctgagcgaatttgccatcaacgagaaggccggtatgcacgtccacctgtccgagacaaaggctgagcatgagcagtgcctcgagcgaaacggcctgacgcccgcgcaggtgctcgactgccaccatgtctttgacacgcgcgccattgcggcccactgcgtctgggtcacgccggaggacatgcgcctgctggccaagcgcggcgtgacggccgtgcactgccccgtttcgaacctgaagctcgcctccggctgcgcccccgtgacggagatggtcaaggcgggcatgaacgtggccctcggcacggactcgtccgcgtcgaacaacaacctcgacctgttcgaggagatgaaggctgcggccctcatggccaaggtgacatccggcgacccgaaggcgctgccggtcgaggccgtgttgatgatggcgacggtctgcggcgcgcgcgcgcagggccgcgaggccgagtgcggcatgctgaagctcggcatggacgccgacctcgtgctgctcgacttcacgtcgccgcatctcatgccgtgccacaatgtgatgtcgcatctcgtctatgccgcctccggccacgacgtcgtcatgaccatggtgcgcgggcaggtgctctatgctgcgggcaagtatccgacgatcgacctcgacagcgtcgtgcgcgagctgtccggctacgtcatgccgcgcattttcgaagaagcgcgcagctgatcccaacggaaaggacggatgaatgttggaagaaaagacaacgaagaagcagaatttcctggccggtgcggcggtgctgtcgctggcgacgatgatcgtcaaggtcatcggcatgttcttcaaaatcccgctcaaccgcctcatcggcgaggcaaactacggctatttcaccacggcctacgatatctacaccgtactgctcatgatctccacgacgggcctgcccgtcgccatgagccgcatgatctccgaggcccgcgcgctgaacaacggcaaacaggtgcgtcagatctaccgcgtctccctcatggccttcctgtccatcgggatcatcggctcggcactgatgctgatcatcccgaagcagctggccaacatgatggagaacccgaatgccatgtggtccatctttgcgctcggcccggccgtgctcttcgtgtgctacatctccgcctgccgcggcttcttccaggggcaggggaacatggcccccacggccgtcagccagatcatcgaggccctgtgcaagctcttcctcggcctcggccttgcctggctcgtcatgaatcgcctcggcgacggcccgctcgccgctgccggttccatcgcgggcgtgacgatcggcacggtgctctcggccctctacctcttctgcaagacgcgccgccgcacgcgcgagctcagccgcgcggaggggcaggcaagacccgcaggcgagacgctcaagcgcctgctggccattgccgtgcccatcacgctcggcgcagccggtctgcagatcatcaacctgttcgatgcggcgacggtcatgaaccgcctcatcaatgccgcgggctacacgcaggagcgcgcggacgtcgtcaagggtgtttataactactgccagaccatcttcaatttcccctgtgccttcattccctgcatcaccatcgccatcatcccggccattacgaacagcctgacgctgcaggaccgccgcggcgtgcgctccgtgcagaattcgtcgctgcgactcatgggcctcatcgccatgccctgcgccgtcggcctcatcgtgctggcagagcccatcgtcgccctgcttggcggctataccggcgcgaacctcacgcttgccacgaagctcatggccatcctcggcgtcgccgtggtgttcaacagcatcgtgctcatgacggacgccatcatgcaggcacacaaccacgccgtcatccccgtcatcaacacgctcatcggcggcatcgtcaaggtcatcgtcaactacattctcgtcggcaaccccgatatcgccatcacgggcgcgcccgtcggcaccatcgcctgctatgccgtcatcaccgtgctgaacctcatcgccatgcgccgcgtgctgcgccgcaatgcgccgaagctcctgccgaacctgtggaagacgaccatcgccgccgttctcatgggcggcacgacgtggctggcctactggggcctcggccgcatcggcatgggccgtgccgtcgcctgcctcggctccatcgtcgtggcggtcctcgtgtacgtcgtgctcatcattgtgctcaaggttttgacctatgaggactgcctgctgctgcccaagggcgagaaaattgcaaaaattctgcgcgttcgctgattttttccagaaaaaaccttgcgtatttgccaggcatgtggtagattttataagcatgcgctcggggatctccccggagaatgatatactgagaaaagaggatacccattatgaacaagactgaactcattgcggaagtcgccaacaaggccggcctgtcccgcaaggacgcagagaaggcgctcggcgccgtcgttgagaccatcacggaagccgtcgtcaagggtgacaaggtgcagctcgtcggctttggctcctttgagacgaagcagcgagaggcgcgcacgggccgcaaccccaagacgaaggagaccatcgagatcccggcaacgcgtgttcctgtgttcaaggccggtaaggctctgaaggacgctgtcgcagaataattcttctgatatttcacaaagattttacagaaccttaaagatgagaggctgctccgctttggcggggcggcctcttcttttgctccaaatgacgataaaaaatggatatttttccgaaaaaagccttgaattcgacggaggattatggcataattatcttaaacttttgcatggtaaaggataacgggattcgtcctttcctgtaaaagaatgaaaattaaaggaaagaggtaaaagcgatgttaaaaggcaaggcaaagcgatccctcgcatttgtcctggctgcctgcatgctgcttgctctcctgccgtccttcggcgcgggcgcaagcgcggcaaacgtgtcgtataccgaggtcgatccttccgtgatcgatacgggcacggccgtgctgcccgaagcagagcaggacgcggagcaggacgttcctgccgcggacgaggaggtccatgtgatcatcctgttcgagcagaaatccctggcgaagaaaggcttctctaccaaagacctgctggagaatgagaaggctgccagctacagcagcagcctgaagaagcagcagctgtctctggtcgaccgcatcgagcgcgaggcgctcggcggggagaagctggagatccgttatcagttcaccgttgccgtcaacggcgttgcaacggtggtgccctatggcaggatcgagcagatccttgccgtggacggcgtggcggatgtctacctggaggaacgctacgagcttgatgagacggtccagccggatacggcgactgcgggcgagatggtcggctcctacagcgcatgggcggacggctataccggcgcgggcagccgcattgccatcatcgacacgggccttgatctgtcgcatccctcgttttcggagggcggctattactacagcctgggcatcagtgcggcgagcttcggcaagaagatctccgattacaaccttctgacgaaggaagagatcaaaaaggcgctgcccaacctgagtatttccgcggacaagaacccgcccaaggcggacgacctgtaccgcaatgccaaagtcccctttgcctataactatgtggacgacggcctggatgtctcccacgatgccgagggcgacagcaacggcgaccacggcacgcatgtcgccggtatcgcggcggcgaaccgctatgtcccgcactatgacgctgacggcgacctgtactatgataagcaggagctcggcgttacgggcgtggccccggatgcccagctcgtcgtgatgaaggtcttcggcgtgggcggcggcgcgtattcttccgactatatggccgccatcgaagatgccatctggctgaactgcgacagcgtcaacctgtccctcggctccggcagcgcaggccgcagctacggctcgaagagtgatcagcagatcctcgacagcttccggaatacggataccgtcgtaacggtctctgccggcaacaacggcgcatggggcgagaacgttctgaccggaaccggcatgacctatacgacggatgtgcgcatgcacaccggcggcagccccggctcctatacgaactccttcacgatcgcctccgtgacgaacacgagcatgagtggcgtgatgggcaagttcaacggcgttgccgcgatccccggcgacaccggtgagacctacggcgcaaagaatttctccacgctcgatacgagcgaggaccagagcggcacgacgtatgactatgtcttcctcggcgatcccgtcaagggcgagggcatctacggcctgcccgagaactatgcaaacgtcgacgtgaagggcaaggtcgtcctgatctcccgcggcaattcttcgtttgcggacaaggccaacgcggccattcaggcaggtgccgcggcggccgtcatctacaacaacgcgcccggctccatcaacatgaacctgacgggctataacttcccgaaccctgccgttatgatcgagcagagcaaggcgaaggagatcctcgcggcttcgacgcaggatgagacgaccggcctctggggcggcaagatgaccgtttccgctaaggccgagacgctgcacggcgtggccgacggctacaagcccagctcgttctcctcctggggtacgacggaaaatctcgacctgaagcccgagcttatgacgcccggcggaaacatctattccacgctgaaccacagcagctacggcatgatgagcggcacgtccatggcggctccgtccgcagcgggcggcgcagcgatcatggcgcagtacatcaaggaacacaagctcagcaagcaggagggcctcacggtccgcgcgctggccatggcgctcatgatgagcacgtccgagccgctgaccgacccggacaccggcgtgacctattccccgcgccagcagggctccggcctgatgcagctgcaggaggccgtgacatctccggcctacctgctcgtcggtgagaaggaaggcaacgacggtaaggtcaagctgaccttcggcgacgatgcggagcgcaccggcgtctacaccggcagcttctccgtccagaacctgtccgattctccgctgcactatgcactcagcggcaaggtcacgaccatggccgtcgaggagatcgagggcgaggattacatgagcgacagcgcctatgcgctggatgcgaacgtgacgttctccgccgacggcaagagcgtctatgtctatgaccttaacggcgacgacaaggtcgacgagcaggatgcgctcgtcctgctgaaggccgcaaacggtacgcatgacgcgctcgacgccgagaccgtgcagaagtacgacctcgatgccgacggcaccatcaccacggccgatgcgcagctctatcttgcggcggtcaagggcgacaagagcgtcgtggacgtctacgctgtgacctacgaggtccccgcaaacggcagcatgaacgtcagcttcaccgtccgcctgaccgacggcgacaaggcgtggctgaacgggcattatccgaacggctcctatatcgagggcttcctctatgccgattcctgcgacggcgacggccgccagctctccgtcccgatgctgggcttctacggcagctgggccgagccgagcatgtatgacaagtccgtatatctcgaggatatgtgcaccgagggcgcaacgggctacgttgcccagcgcacgaacttcctcgtgcagcgcatggcaggctccacgtccggctactacttcggcggcaacctctatgccgaggatgacgaggccatcgcggaccgcgcgtccttcgccaatgagagcggcaatacgatctatgcggccgttccgaccatgatccgcaatgcgtccgatctgaaggtcacgatccgcaatgccgagaccggcgaggtctatacgaccgttgactacggcacggcgaccggcgcatattactccgcctcctccgccgcgtggtccgcgaccggcacgcaggtcaacctgagctggcgcggcaccgcggcggacaacaagacgctcctgcccgagggaacgcccatcgaggtcgtcacccgcgccgtcccggaatactactgggatcgcgagacggagacggtcatcggcggcgaagagaacctgccggagagcgccttctggacgacccgcttcgtgctggacaacaccgccccgcaggccaacgacatcgtgctgcacagcagcgctgccaccggcaagcgctccctgagcgtcacggtgcaggataaccgctatgtcgcggccgtcctcctgctcagccgcaacggcaagcagatcctcgcgcgtcaggccgtcaaccagacggagcccggcacagagacgacgctggaattcccgctcgacggcatctacaccaacgacctgctcgtcgcggtctatgactacgcctgcaatgtcaccgcctatcagacgagcttcggcggcaatgttgagcagcctgcggcaaacgccacgctccgtgcggccgttcccggcacggatgacacgaccctcttcctcgagctgaacaccgaggacaagagcagcatcaaggccctgaacgaaaacaatcccctgcccgcatctgtcctttccgtcacgagaggcccggagggaaagctcctgctcgcaagcaacgagctggatgatgcaaagaaccttgtttccacgctctacagcgtcgatgagacggactacaccgctacgaagatcggttcgcagagcaaagcggcctacacctccatgacctatctgccgcacctgaacggcggcaccctgctggccggttacggctacaatctcctgcgtgtcgacaccgcgacaggcacgatgacgagcctcggcagctttgcctccgtgatcggcagaggtgtctacatcgtcggcatgacctatgtcggcccggaggaaaccgacgagtacggtacctgcgatgatttcgccatgctgtgcagcgacggcagcgtctatctcttctccatggcttactacacgaatgcctacggccgcaagacctatggcctgtactcccgctcgctgctcggcaacgtgccggacgtgatggcgaactacgccgccggttctgcgctgtactatgcggataaccgcctgtacatcagtgtgctgaccacgtcggcctccaagctcagctatgtggacctgacggccgacatcttctggcccatttcgatcgggcagatcagcgcggcgcccgtcgccctgtactccgcaatgcagaatgcggctgcggacgacgcagcggcgcttgccccgtgggcggagcgccagaccggtatgcaggctctggagcccgccgcagcggagacgctgacggcccagcctctcccggctctgcagtgagcgcggaacggaaaggagacttcctgttatgatgaaaaaactctttgcgctgcttcttgcagccgtaatgctgctgggcgccggtgcgacggctctggccgccgagcctgagggcgcgggctatgtcatcagtatagcgaacagcagcacaacgaacagcctgacggtcgacctgcttacctgggaaggtatgaagaacggccggctggagctgacgtaccccgaggaactgacgctcgtttccgcccgcagcacgctggatgccggggccggcatcaccgacctcgacgcctcgaagcccggcacggtgcacttcgcctgggcggcctacaccgcgcagaaggatggaacgccggtcctgcgcctcacgttccgcggccagcacggcaagacctatttttggaacgtgatcgatacggagaccggctggcagagtaagtccatgctgcccttcgactatcgctttaacgatgtcctggacgagaacgcctggtattacgatgccgtttacgccgcctgggacgcaggcctgatgaacggcgtcggcagagactatttcgcgccgaacgccacgctggaccgtgcgacgcttgcgaccgttctctatcgtgaggcgggcgagcctgccgcgaagggcacggcgtccttcacggacattgccgagggccagtggtacaccgacgccgtcaactgggcggccgagcagggcgtggtcaacggctatcccgacggcacgttccgcccggaggccccgatcacccgtcaggaaatggccacgatgctctatcgctactggaagctgcagggcggcaagtataccgcgaaggacgatgtccttgcgggctatcaggaccgcggtgaggtcgccgattgggcactggaggccatgagctggacggtgcagtccggcatcatcgtcggcatgacgcccacgacgctgaacccggccggtagcgcaacgcgcgcgcaggtcgctctggtgctcgtcaactacctgaagctgaactgatcccgagaccgcaggctcccgccgtcttccggcggcgggagcgcccccgaacgattctgaaaggaaggaaatctgcatgaaaaagcggatgttatccctgcttctggcggtcgcgctcgtgcttgggctttgcccgggcgtctttgcggcgggaagtagctatgccgatgtgctcgacacccattgggcgcatccctatatcgaagacgtcacggaaaagggcatcatgaacggcgtggacgataagaacttcgcgccggaggatgccatgacgcgcgccatgttcgtcacggtccttgcccgcctgagcggcgacacgctcacggagcagaccagcttctccgatgtcccggccggtcagtggtattccgctgccgtgagctgggcggcggaaaacggcatcgtgctcggctatccggacggcacgtttgcccccgacaaggccgtttcccgtgaggacgccatgaccctgctggtccgctttgcgggctggaaggcgctcacgctccccgagggcggcgagctgacctatgcggatgccgcgagcatccaggactatgcgaaggaggccgtcgccgtggcgactgcggccggaattctggccggttacccggacggtacgttcctgccgcagaagtccatcacgcgcgccgaggccgcaaagatcctcagcacactcatgaaggtcacggattatacgccggtcgagccgacggagccctccgaggagccgacggaagagccgaccgaggaacccaccgaagagccgaccgaggagccgacggaagagcccacgcaggagcccaccgagccgtccgagccgacggagccgggcaagaccgtgaccgttacgttccgcggcgagaacggctatgccaagtaccacggccagaaggtcgcgagcatcgaggtcaacacgaacgagccctatgtggagttcggcctctacggcgtggcggaaaacggctttgagctcgacaccgcctccgcctccgcgggcacgctcgtccgcgcggagaacgtgttcatcctctcggactttgatgaggatgttacggtcgacttcacgacccgctaccgcacgatgcaggtcaatttcgtcatcagcccgaacgccaacgccatgtacgtcgacacacccgtgagcgtgacgtggggccagcccgtccccgtgccggagacccgccgcgtcggctcccatgtgtcgaactggtacacggacgccgcctacacgcaggtctatgacttctccacgcccgtcacaacgaatctgacgctctacggcaagtgggagaccaatgtctataccgtgacctatatcgtcgacggcgaggtctactattctacgcaggtcgatcatggcgagtatgtcacgaacccgaagaacccgacgaagaacaactacgtcttcgacggctggtatacggacgaggcctgcacgcagctcttcgaccgtaatcagagcatcaaggctgatgtgacggtctatgccgcatgggcggaagccaagctgaactatgtctatctcgacggcaaaaacggcgacgacagcaagtccggtatgacagcctacgacggcgtcaagacgttcgcccgcgccaaggagctgctggcggattcggcctacaaggtaatttatatcacgagcatggtcaccgtcggtgatacgcaggtctgggatctgagcgagtatccggatgcggtggtcacgcgtgccgagggctacaagagcagctacatgttctgggtgaacgccaccggtaacctgacgctccagaatatctgcattgacggcggcgcgcagcgctgggctgccgaggacggcacgccgttctccagctatatcgtcggcaactgcacgtccggcaagctgacgctgaatgcgggcaccgagatctgcaataccgttacgaccagcagcaatattctctttctgcataacgccgacttcaccatgaacgacggcgcgagcatccatgacaacacctgcaagacggcgacgatcggcctttcgaccacgaaaggcggcagcagcatcgtcctgaacggcggcgaaattcaccacaataccgtgacctatgccgcgaaggcaaacgtcagcgtcttgagcgtcccggccggtgccatcagcttgtccggaagctccacgaagggctttacgacgttcacgatgaacggcggtaagatctacgccaacaatgccgctgccgagggcagcctgaagggcgtgggcgcgatctatgtcggtcagtatgtcaatgccgaattcaagggtggcgagatcaccggcaatgccggcgctaccgcaggagccatcctgctgcagagcggcgcggatgcaaagccgagcacctgcacgctggaaaacggcaggattttcggcaataccgccacggcgggcgcagagtaccagatctacgcccacggcagcatgatccttgcgaaccagagcgtggtggaaagcgaaattctgctgatgaacagcacggcccgtctgccggttctcgtgacctccgctctgaagcagccgctgcggctgaagctcgaagcgcaggtttacatgaacaagatcgttggcggcagcggctatacgctgaccgaggccgatctggcgaacattgagctgacagagccgctggattcccattacaagctgtcggtcgacacggaaacgaacacggttttcctgaatgcttcccgtgtggtcggtacgatcgtttatctcgcggccaccggcagcgatgcgaacgacggcaagacggccgagaccgccgttctgacgttcgcgcgcgcgaaggagctgcttatcgagcggcagtccgccacgggggacaacatcatcagtatcccgtcggcttcggcgggctcttcccccaagtgccttgtggtacgcagcgacgagacgtggtccctgaagggcattccgaatgcctatgtcatgctggagaacgacacgaatacctctggcaatcttgtcgaggtcctgaactgcacactgacgcttgaggacatcacgttcgacggcaactgctattatcagctcaagggcaagtacgctacggcaatccgcggtgactggagcgacggccagaaggcgcagatcgtcgttaagtccggcacggtgttccgcgatttcggcgatgatgccatctatgcctatggctcgatcgttaccatcgaggacggcgcagtctttgagaacatcaggaagggctcagccgtctttgcaacaggatcggtgcagaacacggacgacaagtcttccgaggtcatcgtcaacggcggaacgttccgcaacaacctctattcctgcctcagcatcctcggccagagcaagcttacggtgaatggcggcctgtttgagaacaacgtcgtcagtaataccaagggcggcgccgccattctcggcgattcggccggtgcggagattacagtgaacggcggtatctaccgcaacaatgcgctgacggcggagaccggcacaatgagcatcggcaccgttctgctggccacgaacggctgcaaggtcactgtcacgggcggcgaattctacggcaacacctgcgcctcggctgaaaacggcaacggctttgcctgcagcggcacgaacgcggcggacatcacgctgaagctgaaggccggaacggacctgagcaatgctccgttcttctggaatacgccgagcaagacggcctgcctgaatgtcgcctcggccctgcccggcacgctgaagatcgccttccgcagtgcgcctgcggccggtacggtcgtcgcggccggagcggactacacgctcacggagaatgacctgagcaacctgatcagcctgactgagggcgtgcgcttcgcgctcgtcaacggccagatcgtcacggcagaataagcaatatccccaatggccccgctgcacccgcagcggggcctcagcttgtcaaaaaagtccctttggactttttcgccaagccgctttcagaattgcaaaatcaatttttgtatcattattttgcaattctgccgctgcggcgggtgattgaacgcgaaaggaaaccctgacggtttcctttcacacttttcttccctccgaaatttccggctggacaggttttttgacagtctgcggccccttatgggggaaattgcaggggaggggaaggcgcgagtggaaaatggataattggaaatggaaagcggaaagtgcaaggctcacaggtttgtcattgcgaggaggccgaaggccgacgtggcgccctgagcgcgaagcgcgaggaagtgcccttggggtgcaatctcgggaaggcactgccgtcccgtaccggctgccgaaaaaacgtacagaccgcttgcgtctgtagcggcgctcactgcgcagccgttggcggctttgccgccttacggatgcggcgtgccctttacgggcggtgagcgcctgaggcagttgcagatattgcagcggtgatccagcggcgcaggaccttcaagtttggcattccgtggagcgaagcgacgtgggaatctcgtagtaccttgttggatcgttggaaagccatcggcgaaattgcagctgcctgcacgagattgccacggccccgttggggcctcgcaatgacaaatctgtgggccttgcgccacagaatgtgtgccgcaatcatcgccaacctgcaaggcgctcactgcccgcaaagggcacgctgcgtccgttttttacaaaaaagttcgaaaaatcacgattttcaccttgcggattttgcctgcgtgtggtatattttcattttgtggacaaaaaatcttttgggcaacaccacacaattgcagcttcgaccttcgccggatatttttcgccgatccatcggtttgaaaagcttgaggtacacaaagtacatctgcacttttcaaaccttgtctcgacaaaaaatctcccgccgaatgctcttgctgaatcatgcgttgctgccctagaccggatacagaatagaagggactgtcttccatgacggatcagaaaaacattcgaaatatcgccatcatcgcgcacgttgaccatggcaagacgacgctggtcgatgagatgctcaagcagggcggcatctaccgcgagaatcaggctgtggtggaccgcgtgatggactcgggcgatctggagcgtgagcgcggcattaccattctggccaagaataccgccgtgcattataagggaacgaaaatcaacatcgtcgataccccgggccacgccgatttcggcggcgaggttgagcgtatcctcaagatggtcaacggtgttctgctgctcgtcgatgcggcggagggccccatgccgcagacccgcttcgtgctgcagaaggcgctggagctgggccacaaggtcattgtcgttgtcaataagatcgaccgtctcgacgcccgcgtcgaggaggtcatggacgaggtgcttgagctgctgctcgacctgaacgccacggacgagcagttcgaatcgccgacgctgttctgctctgcgcggcagggcatcgccagctattcgccgaacgagacgggcgtgaatctcgacccgctgttcgataccatcgtcaactatatccctgcaccggagggcgaccccacggcgcccatgcagatgctcgtctcctccatcgattataacgactatgtcggccgtatcggcatcggccgcgtcgagcgcggtaccgtccgcgtcaatcaggaggtcgccatctgcgactatcacgatcccagccactccgccaagggcaagatcgtcgcgctctatgagttcgacggcctcggcaaaaatcccattcaggaggcaggggcaggcgagatcgtcgcgttctccggcatggcggacatcaccatcggccgcacgatctgtgcgccggagcaggtggagccgctgcccttcgtgaagatctccgacccgaccatcgagatgacgttctccgtcaacgattctccgttcgcgggcaaagagggcaagtacgtcacgtcacgaaacctacgcgaccgtctgcagcgcgagctcctcaaggacgtctccctgcatgtgacggagcagggcacagacgcgttcaacgttgcgggccgcggcgagatgcacatctccattctcattgagacgatgcgccgcgagggctatgagttccaggtcagcacgccgcgcgttctgacaaaggtcatcgacggcaaggtctgcgagccgatcgagcgcatggtggccgacgttccggaggcctccatgggcagcgtcatcgaaaaaatgggccgccgcaagggcgacctgctctccatgaaccctgtcggcagccgctatcgcctcgagttcctcgttccgtcgcgcggcctgttcggctatcgcagcgagttcctgaccgacacgcgcggcgagggcatcatgtcctccgtgctggattcctacgcccccgtcaagggcgagatcgagcgccgcaagaccggctcgctcgtcgcctttgagagcggcgaggcctgcacctatggcctgttcaacgcgcaggagcgcggcgtcctgttcatcggaccgggcacgcaggtctatgccggtatggtcgtcggcatctgctcgcgcaatgaggatatgaccgtcaacgtctgcaagaagaagcagctgacgaacatgcgcgccgccggtgcggatgatgcgctccgcctgacgagcccgcgccagatgtcgctggagcagtgcctggagttccttgcggacgacgagctgctcgaggtcacgccgcagagcctgcgcatccgcaagcgtgagctggatcacgcggccagaatgcgccagatgatgaagcagcgcaacaatcagtaaaagaacaaaacaaacgggagcggacgccgtccgctcccgtttttgcatgaattcgggggtgtgccacgctaggtgctgcacctgcaaactggtacagactgtcgttaacatggtgtgcaccaattgcgtctgtagcggcgctccctgagcgcctaaggcagttgcgggtattgcggcagtaattcagcggcgcgaggcaaacagatttgtcattgcgaggaggccgcaggccgacgtggcgccctgagcgcgcagcgcgaggaagtgcccttggggtgcaatctcgggtaggcagttacgtttttgccggaagtaccctgttatccagccggttcctgcgagattcccacgtcgcttcgcgcctcggaatgacaaatctgggggcattgcgcggtcaacgatgtcactccataacttgccagcctgcaaggcgctcgccgcccgtaaagggcacgccgcatccgtaaggcggcaaagccgccaacggctgcgcagtgagcgccgctatagacgtaatcggttttaccattgtaacgatagcctgcttcttgcgccggtgcggcgccgggaagggcatgcccgtcccctgcagcgcgctatagataccccatatcacaagccttatccatcaagcaaaaattccagcagcgccagcgggtcctgcgcatagacgctgatctccagcagggtgccgtcgggttcgagcacaccgaagctcgcgccggagcagcccgcaaaatcaccctgccacagccgcgcggccagcacatcccgcgtcagctcctcccggtagaaaaccggaaaattccgcgcgtccgggtcgacggccgcgccgtcctcgggcaggtgcagatcgtagcgcgccgtttcgtccgcgtggacgagcgtcgggatctccgacggatggctgacggtgaccgtcaggttctgcacatcggcgctccagctggccgtcagccagtcgcggccttcgcccagctcgcggtgcgcgcgatcaaagggaagggcgaccgccgtggggagatagcacccaaagcgctcgtcggcataggccgcctcctcgtccagctgctcactgcgccagacgggaatgtccgccgtttcgagctgatgcagctgcagcacgccgtccggctccagcgactgcgtgacgagccgcgcggcaagctcctgcagcgggggaagctccccctccatcgtaatgcgcatgccaacggcgtctgcgccctcgccgcgcacgaagctgacgacggcgtgggacggccctgcggccgctgccacggggacgccgaagacttcgcacgtctcctccgcaggctcggccagacaggcgggcggcagctgctccggcgaaagctcggccgtgagcgtgccgtctgccgtctgcaccgtcaggcgcacgatccacggaacgccgcttccgtcatagatgacctcgttctccgcgtccgtcagccagagcgtctcctgcccccagatggaggccagctgcgcctcggacagcgtgcggataaaataaccctccggatagctgatgtcggcagcggcggcaaaaagctccgtgctgtagacaagctccgcaggctccggcatggccggaccgctcgcggccgttgattcgttcgccgttggctcactcgcgagcgtgggaacggcaagagatgactgcggcgcagtctttttccacggccgcagccagagcagtccgcctgcggccagcagggcgcaggccgcaagcgcgccccagcggagcgccggatgccggcgcggcgcagcctcgggcagcggcttcagcagatcatcgtcgatctcgtggaaggcatcatacagatcttccggtctcataagagttcctcctgttccagatagtcccgcagacggcggcgcgtgcggtgcagcgtcgtctttacggtgttttcccgcatggagaaccgggcggcgatgtcgctcagcggcagggcataaaaataccgtgccagaaagacctgctgctgacgctccgggagcgtgcgcagaaaggcggagagcgcgctgcgcaggacctctgcctccgcgcggtcggccgggctttcgccgcccggcaggcactccgccagctcgtcgagcgagacggcgacgatgctgccgccgcgcttctgcgcattctgcgcgcgatagcggttcagtgccgcattgcgtgtcagcttggccagataggccgccagatgcaccggcgcaagcggcggaatggcctgccatgcggccagcagggcgtcattcacgcattcctcggccgtttccgggccggcgatccgtgctgcaagggcggtcaggccggggccgagctgcgcataggctgcggcaagtccctcctcatcgcgtgcgaggaagcgctgcaggatccatgtttcgtccattctgttctccttcgggtttcgtccgcggccgggccgcggggtcatgaggcctctcaccctatatgacagaaaagccgcgccgcaggttcccgattcgggtcctgcggcgcggaaatttttacgctttctgccttactcttccggcatggtcatgcacagccgccgcagcaggcggcaggtcagctcccaccatgtcagccgctcgatggcctccggcgcgatgatggggatctcggccagcgtctcgccgttggcggagatggtcagcgtgccgagctgctggcctgcggcgacgggcgcttccacccgctcggccagcgtgaccgtgcgggtgacggcggcctgcagacccttttcgatgaggatcggcgccgcctgctgcagctccggctgcacggcggccttctgcccgagcgtgaccgggaccggctgcagcggctcgggcatctcggtcgagacaagggcatagttggcaaagccgtagtccagcagggccttggcggaggaaaagcggtctgcggagctggcgcagtgcagcacgacagcgatgagctcgatgccgtcgcgcttggccgaggcggcgaggcagtgccccgcggccgaggtatagcccgtcttcagaccggtcgtgccctgatagaagcgcacgagcttgttcgtgttcgaaaggccgaatttcccgccgcgcaccgtgtccatccagatggtcgtgtagtcgcggatgcggtcgtgcttcagaagctcccgcgagatcacggcgatgtcgtgcgccgtcgtcaggtgctccgcggcctccggcgcatcgtccagccccgtgcagttgacaaaattcgtgtcgagcaggcccagctcctgcgcgcgctggttcatcatgccgacgaacgcgctctcgctgcctgccacatgctccgccagcgccgtggcgcagtcgtttgcggagcttacgacgacggatttgagcatttcgtccatgctcatctcctcgcccggctccagatagacctggctgccgcccttggcacaggcggcctccgaggcgatgacggtgtcgtcccagccgatgcggccggtgtccagcgcttccatgacgagcagcagcgtcatgaccttcgtcacggacgccgggcgcagccgctccgaggcgttcttttcatagagcaccgtgcccgttgcggcatccatcaggatggcggagggcgcggcgatgtccggcccggcggcacggacgggcggcgcggcggccagcagcatcgcggccgccagaagggcagtcagccattttcgcatatccatcagctccccagcttggtttcttggtacaagcgtatgcggggagagagacgaccatgcggcttttgtgcaggaagccgggatcgcatccggctccatcaacaatccatagatttttcccgatgattcgacaggtttttttgtagaaatggtgtatgatatcagaaaagaaagattgaaaatgcagaattcctgtgttagagtgaaaggaagacggaaaatgccgattcaaaaaatgatgcggggtacgatcctccgaaaaggaaaaaacgatttctatgctccgcctgccgggcagagctatcgctggaaacactgggtaacggaacacgacatcaaagtgtgcgttgcctgcaagacggcgcatggaaaaaactatgctatggacgagaccgtggatgcagcgcctccgctgcatttcaattgccgctgcgaaatatgcgcgatgaattccgtaattgccggctttgggacaaaagacggaacagatggtgcggattggtggataaaatataatgggagactgccggagtattatattagttgggaagaaatgtatgcccgcggctataaacccgggaaaccacctcggaaatatgcaccggacatgatgatttacggaggggtttacagtaacgataatggtcacctcccctctgcgccggggagagtctggtatgaggcggatataaactactacgaaggacaaagaaatcggcatcgtatcgtttggtcaaacgacggactgatatttgttacatacgaccattacgagacgttttatgagatcatatagggagggattgccacatggaaaacgacaaaacgtgcccggagcatgtgacggttgacctgaccggggtcggcggatgggaagatttttgggggcgtatccagactgcatttgttttttcggacggattcgggaaaaactgggacgccttttgggacgtactgtcaaaggagtgtccggccagtaaggtaacggtggtcggagcgaatcggcttccggcggcctggaaaaactcggccggagtcccgttccctgaaatgatccgcaggatcctgcagcgaaatcaggaattcagggaaaaattcaacgagccgttcgactacgaatttgtcgatgcataaaatgtttgccgccatggcagccgtttaccgcagaattttcttcgccttgaggtagcgctcctcctcggagaagacgcagccgcagtatttctgaatgtacatgccaagctcccgcgcacgctcctgcccggcgcggaacagcgggcggaaatcgcggtagaggaacgtcacgccgtattcggcggcggcacgctccgcgacctcgcgcagcagctcgtggttctgatacgggctgatgaacagcgaggaggtaaaggaatcaaagccgccctctttggcctcgtgcgcggcggcatacaggcgcatggagtagcacttgacgcagcggccgtcgatgtcctcggccacggcgcggacaaaggggcgcaggccgtagtcgttgcgctcaatgagcggcagcccgatggaggcggcgtagtcgcgcaggcagttgcggcggctgcgatattccgtgaaggggtggatgttcgggttataccagtagcccgtgacggcgcagccgtccgtgcgcagcacgtcgatgcactgattggcgcagggcgcgcagcagatgtgaagcagggtgttcatgaaagcagctcctttctgtgcctccattatacacggcaggcgggtcttgtgcaagcacacaaaatcgggcgtggaaatttgtggaaaattccggttgcgaacgcataaaaaatgtggtagtatgtatcaaattccacccccgcagaaaccagaaacgaaaggatgttgtgcatggccaataccaacgaaacctacgccgcccggatccagcggaagctgatgaaaaagcaatatctggtcgaagtcgccacgggccgccggaaggcagatcttgtgctgaagaatgcctcttacgtcaatgtgttttccaatgagctttgccatggggatattgccgtggccaagggacagatcgtcggcatgggcgactatgccggtgaggtggagtatgatgtcagcggcaagatcgtttgccccggcttcatcgacgcccacatccatctggaatcctcgctcgtctcgccccgcgagtttgtccgcgccgttttgccgcacgggaccacgacggtcatcaccgatccgcatgagatcacgaacgtcatgggcaccgacggcattgattatatgctgcaggccacggagggcctgcccatcgacgtgcgcttcatgctgccgagctgcgtgcccgccacgccgctggacgagtccggcgcgaacctcgactaccgcgccatcgactcattctatgaccacgcccgcgtgcagggccttgccgagatgatgaactatgtcggtgtcgtcggcggcgacaaggaagtcatcgccaagatcgttgcggcgcaggcgcaccacaagaagatcgatggtcatgcgcccggcctgtccggcaaggatctggctgcctatatcgcggcgggcgtctattccgaccacgagtgctccgatatggacgacgccatggcgaagctgcgcaacggccagttcatcatgatccgcgacggcacggctgcgcacaacctcgaggcactcgtcgatctgctcagacagccgtattacgaccgctgcatgttctgcacggacgacaagcacccgagcgacctgctggaaaagggccacatcgactatctcatccgcaaggccatccactacggcatcgatcccatcgttgccgtgaagacggcctgccacaaccccgcccgctacttcgccctgaacaaccgcggcgccattgcgccgggctatctggccgattttgcgatcatcgacaatttcgacgattttaatgtggagatggtgttccgcaagggcatgctgacgtgcagcaacggcgcggtgcatgacttcgaggccccgcgcatcgaggattaccttgtcgagcgcgcgcacgacacgttccatgtcgcccatctgacggcggaggacttccacgacgcccgtccgcgcggcgtcatcgggctggtccccggcgagatcgtctcgacggacgcgggctatgccaacgccatcgacccggagaacgacattttgaagatcgccgtcgtggagcgccacaagaacacgcaccacatcggcatcggctatctcaagggctacggcctgaagcgcggcgcggtcgccacgtccatctcgcacgattcgcacaacatcatcgttgtcggcgcgaatgaggaggacatggcctttgcggccaaccgcatcgtcgagaaccgcggcggcatcaccgtcgtagagaacgggaccgtgctcggtgagctcgtcctgcagatcgcgggcctcatgagcgaggacagcctcgtcgaggtcaacgaccagctggaggccgcgaaggagcgcgcctttgagctgggcgtgtcccgcggcattgacccgttcatgacgctgtcgttcatgtcgctgccggtcatcccggccctgcgcctgacgacccgcggcgtcatcgacgtgatcaagcagcaatacatctaatttggacaaccccgcacaattgcatctgcggccttcgccggatattttttgccgatccatcgattcggaaagtttgacgtattgcgcagccgttggcggctttgccgccttacggatgcggcatgccccttgcgggtacacaaagtacgcctgcactttccaaatcttgtctcgacaaaaaatctctcgccgaatgcgcttgctgaattgtgcggggctgcccctgactcgcggctaaattgtgcggtgttgcccttgacccgcgcatgcgcttgctgcatggtgcggtgctgcccctggcacatattcggaggacgcagacgcgtcctccgattttatttgcgcagagtgaacaagctcatcatgcagacgggacctgtaaggactgcgcggcggccagatcgttgtcagcgcggaggatacggcactgatgccgcgcaacagcatcggcctgaaggcggacggcacggtcgtcaccttcgtcgcagacggcgaccagcgccctgaagaatgccaccgtgaagctgacgcagctcaacacgcagtttggcgagccgaccgttgcattcgcggcaggccgcatggggagtgttttgcattctccggtttgaatcttcgccgatgtgggtatgcttcccacaggatatttcagaagggaaggatcaaaatgcgaaaaagcagagtgcagcgcatctgggagaatgccgtggtgttctacctcggcgggatgttctactgcacggtggagctgctgtggcggcagtggacgcacgggagcatgttcctgctgggcgggctgtgcttctggacggtcagcagcctcgggcggcgcgtacgtatgccgctgctggcgcagatggcgctgggcgcgtgcatcgtgacgttttttgaattctggacgggcgtgctcgtcaaccgcgtgatgcaccttggcgtgtgggactattccgccgcgccgttcaatctgctcgggcagatctgcctgccgttcacactcctgtggttcccattgtgcggcatcggtatcctgctcgaccgcggcatgcgccgagccctgttcggcactcaggccccgcagctgcggtgggtgtaggaggccaaaaaatgcccgccacggccggttgactgtggcgggcatttcgtgaatgcgtgtaccctacgttttttgcatattccggtacagaaaataacacggtgcagcctttttgggggggctgcaccgtgtttttccgggcttcagagcgcttcttcctccggctcgttctgcgcggggttgcacagcagctgcagactgcttgcagccatggtcagcagcagggcgacttgaataccggcgtcgttcgcgcggccgcacaggcagtctatgacggagatcgcggagaagtagactgcgcacagcgaccagaacagcgtgatgcggcgcttgcctttgccgaagctgaagcctgcgagctggaaggctgccagcatgcagctgatggcggcgaacaggtgatagacgaagtcgttgagcgacggatcggtgctccacttctggaaattcacgatgaggcgcacgatcagatagacgctcacgatcatatacagcagcggagagggcttctcgtgccgcaggcacttgcgtgcaaaggcaacaagcgtgactgcgcacacgacgccgagcagagggatgagcaggttcatcgtcttctgcagctgcgtaagggcgagggcctcatcctccgtcttcggcagggatgcgtagtagagcatgatgccgccgatcacaaagcacacggccgaggcaatgtgcaggacattcggcagctttccgccgaaaaagatctcctcccagcgcgtctggcggcgcagcggccggatcagaacggccagcgcggccagcacggccacgctcagcacggcgatgacgagatagaggtaacgccccggcaggacggcaccgttgcttttgatatcgttgctgagctgcacccagcgcaggatcgctgcgagcacggctgcgccgccggtgatgccgagcagtgcggctgcacgggtggacccgagtctcttcatggtaatggcctcccattcaaacattagccattaaattatagcacagccgggacaaaaatcctatcctttttgctgggatttggaaaaatcatggccattcgcttgacggggcaccctgtgataggatatcatgaaaaaaaacgacaaggagggcacagccatggagcagaaggaactgctgaccgtgatcgtggcggatgacgagacggagctccgcgaagcggtgtgcagcgtgatcccgtggaaggagatcggcttccgcctcgtcgggagcgccgggaacggtcttgatgccctgcagctcgtcgagcagctgcagccggatctgctgctgacggacatccgcatgccctatatcagcggtgtgagtctggcccagcaggtgcgcgagctgcggccgctgacgcagatcgccttcctgagcggctatgacgacttcgcctatgcccagaaagccattgagtataatgtcatcagctatctgctcaagcccatcagcatgcgggagctgacggaggcactggcggagatccgcgggaagattcgccggaaattcgcccgcctgctgccgcagaagccggaaaagagcggctggcgcgagcttttgctgccgctgctgctcgacggctttgccgaggaggcgcagcaggacgatcccgcgctgctggcctctctggtcggcgcgggcattctggctgccgggcaggagcggtattctctgacggtccttgccatccggctggagcaggacggcaagaaccgcacaacgccggacatggcctataccgtggacatgctgcttggcaagctttgccgcagccggagcgtgtattccggcggacgtctgctgacgctgctgatcgcggaggaggagccgcgcggactggagcttgccatcgacgagctgcgccagtccttcgcccgtgtgctggagctgcgggcgatcgtgggcatcagccacccgtttacgagcttccgccgctgccacgcggccagccgcgaggcggtggacgcccagcgctttgcgggcgagagcggcatctatcacatttcgcagatcgcggcggagagcggaacggcgcagacggacctcggcgccctgctcgcgccgctggacaatttgctgcgctccggcagccgtgaggagctggaaaagcagctcgtgcagagcttcggcgcatcgagcggcacagcggagagcgacagcgtgacgctgcaggtgctggcactggcccagcgcgtgctgcacacggcggtctcgccgggggaggcggctgcgctgctgcgccggtgccgtatcccggagccgctgttttccatttcacccccgcaggagctgcagcggcgcgtcacggcgctgtgccttgcggcgcgcgacctgctggccgagcggcggcgcgacggcgtgagcctgctgtgcgcgcaggccatggagaccattgaaaagcagtatatggaggaggacctctccctcggcggcgtgagcgagcagcttcacgtcagcccgaactacctcagcgccaatatgaagaagtacgcaggcgacacgttcatgaacctgctcatcaaaaagcgcatggaggtcgcccacgccctgctgacgacgaccggactgaagatctacgaggtcgcgcggcagtgcggctattccgaccagcactatttcagcttctgctttaaaaaatactacggcacatcgcccgcgcagctgcgccgggccgagagcgagcggggaggcgatggagcatgacgcggaaaagacgcggcctgagcatgacatccattttggtgctggcgctcgtcggtaccatcacggccatcgtgctgggagccatggccgtgttcctgcagacctatcagcgctcgctcatccggagcgtgcagacctctgcgcgccagtccgtcgcccaggtaggcaagacggtcgaggactatctggacgatgtcaacagcctcatggagctgctcgagcgaaagctcgaggatccgcggcaggaccgggacgatttctttgccgccttcctgcagatccggccggacgttgtggccgttacgacctatgacgcggcgggcgggcttgtggactgccggtcgcgcggggcaaagcgcacggagatttatcagaatctttcgtttgatcccaataaaatggacgactatgccggcggctatgtctccacgcctcatgtggcctcgatctttcagggctattatccgtgggtcgtcacgctcgttgcgccgctcgatgcgccgggccgcgaggaatggatcgcgctggacatcagcttcagcagcatttctgcctacttgaacgacgtcggcatcggccagcacggctactgcttcctgatggaccagagcggcaacatcatctatcacccgcagcagcagctcatctattccgacctcaagcgggagaacacgtcgctcatcgcgggcctgccggacggcagcaacgagagcggcagcatgatctatacgctcacctcgctggaaaacagccattggcgcgttgtcggtgtgagcttcgtcgaggagctcatcaccgagagcgtgcaggaggtcagccgcattctggccgcctccggcatcggtatcctgctggccgccgtcatcatcagcttcgtgctgttccgcacgctttcccgccccatgcacggcctgacggcagccatgcgtcagttcgagcaggatgcggacaatttcacctatgttccggtcggcggtgcgcgtgaggtgcgcgtgctgtcggattcgttcgggcagatggtcgtgcagatccagcgcctcatggagcaggtgcgtgccgaggaggtcaatctgcgcaagacggagctgcgcgcgctgcaggcgcagatcaacccgcacttcctctataatacgctcgactccattgcgtggatgtgcgagcaggggagaaatgccgaggccgtcgagatggtcaatgcgctggcgcggctgttccgcatcagcatcagccgcggccacgagcttatccccatccgcagcgagctgcagcatgccgagagctatctgcagatccagtcccaccgctataagaatcagttttcctattccttcgacgtgcaggaggagtgcctggactacctgtgcaacaagattacgctgcagcccatcatcgaaaacgcgatctaccatggcatcaacggccttgtggacgagggcgagatccgcatctcgtgccgcgcggacggggacgatatcctgttcaccgtcgaggacaacggcaccggcatggagccggagcaggtgcaggctatcctgcgcaaggagcgaagcgaccacaccggcatcgggatcaagaacgtcaacgatcgtctgaagatctatttcggaccggcctatggcattaccattgacagcgtacccgacgagggaacgcgcgtatatatccgcatgccgaaggtgcgggaggaggcagagtatgaaaaacgctaaacggctggccgcacttttcctgacggccgccgtgcttctgacggcgggctgcagccgcaagactgtcacgtcacagaactccgtatggttcatcgccaaatccacgaacacggaattctggaaatctgcctttgccggagcgaacgccgcaaaatcggagtataacgtcgatctgacgatctgcgggccggaaacggaggaggactacgaggagcagaaccgtcttatcgacgaagccgttgctgccggtgcagatgccatcgtctattccgccatcagctacacgaaaaacgccgaggcaatcacccgcgcggccaagcagggcctgaagatcgccgtcatcgacagcgacgtggactccgacggcgtcggcgtgcgcatcggcacggacaatgtcgaggccgggcgcatggccgggcgcgctgccctgcagacggactgggacagcctgacggtcggcatcgtgaactttgatctcggcagccgcaacgggcaggagcgcgagagcggctttcgcgaggtgctggcgggagacccgcgtgtgaaggacatctatacaatcaacgtcaacgccgacgccacgacggcacaggtccgcacggtgcagctccttgtggagcacccggagatcaatgtgatcgtcggcttcaacgagccgatcgccgtcggcgcggccatggccgtgcactcccttggcctcgcgggccgcgtgcgcatggtcggctttgatacgaacgtcaagtgcatcgacctgctgcagagcggggccgtttcggccctgatcgtgcagaatccctatgccatgggctacctcggggtcgaggctgtgtgcaatctgctcgacgggcagacctaccgcacggcggagctgctcgacacggcgacgcgcaccgtgacgaaggagacgatgttcaccatcgagaatcagaaggcactgttctcattcggttgacatatgcgcattttgcacaaattcgacgcattgtttttgacatccaaaacaaagaatgtgaagttttcacccttcctgcgtaagaaatctcattgttttttgtacaaattctgttaaaatttaattacgcggaacggagattccgcagaaatttatggaggatgaatgacaatgaaaaaacttcttgcgcttcttcttgtccttgtcatggtcgttgctctggtcgcctgcggcagcaacggcaacgagaccgaggcaccgacggacgcttctcagcccgcttccgacgccactgagaacaacgacaacaccgacaacagcgacacccctgtgggcaccgatctgaaggtcgccgtgttctactacacctattccgacacctacatctccagcgtccgcaccgctctcgatgcacagctggacgcgctgggcgttacctatcaggacttcgactccaacggcaaccagaccacgcagaacgaggccatccagaccgcaatcgctgacggctataacctgctgatcgtcaacatggtcacttccggttcttccgacaccgcgaagggcatcatggagctggccggcgatgtgcccgttatcttcttcaaccgcgcagtcgatgaggacggcgtcgaggcttccgcttccgtcctgaacgcttatgagaacatcgcattcgtcggcaccgatgcccccgaggcaggccatctgcagggcaagatgatcggcgagtacgtcctcgagcactatgacgagctcgacctgaacggcgacggcaagatctcctacgccatgttcaagggcgacgaggcaaacgtcgaggccatctaccgcacccagtacggcgttgaggatgccaatgctgtcctgactgccgccggcaagcccgagcttgtctacttcgatgccaacaatacctccggctatcaggtcgacctgaacggccagtggtccgctgctgcagcactcgattacatgaacacgaacctctcgcagtacaacgagggcaacaacaacatgatcgagctcatcatctgcaacaacgacaacatggctgagggctgcatctccgctctggagtccgcgggctacaacaacggcaccggcaagaccatcccggtcttcggcgttgacgccaccgattccgccaaggagctcattgccaacggcaagatgaccggcaccgtcaagcaggatgccgagggcatggctgccgccatcgctcagatcgccaaggctgtcggcgaaggcaccgctctgaaggacgccgtcgctgctacggctgagagcaacaccgagatgtacagcgtcgccgagggcgttgccacgaagctgtatgtcgcttatgctccctacaccgcgtaagcatcggacataaaaactctgactgatcgaaatcgaaaaggggaggctgccgcagggcggcagcctccttttcagattttcaaacaggccaaggaagtaaggaggacatgaaatgaatatggatcaggatatcttgctgcagatgacggatatcacgaagaccttcccgggcgtcaaggcgctcgatcatgtttctctgacgctgaaacggggaaccgtccatgctctgatgggagaaaacggcgcaggcaaatccacgctgatgaagtgcctgttcggcatttataacaaggacagcggaaccatcctcctggaaggcaaagaagtcaatttcaagaacagcagagaggcgctggacaatggcgtggccatggtccatcaggagctgaatcaggctctgaagcgctctgttatggataatatctggctggggcgttacccgaagcatctcggactggtggtcgacgagaccaaaatgtaccgggagaccatgaaaatattcgacgagctgggcatcaatgtcgatccgcaccggatcatgagcacgatgcccgtttcgcagcgtcagatggtcgagatcgcgaaggcggtctcctatcgttcgaaggtcatcgtatttgacgagccgacctcctctctcacggaggacgaggtcgagcatttgttccgaattatcaacatgctccgcgaccggggcgtgggcatcatttatatttcgcataaaatggcggagatcaagcgcatctccgacgagatcactatcatgcgcgacggtcagtggatcgcgacccgcccggctgccgagctggaggtcaacgacatcatccgcctgatggtcggccgtgagctgaacaatcagttcccgccgaaaacgaacaagccgggcgagcccttcctgaaggtcgagcacctgacgggccagtataacggcctgcgcgatgtgaacttcacggcgcgccgcggcgagatcctcggcctggccggtctggacggcagcggccgcacggagacgctcgagtgcatcttcggcgtgatgacccgcaaggacggcgtcatcaccctcgacggcaagccctgccgcaaccgcaatgcgcgcgagtccatcaaaaacggctttgccctgctgacggaggagcgccgctcgaccggtattttctccatcctgaatatccgggagaatacggtcatttccagcctgaaaaagcaccgccgcggcatctggctgagcaaccgctccatgaagaaggatacgcagtggtccattgatgccatgcacaccaagacgccgtctcaggagacgaagatccgcagcctctccggcggcaaccagcagaaggtcattctcggccgctggctgctcaccgacccggacgtgctgctgctcgacgagccgacgcgcggcatcgacgtcggcgcaaagtacgaaatttatcagctcatcatcgaccttgccaaccgcggcaagaccgtgctgatggtctcgtccgagatgccggagcttctgggcgtctgcgaccgcatccttgtcatgtcaggcggccgcctcgccggtgaagtggatgccaaaacgaccagccaggaagaaatcatgcggctggcagcaaaatacgtttaagggagggcctcggtcatggcaaatcctgtgacaaaaattcgcaatacggctgcggactaccgcaagctggacgggcgcgacaagcgccgcttctggacggacggcattctgaacaatgcgctgtacatcctgatggcgatcttcatcatctacaccgccatcgtcaaccataacttcctgaagatcggctccatcacgaacatcatctcgctggccgctgcgtcccttccgttcgcgctcggcgttgcgggctgcatcgtcctgacgggcaccgacctttccggcggccgtgtcgtcggcctgtccgctgccctttctgccgccctgctgcagaagacggaccttgcccgcagaatgttcagctggatgccgaatatccccacctgggccggtatctgcatcgccattcttgcggtcatcgccatcggtgcaattatcggctttgtcaacggtttcttcgttgcaaagttcaagctgcatcccttcatcgtcacgctggccacgcagctcatcacctatggcctgatcctcgtgttcttcatgctcaacgataacaacggccagccgctgtccggcctgtccgacggttattcgagcttcatcaagggcaagatgatctccatcggcgctgtcagcctgccgtggtatgtgctttatgccatcatcctgcttgccatcacctggttcctgtggaacaagacgacgttcggcaagaacatgttcgccgtcggctcgaatgccgaggctgccaatgtctccggcgtgaacgtcttccgcacgacggtccttgtccacacattcgcgggcgtgatgtacggtctgaccggctttatcgagggcgcgcgcatcagctccatcacgcagtccaccggcctgaactatgagtgcgatgccattgcggcctgcgtcatcggcggcgtttcgttcgtcggcggcaccggcaagatcagcggcatcgtgctcggcgttctcatcctgcgtatcatcttcgctgcgctgaccttccttgccatcgattccagcctgcagtacatcatcaagggcctcatcattctggtcgcctgctctctggatatgcgcaagtacctcgtcaaaaagtaaagacaacagctgctcctccgggcctcctgcccggaggagtttttatattaaaagtaggggcggggcatgccccgcccgtccgcgaagcggcaatcggctcgctaattcggcgcagcgcaccattctcaacgccgcgtttccccaatgtgtcattgcgaggagcgaagcgacgtggcaatctcgcagtacccggtcgaataacagaaaggctgcggcgaatacagtaactttacgatgcggggcgtcgaggacgccaccccctacaacgcccgcccggaagcctcgcaaaattttccgctttctacttcctgcatgccccgtccctgcagggctcccataagccgcctcttgcttttccgcacggattctgttacaataggcagactgtgaagaaaaagatagaaagaatagaggaggaaagaggcgtgcattcatcgctcagaaagaaatacatcggcaatgcggcgttctataaaatggcgctcgccgttgcgatccccatcatgatccagaacggcatcacgaacttcgtcagcctgctggacaacatcatggtcggccgcgtcggcacggagcagatgaccggcgttgccattgtcaatcagctcattttcgtgttcaaccttgccattttcggcgcggtgtccggcgcgggcattttcggcgcgcagtattacggcaagggcgactgggacggcgtgcggcagacattccgcttcaagctgctcgtctgcacggcccttacggtgctcggcgcgggcattttcctgctgttcggcgaggacctgatcctcctgtacctcaagggcgacggctcaccggagcagatcgcggccagcctcggctatgccaaggaatatctgctcatcatgctcgtcggctttatcccgttcacgctgtcgcagtgctattccggcacgctgcgcgaaacgggccagaccgtcgtgcccatggttgcgggcgtcgtgtccgttgtggtgaatctctgcttcaacacgctgctgatcttcggctatctcggcttcccgcggctcggtgcctcaggcgcggccattgccacggtcatcgcgcgctttgtcgaggcgggtgtcgtcatgctctgggcgcaccgcaatccggagcgcgtgccctatctgcgcggcgtgtaccgctcgttccgcatcccggccgcgctggcccgcgacattgcgaaaaagagcatcccgctcctgttgaacgaaacgctctgggcggcaggtatggcgctgctggcgcagtgctactctgtgcgcggctatgatgttgtctcggcctataacatctgctcgaccgtctcgaacgtgttcaatgtcgcctttatggccatgggcaatgccgtcggcatcctcgtcggccagctgctcggcgcggggaagatggaggaagccgtcgatacagaccgtaagctcatcacgttctccgtcggcatctgcatcgtgctcggcggcctgatggcccttgtggcccacctgttcccgcagatctataacacgtctgacagcatccgcggccttgcggccgcgttcatccgcatctgtgcgctgtgcatgccgatcaatgcgctggccaacgcctgctattttaccctgcgctccggcggcaagacattcgtgacgttcctgtttgacagcttctatgtctgcgtgctgaccgtgccgatggcctttgtgctcagccgcttcaccggcctgccgatcgtgccgctgttcctctgctgccagctggccgatatcggcaagtgcgttgtcggcctcatcatgctccgccgcggcgtctggatccagaacattgtcggaaaggaggcggcctgagtgaagcgcgatacccgctattatcagcagcatggcctgctgcgcattttcctgtcgtatttcggtccgcaccgccgcctgtttctgctggacatgctctgcgcgctgttcatcggcgcggtcgatctcattttcccgcttatctcccgccgcgcgatcaatacgatgctgcccgcgcacgcctaccatacgttcttcgtcgtcatgggcatcatggcggcagcgtatctcgtgcgcgcgttcttctattatatcatcgcctattacggccacacgttcggcatccgcgttgaggccgatatccgccgcgacctgttccgccacatgcagagcctcggctatgagttctatgaccacaaccgcacgggccagctcatgagccgcctgacgacggacctgttcgagatcacggagctggcgcaccacggcccagaggacctgatgatctccctgctgacgatcgtcggcgcgctcgccgtcatgttcacgatcgagtggcggctggccttggtcgtgtgcgtcatcctgccgatcctgcttatcgtcgtcatcacgcgccgccggaaaatgagcagggtctcgcgcggcgtgaagaagcgcacggcggccatcaacgctgagatcgagtcctcgctctccggcatccgcacggcgaaggccttcgcgaacgaggccgtggagttcggcaagttcagcgaggccaacgaccgcttcaaggtctcaaagcgggaattccaccgcgagatgggcattttctccggctcgctggagtttttcctctcgatcctgagcgtggccgttatcaccgtgggcggcacgctcatcatgcagggccggatggatctggtcgacctgttcacgttctccctgtacatctccacgttcacgagccccgtgcgtaagctcgtgaatttcgccgagatgttcgccaacggctttgcgggcctcggccgcttcgtcgagctgatgcgcacggagccgaagctgcgcgacgcgccggatgcgaaagcgctcgggcatgtccgcggcgcgatcgatgtggaggacgtctcgttctcctatgaggaaaatcaggaggtgctcgagcacgtcacgctgcacgtccggcccggcgagaccgttgcggtggtcggcccgtccggcggcggcaaaagcacgctgtgccgcctgatcccgcgcttttatgacgtgacgtccggccgcatctgcatcgacgggcaggacgtgcgctcggtcacgcaggagtccctgcaccacgccatcggtgtcgtgcagcaggatgtgttcctgtttgccgacaccattgcgaacaacatccgctacggccgcccggacgctaccatggaggagatccgggaggcggcgcggcaggcggaaatttatgacgatatcatggccatgcccgacggcttcgacacctatgtcggcgagcgcggcacgctcctgtccggcggacagaagcagcgcgtgtccatcgcgcgtattttcctgaagaatccgcctatcctgatcctggacgaggccacgagcgcgctcgacagtgtgacggagtcgaagatccagcacgcgctcgaccatctggccgagggccgcacaacgctcatcatcgcccaccgcctttcgaccatccgcagcgcctcgcgcatccttgtcgtggcggacggccgcatctgcgagcagggcacgcacgaggagcttatgtgcctcggcggcctgtatgcgaccctgcgcagcacacaggacctcagcagcgcggaatgacctctgcgaatgcccaaaagatacccgataaaatgtgaacttttttggaaggaccgtcgaaaatgggatatttgcttgctattatggtaaaatcctgatataatagcggaaatgcggtcgacgtaacgacctgttcttggacggcgcgccggaaatcttgccaaaaacatggattccgacgcattacaaggaaaacaagaccgcaatgcggattcccatccgcctgtacggcggcatagcatgggaaaaacgagaggatgatactgctttgaagactgcacaccgcgtggagccagccattacccacttcgccatcagcggcgctccgatcacctgcgagaaatacggccacggccacatcaactgcacctatcaggtcaagacggacgacgggcacgcctatattctccagcgcatcaaccgctatgtgtttgccgatccgaaggctgtgatggagaatgtcggtgccgtgacacagtacctgcgggagcgcgcggaggatccccatgaggtcctgaattttattccggccgataccggggtatactatcatatcgatgaggcgggcgagtactggcgctgctatgaatttgccgacggcatctgccttgaggccccggagtccgacaccgacttctatgagagcgccatcgccttcggccgcttccaggagatgctgcgcgagttccctgcggagacgctccacgagacgatccccctgttccacaacacaacgaaccgctaccgcatcttccgcaaggccctacaggacgatctcgcgggccgcgcggcgggcgtgccggacgatatccgcttcgcgctcgaccgcgagcaggaggcgggcacgctctgcagcctgctcgacagcggcgagctgccgctgcgcgtcacgcacaacgatacgaagctcaataacgtcctgttcgaccgccggacgcgcaaggcgctgtgcgtgctcgatctcgacaccgtcatgcccggctcgtcgctgtatgactacggtgattccatccgctttggtgcggcgactgcggccgaggatgagaaggacctttcgaaaatgggcatcaatctgcacctgttccaggtctacacggcggggtatctcgccgcctgcaagagcctgacgcccaaggagctggagctgctgccgctcggcgcaaagatcatcacgctcgagctggccgtgcgcttcctgaccgactatctcgatggcgaccgctatttccgcgtcgcctatcccgagcacaatctggtgcgcgcccgcgcgcagatgaagctggtggccgacatggaggcccactgggacgagatgcaggccatcgtcgcagaagaagcggcaaagcgaaactgaggaggagctatgcagtatttaggcgttgaatattccgtcaagcatatgccggagctcgatccggactttatccccttcggcgtatggctcgaggcctatgccaagggcgcagaaaagcccctgaccatcgcgctcgagcgcgatcagggcaagatctccgtccgtgagacgaagatccacggcacgccggaaatggccgaggccgattatcgctatgtggagcgctatgtgaaattcctgctgtggtccgtcggcggcttccgcatctggatctgcggcgacagtgcgctggcgcagcgcctgcagcgcgcctataccctcacgggcgagcgcgcatttgatgtgcagttcatgcaggatgtgtatgaggtgccgttcgaggtcatcgactgcacgccggaacagctgccgcaggccaacgagtcctccgtcgccatcggcggccatatggagggctgccgcatcggctttgacgcgggcggctccgaccgcaaggtctctgcggtcatcgacggcaggaccgtctattccgaggaggtcgtctggcacccgaagacggagccggacccccagtatcatttcaacggcatcgtcgaagccttccgcacggccgcgtccaaaatgccgcgcgtggacggcatcggcgtttcctccgccggtgtgtttatcggcaacagcccgatggtctccgcgctgttcctgaaggtcccgcgcgaaaagcgcgagcttgtcaagacgatctatgaccgcgcggccagagagatcggcgatgtgccgatcgtcgtggcgaacgacggcgacgtgacggcgctggccggggccatgggcttggagtgcggctccgttatgggcatggctatgggtacgtccgaggccgtcggctatgtcgacgccgagggcaaggtgctcggctggctcaatgagctggcctttgcgccggtcgacctctttgaggacgccatggcggacgagtggtccacggacatcggcgtcggctgcaagtatttctcgcaggatgccgtcatcaagctcgcgccgcgcgccggcatcgagctggatcccgcgctcacgcccgctgaaaagctcaaggtcgtgcagaacctcatggagaagggcgacagccgcgcccgccggatcttcgcctccatcggcgcatatctggcccatacgctgaagctgtactgccgcttctacgacgtgcaccacatgatcgtgctcggccgcgtcatgtccggcctcggcggcagcgtcattctcgagacctgcctgtccatcctgaacgaggaatatccggagcttgcgcagaaggtgcgcgtcatgctgccggatgagaaaacgcgccgcgtcggccagtccgtggcggcggccagtctgccggagctgcgcaaaaacgcctgagcccggacggagggagaatatcatgcagtttcagaatgcaatgatctatacggagaaattccgctttgagcacggggccttcgccgtggaaaacggccgcttcgcgcgtgtgctgggccagccgggcccggacgccatcgatctgcacggcgcctatgtcatccccggcctgctcgatatccacacgcacggcaactccggcgcggattactccgacggcaattgggacgactatgtccgcatggcgcgctacagtgccaggaacggcatcacctccattgcccccacgacgctgaccctgccgtatgagacgctggctgcggcctttgccacggcctaccgcatggcggacgagcgccccgcgggctgcgccgtcgtgcgcggcgcgcatatggagggaccgttcttcagcgagaagaaaaagggcgcgcagaacgccgcctatctccgtgagccggactttgaggcgttcagcaagctctttgccgccggcaacggcatcgtccgcatcgtggacgtcgcaccggagctgcccggtgcagcggaatttgtgcgcaaggcaagcaagcagtgcaccgtctccatcgcgcacacggacgcgtcctatgacgatgccgtctgcgccattgaagcaggtgtcacgcacctgacacacctgtataatgccatgcccggcatccaccaccgcaagcccggcgtcatcccggccgcggtcgagaacgagcaggtgagcgcggagctcatcagcgacggccagcatgtccaccccgcctccgtgcggctggccttccgtatgttcggtccggcgcgcatggtgctcatctccgattcgctgcgctgctgcggcatgcccgacggcgagtatgagctgggaggccagcccgtgttcctgcagggcggcgtggcccgcctgtccgacgggaccatcgcaggctccgctacgaatgtctatgactgcatgctgcgtgccatttcgttcggcattccgcgcgaggatgccgtccgcgccgcgacctataaccccgcccgccagctcggctgcatggacgaggtcggctccatccgcgacggcaagcaggcggatttcgtgatctgcgatgccgagctgaaccgccgtgaggtctggctggccggagaaaagctggcctgaaaaaagcaccgccctgagaagcagaaatgcttctcagggcgatttttatgctacctcttccccgcttggcgtcagaatgacgacgcgcagcgggatatcccggccggaggcggcgagcgccgtctcaacggcgtgggtcaggccgccgcagcacggtacctgcatccgcacgacgaggacggagcggatgtcgttccggcggaacagctccgtgagcttttcgctgtagtccacggcgtcgagcttcgggcagccgatcatggcgatgcgtccggcaagatagcggctgtggaactgcgcgcaggaaaacgccgtgcagtccgcggcaatgacaaggtccgcgccctgcagatagggggccgaggtgctcagcagcctgatctgcaccggccagttctgcagggcggacgccgcgccgtcctgcgcgggtgcggcggacggggcgaagcgcatggcccgcgcaccggggcagccgcccgccgggtactgcgccgccttggcggcctgcacggcggcctcgtcataggcaggggcctcacgctccacaaagcggatggcgtcggccgggcaggcgggcaggcaatcaccgagcccgtcgcagaaatgctcgcgggccagcttcgccttgccgttttccatagcaatggcgccctcgtggcaggccttcgcgcacaggccgcagccggtgcagcgttcttcgtcgatttcaatgatccgtctgatcatgggtgttatcctccgatttgcgtagctttcggttggctttctgccgttcggcaatggccatcatctgctcatacatggcgtcgcccacgcactggcgggcatatttgcaccactgcacgcagctgagcgtgtcgttgtagaccacaaagccgcagtgctcgcacacggcctgcgtgtcgcaggtgaacagctcgatctcgctgccgcactgcgggcagaccttctccaaaatttcgggcgtgcggggttttccctgacatccttccagaatcatggcattccctcctgttcgcatctattttaacaaatgcaggcggaaagtctgttggaatgccaacgaaaccgaaattctgcgtgtctgacccgtggacaatatccgaaaaatgtgctatgatgagcaaaaaaggaggctattgttatgcgtgttttagaaggacttcagcctgcggctgcgttgggcttttttgagacgctgtgcgccatcccgcatggctcgcgcgacacaaaggcgatctcggactactgcgtccgcttcgcgcaggagcgcggcctgagctggcagcaggatgcgtcgaacaacgttatcatccgcaagccggccagccccggctatgaggaccatcccaccgtgatcctgcagggtcacctcgacatggtctgtgagaaggatgcgaactgtgacatcgatttttcgaaggacggcctgcgcctgcgccatgacgacacctatatttttgccgacggcacgacgctcggcggagacgacggcatcgccgtggcctatgcgctggcagtgctggattcaagcgagctgaagcacccgccgctcgaggcggtgtttaccgtcgacgaggagatcggcatgctcggcgcggcagcccttgatatgagcggcctgcagggccgtgtgctgctgaacatcgactctgaggacgagggcatcctgaccgtcagctgcgccggaggcgcgacgtcctgcctgaccgttcccgtcaagcgcgtccccgcgcaggggagagcctggcgcgtcggcgtgcgcggcctgaccggcggccacagcggcgtggagatcaataagggccgcgccaatgccaacaaggtccttgcggcggcgctgcagggcctgcccgtcacgctgtgctccattgcgggcggcagcaaggacaatgccatcccgcgcacgtccgaggccgtcgttgtcagcgaggcggacgattttgctgcgctgtttgcagcgaatgcggccaaggccgccctgccggagacggagcagcatgcggaattctactgcgagcctgccgaggcgggcgagatgctggccgggagcgaggccgtgcttggccttctgaacgccgtgccgaacggcgtgcaggctatgagcagcgatattcccggccttgtgcagacctccctgaaccttggcatcctgacgacggacgccgacgccgtgcgcctgacgttctcggtgcgcagctccgtgaaccgcgagaagttcggcctcatcgatcagctcaaggcgctggctgcccgcttcggcggcagctacagcgaatccggcgagtaccctgcatgggagtaccagaaggattcccgcctgcgcgaggtcatggtcgaggtgttcgaggcccagtacggccgcaagccggtcgtggaggctatccatgccggtctggagtgcggtattttctccgaccgcctgcccggtctggacgccgtttcgttcggcccgcagatgcatgacatccacacgtcgcgcgagaggctcgacatcgcctcgacggcgcggacgtgggagtatctcgtggcggtgctggagcgcctgtgatgaaggtttttgacgcccactgccacatttacccggcaaagatcgcccgcaaggccgcccagaccacggcggccttctatgactacaccggcgagacgctcgacggcacggtgcagacgctgttcgcccacggcggcggcattaccaaatttcttgtgcagtccgtagcgacacggccggatcaggtgcagcatatcaacgagttcatcgcacgcgaggtcgcgcagtttccggaccgtctgtacggcttcggtgcgctgcaccccgattcgccgacgctggaggaggatatcgcccacctgcgtgccctcggcctgcacggcgtgaagctgcatccggacatccagggcttccgcctcgacgatccgcgctgctttgcgctggcggagcagtgcgagggcgtgctgcccctgctcctgcacacgggagacagccgctatgacttctccaacccaaaccgccttatcccgctgctgcggcgcttcccgcgcctgacggtcatcggcgcgcatttcggcggctatacgatctggcaggaggccgcgcggcagcttgccggacgctttgaaaacctctgggtcgactgctcgtcgtcgttctttgccatggacgtcgccgccgggcgcgcgctcatcgacgcctacggtgcggaccgtgtgctgttcggcacggattaccccatgtgggatccgcagcacgagctggcgcgtctgcgcggcatgcgccttgcgccggagacggagcggaagatcctctatgacaatgctgctgccctgtttgggctggaaggagagaactgatatgctgcgagtgggtaccgtcgggacaagctcgatcatgcggaccattcaggaggctatccgtctgacggacggcatggagtgccgtgtggtctattcccgcaccggggagcagggccgcgccttcgcggcggagatgggcgtgccggagcactgcacggactatgccgccatgctggagcgcagcgacctcgatctcatcgacatcgcttcgccgaatcgcttccatgtggagcaggcccttgccgcgctggagcacggcaagcacgtcatcgtggaaaagcccgccgccgtgacccgcggcgacgtgcagcggctcatcgacgccgcgcgcgcaaacggcgtgtacttctttgaggccatcacgacgctgttcatgccgcagtacgaggcctgccgcctgctgctgccaaagctcgggcgcatcgagcaggcacacatcacctatgcgcagtattcctcgcgctacgatgcctatctgcgcggcgagaacccgaatatcttcaaccctgccatgcaggccggtgcgctcaacgacatgggcgtttactgcgtgcatatggccgtcgacctgttcggcacgccgcaggacgtccggtatctggcggagctcggcccgaacggcatcgatctggccgggcggctgacactgacgtatccgtccctgacgtgcgagatcctcacggcgaaaaacgccgacctcggcagcggctgccgcatcacgggtgagaacggctggttcgcggaggacgggcccatcaacgccttcggcggctgcacggccgaactgaacggcgaaccggtcgacgtggcgctgccgcaggccgagaaccgcatggtctatgaatttgcccgcttccgcgatgccatcgtgcagcacgacacggcgttcttcgaccgcatggcggagcagtccgcgcgcgtggccgccgtactggagcaggcacaccgcactgcataactatcctgccagaaacccctccggaggagacttctcttccggaggggtatcttttcgcacaaaaacaagtcgataaataatttataacaggatttatattctaaaatcaccaggggactcacgaacgctataaaattatatttagggcataaaaatttttttatgaaatctgcacaatttggacctgtatttttctacaccaaattgtggaaaatccattgcacttctgcgaagaatctgatatgataacagcaatgggagcctgcgggagatgccgctccgcgcaggtctcttacggaaccgccggccccggcaggaaccggcaaaaacaaacgggaggtacttatggaaaagttttttggactgaaaaaacacggcaccaccgtcagaactgagatcctggcaggtctgaccacgttcatggccatggcttatatcctcatggtcaacgccaacatgttcgccaatccgttcagcgacggaacgaacgtcctcggcgtcagctacggcgccatctacattgccaccgcgatctcggcggtcatcggctccgtcctcatcggactgctgtcgaatctgccgctcgcacaggcctccggcatgggcctgaacgccttcttcgtttataccgtctgcgtcggcttcggcttcacctacgccaacgcccttgtgttcgttctcgttgacggcctcatcttcatcctgctgaccatcaccggcctgcgcaagaagatcttcaccgccatccccgacgccgtccgcaaggccatccccgcaggcattggcctgttcatcgcgttcctcggcctgcagaatgtcggcctcgtcgcgaaggatgccagcaccggcgttaccctcggctccttcaacctgttcaacaatgccaatgtcagctgggcgaccgtcatgcccatgatcgtcaccgttctggccctcgtgctcatcgccgtcctgtccaagaagggcgtgcgcggcgcggtcctgtggggcatcctcggcggcgcagccctgtattatgtgctcggcctgaccgttcccggcttctatggcgacctcagctccacgctgaagatcgacttcgtcggcccgttccgcgatttcggcgagatggccttcggcaaggtcttcacggaaggcttcgacttcagcgcctatgtcagcgcccatggcacggcagacctggtcgtcgtcttcatcacgacgtccctggccttctgcatggtcgatatgttcgataccctcggcacgctgtacggcgcctgcgcccgcggcaacatgctgctgccgaacggcgaggtccccaacatggacaaggccatgctggccgacgccatcgccaccaccaccggtgcgatctgcggcacctccacggtcacgacgttcgtcgagtcctctgccggtgttgcagagggcggcagaaccggccttgcggccatggcgactgctgcgctcttcttcatcgccatgttcctcagccccatcgcctctctcatcccgacggcggccaccgctgcggccctcatctatgtcggcgttctgatgatcaactgcgtcaaggacctcgactggatggatccgtccgttgctttgccctcgttcctcacgatggcgatgatgcccttcacctacaatatctcctacggcatcgcgttcggcctgatctcctatgtgctcatccgtatcttcaccggcaagatccgtgaagtcaaggtcggcacctgggtcatcacgatcctgttcctcctgatgctgttcctcacgcactaaacggcagatagatgcgttccggctgccccgctccggcggggcggcctttttgcggtataaggcttccggaattgtcattgcgagggcgcttgcgcccgtggcaatctcgcagtatccggatgaatcacaggcaagcctcggcgaattcgcaggcccctcgcaatgacaaatccggagacctgtgcggtcggggagtgcggtgcggaaacgcgtcccaaacgataaaaaggaccgccgcagggcgatcctttttccagtcccgtattcagtcgatcccgtcgaccgtgacgttttctacgccgttggcatcgaattcggccagatatttctgcatccgttcgttcagctcgttatacatgccggaatccggatagccgagatcgcggcgcgccagctcctctgcgaggatgtcaaaaaatacggcgtcttcatagtatgcaatggcctcgtggatgccgccgtcctcaaaggcccgcgacgggaacgagatgccgagccgcttttccacgagcgcggacagcggcgtaccgctgcacaggccgaaaattttgctttcgatccggtcgtactccgtgatgcggtcgtcgccgcgggcggagttcagcacccagttgccgatatagaccatgtccagaagctggcggaactctgcagaggtcagatctacggtcatcgcagcctcaccttcctttccagaccattatagcggctttgcccgattttttccacaggaaaacaaagaaaaaatggaaaataccacttgtttttatcggccggatggcatatgatatagtgacttgaaatgaaggcaacaccgcatcattccccttcggccctcgccggatcgtgcggtgctgccggaatcctgatggaggagcaaaacgtgaaaaaactgagtgtttgtgtgctgttcggcggcgtgtccccggagcatgaggtctcgctgcgttctgcggagtccgtgctgaacaacctcgacaaggaaaaatataacatctttccggtcggcatcaccaagaccggcgaatggatcctgtacggcggcagggactacagcaagctgccgacgggcgagtggcagcattgcccggagaaccgccgcgcggcgatctcgccggtgcgcgggcagggcctgctgaattttgagggcgactgcgttgtgcgtgagcgcatcgacgtcgttttccctgtcctgcacggcgaaaacggcgaggacggctccattcagggcctgctgcagctggccggcctgccctatgtcgggccgggcgtggcggcctctgccacctgcatggacaagacgctgacgaagctcgtcgctgatcgcgccgggatccggcaggcggcgtggcggctcgtcacggcgcgcgagctggcaaataaccccgaggccgtgctgggcggcgtggaaaaggcattctcctatcccgtgttcatcaagcccgccggaacgggctcgtctgtcggcgtgagcaaggccaaaaaccgcgaggcgctgctggcggcgctgacgaatgcggcaaaatacgacagcaagatccttgtggaagagttcatcaacggccgcgaggtcgaggtcgccgttctcggcaatgccggtccggccgcctccgtctgcggcgagatcgactccggcacggaattctatgactacgatgccaaatatatctccgactgcgcccagctctatatcccggcgcgcatcccggaggaggtctcggagcgcgtgcgcgacaacgccatccgcatctatgaggccatgggctgccgcggcctgtcccgcgtggacttcttcgtgacctatgaggggcaggagatcgtcttcaacgagatcaacacgctgcccggcttcacgtccatctccatgtatcccaagctgtttgaggccagcggcattccctattccgagctgctggacaatctgatcgagctggcgctggaggactgagatgaaggttgttctgaccatcaccggctcacagcgcttcggcacggacgagccggagaagacgagccttgtgacggagggcacgcttgaacgcgagggcgacattctgctgctgtcctacgaggagagcgagctgacgggcatggagggtacaacgaccgtgttccgcgtggagcctgcgcgcatcaccctgcagcgcagcggcacgctggagtcgcagatggtgttcgagctggggcatgaggaccgctccctgtatgatatgggcttcggtgcgctgatgatcacggtcctgaccgaccgcctcgaaaacaccctgacggacgcgggcggagagatggacgtctcgtattccgttgccattgaaaacgaaacggccgggcatatcgattatcatatccatgtccgcccgcaggaggcataaaaacaggcctgttccacaattcgcggaacaggccttgatttttctcttttttacagcaagtcctgatcgtagacggcgcggacaccgccgatgaacttcgggcggacgcgggccgccagcaggatggcactgccgatgtgatcgagctgcaggcggacgggcacggcgacctgcttcaggtgcatgccgatgagcgttccgccgatatccagcccggcatcggcacgaatgctctccacggcgacaggatcgcggaaggcgtggtaagcggccgtggcgaacgagccgcccgccttcggctgcgggacgacattcacaatgtctgcgccagggacggcctcgcgctcgatgatgatggcgcggttcagatgctcgcagcactgcgcggccagatacaggccgtgggccgtgagcacgcggtgcaggacggcaaagacctgctcggcgacctccggacgggagtccgagccgatgcggctgccgcagatctcgctcgtggagcagccaatcacgacgatctgaccgggatgcagctttgctttttcaatcagttcttctgcggcctgttcggcctgtctgcagatatcctcaagcatggatgggttctcctttcatacgggccgcaagatgcgtgcggtcgagcagcgtgaacagcgccataccggccacaaggccgacggctgcctgcggcaggtttgttgtgacggcggattccagactgggcgcatagccgaacagcggcagctcatacaggaaatagccgacgaccatgatgatctccgctgcgacggagccgagcagagaaccggagaaggtcttgccgaaccggctgccgttctttgcgaaggcacagaagatcagggcggcggcgagcgccatcagagccttgatgaccagtgtgccgggagcgtagatgaaatagccgcagatgacgtcggccagcgcggagccgatgccgcctgccgctgtgccccagaccggaccgagcacgaaggcactgagcagcaccatgcagtcgccgaggttgaagtagccgccaatcggcgagggaatgtggatgatcatcgtggccacacaggtcagcgcggcgaacatggcggccaggatcagggtgcggagctttgtctgtttcataatgggtttcctctcttgcttttcatggtgaaacctattatactgtaaattggactgatgaaaagccccaaaacagaattttttaatcagaccagatggaggtactgccatgctgacctacaccctgaaaaaaacacccggccatccgctctatgagcagctgtaccagagcatccgcgacgatattgccgccggacggctgcctgccgggtcccgcctgccgtccaagcgcgtgctggccgcccatctgggcgtgagcgtcgtcacggtggagagcgcctatgcccagctgctggccgagggctatgccgaggcgcgcccgcgcagcggcgtgtatgtctgtgccatcggcagcagcgctcccgtgcagccgccgcatatgccgtccctgccgcagccgtccgcgccggagccgctgttcgacctcagcggcggcacaggcgaggacgtgccgttcccggcctccgtctgggtgcggacgatgcgcgaggtcatcgcggacaagcgcctgatgcagccggtcgattttgccggagcgccggagctgcgcgctgccattgcggcccatctggagcaggcgcgcggcctgcgcgtctcgccggagcagatcttcatcggcgcgggcacggagtacctttatggcctcatcgtgcagctgcttgggcgcaggctgcgctacgccgtcgaggaccccggctaccgcaaaatttccggcatctacgcggcaaatgacgtgactgtctgccccattggccttgacagcgagggcctgtccgtggaagcactgcgggccagcggtgcgcagatcgcccatatttccccggcgcaccactatcctacgggcattgtcatgcccatccgccgccgcaatgcgctgctggcgtgggccgcagaggccccggagcggtatatcatcgaggacgactacgacagcgagctgcgccacacgggcctgcccgtgccgccgctgttcagtctggacgggcagggccgggtgctgtacctgagcacattttcccagaccatcgcgccctcgctgcgtattgcctacctctgcctgccgccgcggctcatggagcggctgcgcacgcagctcggcttttacgcctgcgccgtgccgagcttcgagcagttcacgctggcgcggttcatcgcttccggcgactatgagcgccacctgaaccgcctgcgcaagcgcttccgcgagaagcgcgcggccatcctggcagccattgcggccagctctctggcgcagcgctgcgagatcatcgaggaaaacgccgggacacactttctgctgcggctggcgacgtcccgctctgatgccgagctgaagcggagtgccgcagagtgcgggctttcgctgcgcttcctcagcgactaccgcagcgacgggaaaaacagtggctgcgcgatcgtgaactatgcctgcatgccaacggagcgccttccggccgcactggaaacgctggcagagcttttgtgagcgaaaaagattgatcctgagcgaattgaatcatcaaaaatccgggcctctggcccggattttttaacggatctcgcgcacgagcaaatacggcgcgccgctggcctgcgcggcctgaatgccctcgggggagtcctcgaagatgatcgtgtcggcgggggcaacaccgaagtgctccatggccataaggaagccgtccggcgcgggctttttgcgcgggacctcgacattcgtcagcagcaggtcgaagcagttctcgcggtggaaataccgcaggatggcctcaacgctgcagcgcgtggcggacgtgacgagggcggtgtgatagtcggcgcgcagcgtctgcagcagggagaacagagccgtgttttcgcggatgcggtggaacagggcggggtaggcggcgagcttcgcgtcgtgcacggcgtcgatcttggcctcgtcgccgccgagcagctcgccgagaaaatcgcggtagtagcgcccgttgcagtgcagggcgaagtcctcgacgctcaggctcacgccgtagggcgcgagcgcgacggcataggcggcctgattggcgggaaccgtgtcgaacagcgtgccgtccatgtcaaagatagccagttttttcttcaaaaatactcctccggatgggcggcgcgctgcaccatgccgtcaaagaaggcggcaagatgcaggccgtccaccagcgcgtggtttgcggtcagattcaccggcagcagcacccggtccccctcctgcgtgaatttgccgaaggtgatgcggggattgctgtccgccggagtgggcgtcggcagggaaatggccgagaacgtcagccacggaaggctcgagacgaagaagagctcgtccgggtcggctccgtcgtccagcgagggcgcggccttgacgcgcgcgacctcggcctgcgcggccggaagaaacgcgccgagcggctgcgcgcagtcgagcgtgcagtagcagtaggtcccgtccggcagggcgacggtgtgcgagctgaggcagcggtcatattccacgatgccctcgccgcggatgcgctggcgcagctccggtacggcgtttgcggcgttgatggcgcagtgcagcaccgtcaggaagaacggcaggccgcgctcctgcgtcaggcggcgcagggccgtgatgtcgcacggggctgtgacggacacataggggttggccatctgccggaaaaagtcaaagtgggcgcggcggggataggctgcgagatcaagcgtacgtggctccatgctcacaggcggtccatcgcggcgcggatgcgggcggccgtgcgttcgctgccgagcagctgcatgacggtgtagaggtccggggaattcgtcttgccggtcacggcaatgcgcaggaacgtcgaaacgtctgccacggagccgggccatgccgcaggatcggccttgtaggccttcatatcggcacagaagcctgcctcggccgtcagggccttgaccttgtcgaaccagaccgcggcgtcgtccgccgggtcataggtctgcaggaacttttccagaatgccgcgaacgaccgcaccgtcaaactgggcggggaactcgccgggcgtgaagagcccgtcatagaagaaggccatgtaggggcggacgtccttccacgtcgtcaggtccttgcgcggcttcttgccgccgcggccgatggcgaggatgctgcgggcatactccgggtcgctttcgagcgccgcggcaaagtccgggtcgaattccttcgcatattccagcgcaaggtcatagacctcggcggcgtccagcctggcgatctcgttcttggagacgtcacagagcttggcatagtcaaacagcgcgcctgccgggttgagctttttgcaggagaatttgaaatcgtccgaggacgccgtgggattggccttgcgccagtcctcgtagttggagttcagcagcgtcatgacatattcgtacacggcgcgaaccgggaagccctcagccttgtagtatgtcagggcaagctccgggtccttgcgcttggagagcttgcgcttcgacgtgccgtccatcttcatgagcgggccgatgtggacatacttcgggatgcggaagccgagcgcgcggaacagctgcaggtggaacggcaggctgggcagccactcatcgccgcgcaccacatgggtcgtgcgcatgagatggtcatccacggcgtgggcgaagtggtaggtcgggatgccgtcggacttcagcaggacttgatcgatgtcattttccgtaacggtgagcgtgcccttgaccagatcgctgtatttgaatttgttttcaatggagccggtggagcggaagcgcagcacccacggctttcccgcggcaatggcagactcgacatcctcgatgggacggtcgcgccatacggcatattcgccgtagtagccaaagttgacctttttggcctcctgctcggcgcgcatggcagtcagctcctcctcggtacagaagcaggggtaggcatcaccctgcaggacgagctgcttggcgtagacgtggtagatcgcggcgcgctggcgctggcggtaggggccataagcgccggaatcgccgtcgatggtcgcgccctcgtcaaagtggatgccatagtgcttcagcgtgttgatgagcacctccacggcgcccggaacctcgcgcttggcgtccgtatcctccacgcggaggaacagcacgccgccggactggtgcgccatacgctcggcgacaaggccctgcacaaggttacccagatggacaaagcccgtgggggagggagccatgcgggtgacgaccgcgccttcgggaaggtcgcgggcgggataacgcgcctcaaggtcttccggcgtttccgtcacgtccgggaagagcagggcggcaagagctttctgatccataacaatacctcggtctctttttgattttcggaaaaagtatagcatacgcagggggaaaaatcaatgcgcacattgtgcggaggactattgtaggggagcggcatgccgctcccggcgatgcactggcgattcgtaccggtgaacgttaaaaacaggattggtcccgaattgtcattgcgaggccccaaaggggccgtggcaatctcgcagtacacggctgaatcacaggcaggctccggcgaaaacgtaactgccttcccgagattgccacgggcgcagagcgccctcgcaatgacaaacttggtggcctcatgccacagaatccatgcggcgcatgttgccagcctgcatggcgctcactgagcgccgctacagacgtaattggggtgtacgtttcttcgacagcctgtacgggacggcagtgccttcccgagattgccacgtcgcttcgctcctcgcaatgacacatcaggagaatgccgtagtgcaccagcgccctcctgcggtttaatgatcctctacaaggcgctcactgagcgccgctacagacgcaattggggtgtacgtttcttcgacagcctgtacgggacggcagtgccttcccgagattgccacgtcggctgcgcctcctcgcaatgacaaatccggaagccttgcgcctctgaatttgtgccgcttgatttgcggtcgcccatggcgctcaatgagcgccgctgccaatatggtattccggcatgcaaagggcgcgctgcgatctgcagcgcgcccggaaaaccatatcttacacgaggcgggaaccggcggggaccttatcgtcgagcatgacgaggttcagcttgtcgccgcgctcggcggacagcagcatgccgcaggactcctgccccatcatcttgcgcgggggcaggttcgtcacggcgacgagcgtcttgccgagcagctcctccggctgataatacttggcgatgccggagaggatctggcgcggcgtgccggtgccgtcgtccagcgtaaacttcaggagcttttcggactttttgaccttctcgcacgtcagaaccttgacgacggtcatctcgaccttgcagaaatcgtcgaagctgacgggcggcagcggctcgggcagcgggtcggcggcaggagcctgcgccgcgacgtgcagggcctccagctcggcaagctccttctgtgcgtcgatgcgcgggaacagcggcgcgccgacggtcacggctgcctcacgcggcagcaggccgaatttgcacaggctgtcccagtccgcgttctccgaagcgccgatgcggcgcaggatctctgcgctcgtgtccggcatgaacggctgcagcaggccgccgcagatgcggatggtctcgagcaggttgtacatgacgcaggccagacgcggcagattgctctcgtcgcgggcgaggatccagggcgcggtctcgtcgatatacttgttggcgcgggaaatgacggcgaaaacttcactcagcgcgttctggaaggcaaactgctccatctgcgcggcatagcgctcatgcagggaaccggccagctccacaagggcggcgtcctgcgcgtcgtctgcgcgctgctccgccgggagcctgccgccgaagtacttctgcaccatggccgtcgtgcgcgagacgaggttgccaagatcgttggcaaggtcggtgttgatgcaggagatgagcagctcgttggagaagttgccgtccgagccgaacgggaacgtgcgcagcaggaaaaagcgcagcgcgtccgtgctgtaacgctcggccagcagatacggatcgacgacgttgcccttggacttcgacatcttgccgccgtccagcagcagccagccgtggccgaagaccttcttcggcagaggcatgcccatgctcatgagcatggcgggccagacgatggagtggaagcggacgatctccttgccgacaaagtggacgtcggcaggccagtagcggtcatagtcgtggtgggcgtcgttctcgaagccgagagccgtcgtgtagttgaacagggcgtcgacccacacatagacgacgtggcccggatcgaagtccacggggatgccccaggtgaagctcgtgcgggagacgcacagatcctccagaccgggatcgatgaagttgcgcaccatctcgttgacgcgggagcgcggctggagatagtccgtgttcatcagcagatcgcgcacgggctgggcatatttcgagagacggaagaaataggcctcctcctcggcgggctggacctcgcggccgcagtcggggcacttgccgtccttcagctggctctccgtccagaacgattcgcacggcgtgcagtacatgccggtgtattttcccttgtagatgtcgccgttctcatacatcttcttgaagatgcgctggatggccttgatgtggtattcgtccgtggtgcggatgaagcggtcataggagatgttcatcagcttccacagatcgagcacgccgcgctcaccctcgacgatctggtcgacgaactgcttcggtgtgatgccggcctccttggcgcggttttcgatcttctggccgtgctcgtccgtgccggtcaggaacatcacgtcatagccgcgcaggcgcttgtagcgcgccatggcatctgtggctacggtgcagtaggtgtggccgatgtggagcttatctgagggataatagatcggcgtggtgatgtaaaacttttcttttttttctttgcagcaatcgcacatgggaaaagcccttctttccttagtttccgtatctgtccattatatccgatatccgggaaaatacaagccaaaacgcggggagaccggccttattttttgcgcagcttgaaaatgagccacagcagaacggcgcccgtcagcgctccggcggcatcgagccacacgtcgctcagcgcgcagttgcgccccggcgtgaaggcctggatggtctcgtcggtcatggccgtgagcacggcgaacagcatcggcttggccagcgtaaaattccgtgcgccgtggaacgtgcccgtcagcaggatgccgagcacggcaaattccagaaaatgcgccgccttgcgcagcacgccgtgtgtgatccacggcaggatcatctgcaccacggcaagcacgccgccgctttccgcattgctggccgcggccggcatggcggaatgcagaaagatccctgccgtccacagcagggtcaggatcaggtagatccggaacgaacgttttttcatgcgtgatctcctccctgcgccggaagcacggcgggcttccagcgcggctttgggggagcgagccgcagcgcgcggaaaaagtctcgcagcagctgcgcacattcctcctccagaacgccgccctcgcaggcggggcggtggttatacggcagggcgaacaggtcggtcacgctgccgcacgagcctgccttcgggtccggcgcgccgaacacgacgcgggggatgcgggcgttgatgatggccccggcgcacatggggcacggctcaagcgtgacatagagcgtgcagcgccacagccgccagccgccgagcgtgcggcaggcctcggcaatggcctccagctccgcgtgggccagcgcgcttttgccggtttcgcggcggttgcggccgcgcccgacgatgcgctcgccgtccgtgacgatgcagccgacgggcacttcgccctcgtctgccgcctcacgcgccagcgccagcgcctcatgcatggcctccgtgtctgtcatccgctcgccctcctccggcatggtaatgccataatcatacccgattccggccggttcgtcaagccgtgtgccaaaattgggattttctggaaaaagttttgtcgaaatttgtcttgttagggaattaacgattgacacggaacgaacaaaatgatatgctgtcgccagagaaatggaaataactggaaattacgggaacgaattgcatttgcggcggaagcgatggaaggaggtgagaccggaatgaagcagggacagacgctgtgctggtgcgtctggtgcggaacggagctggtggccgggggctattgctattgcctggacatcggctgcctgtgcccggcgtgcctgccggaatacgccagagtcgtgttccgctcctgtctggttgcggtgggatgagactggcggagctatcagccgggtatcgcgaggcggcggggctgctggacatccagatcagccgtctgcgccgcctgcggcgcggtacggccgatgcgcagacgcgcgcggtgctggccaaccgcctgcgcaagctgtgcgaggccagacggcagtgccgggagcttgcgctcctgtgcgaacactattatgaaaggggattctatcgttatgcatccgattctttccaaggcctcgctccgtgagccggatacggagcgcctgaacaccatgctgcgtgtggcgctgacgccgctgcagtatgaaacggtcgtggcggtctacctgcacggccacccgcagaaggaggtcgccatcgaccggggcgtcagcccggcaagcgtgtgccagctgctgcagcgggccgagcgccgcgtgggacggtatctggggtacttataattattaagtgaatcatgaatactgaaaaatgaatagggaataattttgtgaaattaacaaacaaacgtgcgctgtaggggagcggcgtgccgctccctgcgctgtactgccgacttgtaccggctgtcgataaaaacgtaaaaaccgattgcatctgtagcggcggtcagtgaccgccatacaggctggtaagtgataggttggcatcgtcgaccgcacaatgctctcaaatttgtcattgcgaggaggccataggccgacgtggcaatctcgcagtacccggacggatcacaggaaggccaccggcgaaaacgtagctggttgcaggagattcccacgtcgcttcgctcctcggaatgacaaacctgtttgtcttacgccgccgaattactactgcaatacctgcgactgcctatggcgctcactgagcgccgctaaagacgcaatcggcgcataccatttcacgttgaccagtatgggacgaaagtgccttcccgagattgccacgggcgcaaagcgccctcgcaatgacacatcaggcagtgccaaggtgcaccagcgcccttgcacggttgaattaccccgtacagggcgctcagggagcgccgctgcaatcagacctgcaagttggtgcggtcgatggagcggccggaaatttgtaagccgtgcacggggcaacaacgaagaccttcggcgacaggagaacgcggtttctgcgtttccttaacaaaatgttcaagcaaatcggtgaaagtgggatataatgtaggtaaaaaagcgacgtgggggacgctttctgcctgcacgccgggagagagggacatatacttatggcgaaaacggttttgatcgtggaggacgaccgcaacattgcggatcttctgcgcctgtatctggaaaaagagggctatacggtcgtcatcgcgccggacggcatgcgcggcgtggagcagttccgcaccgtccatccgagccttgtgctgctggacgtgatgctgccggggctggacggctggggcgtctgccgcgccatccgcgccgagtcgcagacgccgatcatcatgctcaccgcaaagagcgaaacggaggacaaggtcaacggcctgaagcagggcgcggacgactacatcacgaagccctttgaaatgaaggaggtgctcgcccgcatcgaggccgtgctgcgccgcagcggcatcgagccggagaagagccgccgccgtctggaattcgacaagctcgtcatcgacatggacgcctttgagctgacggtcgacgggaaaaaggtcccgacgccgccgaaggagatggagctgctgtatcaccttgcctcgacgccgaaccgcgtctatacgcgtaatcagctgctcgacgaggtctggggctttgactacttcggcgatacgcgcacggtcgacgtgcacatcaagcgcctgcgcgagaagctcgagggcgtttcggatcagtgggacctgaaaacggtctggagcgtcggctacaagttcgaggtgaagtaagccatgcgcacgacatttcgccgtcaggtcacgctgatcgtcagtctgctgctggcggcgaccatcctgctgggcgtgtccttctggggcctgttcacgcactatgtcatccgggagcgtgaaagctccctgcgcggaacggcgcagtccgtcgtgtggctcacgcagacgagcgccgtctcggacgacgtgacgacgagctgggattttctgcgcacgctgtccgttgcctcgtccgcctccggcaacgacatcctgctttgcgatgcaggcggcaaggtcgtgctgtgcgcgcaggacattcagggctgctcgcacatcggctatcagctcccggccgacaaggtcgaggcgctgttcaacggcgaaagccccgatctgaatgatgaggcggctgaaatctacggccagaagcgcgtggccgtggcgctggccaggacatcgtccgacggcgaccggcagggcatcgtgctcgtgtctgtggagcgcgagacgatctccgagctgacgaccggtgcgctgaagatcttcatgcttacggcgttggccgtgtttgccgtggctctgctcgcaacgccgttcctcacaaaccgcgagacgaagccgattcaggacatggccgccgctgcgcgccagatcgcccacggcaatctgaatgtccgcgtttcgacgaactgccagaccgaggagatggaggagctggctgtcgccttcaacaatatggcggccgccatgcagaatgccgacaccgcgcgtcaggaattcgtggccaatgtcagccatgagctgaaaacgccgatgacgaccatcgcgggctatctggacggtatgctcgacggcacgatcccgcaggcagagcagcggcactatatggagctggtctccacggaggtgcggcggctgtcgcggctcgtgcgcaacatgctggaaatttcccgcctgaaggatcagggcatcccggccgataagctggcggacttcgacatctgcgaggcggcggggcaggcgcttttgagctttgagcagcgcatcaaccgcaagcacctgaacgtcgatgtagatatgccggagctcggcgtgactgtgcgggccatgccggacgccgtaacgcaggtgctctataaccttatcgacaacgccgtgaagttcatcgatgacggcggcacgctctccatccgcgtggagcgcagcgggaataaggccgtcaccacggtcggcaataccggcccgaccattgcgccggaggagctgccgctcatcttcgatcgcttccataagacggacaagagccgctcgaccgaccgcgacggcgtcggcctcggcctgtacatcgtcaagaccatcgtactggcacacggagaggacatctatgtgacgagccgcgacggcaagacggaatttacgtttaccctgccgctggtcctctgaccggcgagacgaaaccccgaaaggagggcgtgttgtggataaaatgactcccatggatccggagtatcaggagaccccgccggaatggcagcccggcacgccggggtattacggaacgggccgcctgccgaagccgccccgctcgcataccggcctgatcgtcgtgctgctgtgcgtgatgatcgtggcgaacgtcatcacagtgctgatgctcctgacgctgcgcatgcgcgccgtgcagaagaacacgaccgtcggcgcggagacggagaccgacgtcacgccgacgctgactgcgccatccggccacagcgtcgagccgacggagccgcgcacgaacggcacgggcacgctgcagatcagcgccgaggacacgcagacgcgctccgccggagagatctacacggcgatgcggccgagccttgcgctggtgtacgcggacggaaacggcggcacggccatcgtcatgacggcggacggctaccttatcacgaacgcgcacaccgtttccggcgcggagagcatcacagtgcagctcagcgatggcacggagtatgcggcggccctgtccggcatggacgagagcagtgatctggccgttctgaagatcgagccggagacggcactgcagcccgcggagttcggcgattctgccggggctgcagcgggcgacaccgtctatgtgttctcccatccgttcggtgcggcgtttgacaacgccaccatgacggacggcagcattgccgccgtgcagagcggcgtgcgcatcggcgcggagacgctcaacgtgttccagacggatgccgcgccggacagcggcagcgcaggcggaccgctcgtgaacgaggccgggcaggtcatcggcatctgcatcgaccatgtcggctcgtatgtgtcctaccagactgtgccggagttgggctttgccatcccgatcagcgaggcgaagaccattctcgacgatctgatcgtcaacggctatgtcagcgggcgcgtttcgctcggactgacggtctcggagatcccggagacctaccggcgcttctggggcctgccgagcggcgtcgtcatcgagtcggtcacggcgggcagcaacgcctactatgcgggcctgcacgcgggcgacgtgatctgccagctgggcgacagcgccgtcacgaacctcaacgactaccgcagcattctcagcgcctgccatgtcggcgaagagctgcgcgtatatatctaccgtgacgggcggcagtattacacggatgtcacgctgaccggaaagggcgaaagcccatccgagattgcgacggagcagatgcagaacgaaacggaataaacggaatatggttcggccggccggcgggaagctcccccggccggccgttttatgcgttggcaattgtaggggagcggacagccgggcccggcgcaatgctgccgatacgaacaggctgccgataaaacggcaggcaccgattgcgtctgcagcggcgctcagggagcgccattggcagtagcaggtattgggacggtgattcggcggcgtaagacaaacaggtttgtcattgcgaggagggcgaaagcccgacgtggcaatctcgcagtacccatccggagcgcaggaaagccatcggcgaaatcgcaggctgttgcaggagattgccacggccccgatggggcctcgcaatgacaaatcaggtgacctcgcgccatagaagcaatgcagcgtatactgccagcctgtatggcgctccctgagcgccgctacagacgcaattggtttgtacgttttatcgctgccctgtacgaactggcagtgccttactgaaatgacaaatccggtggtctgcgccgatttcccattgacaaacggcaaagcagccgctacaatagcgttcgtacaagtatgaaaaatatgattttggagggattcgatggcaggaggcaagcatttgctcggcatgccgcgcgggcggcacgttttcggaacggtcaaggtcggcgaacgcggccagatcgtgatccccaaggaggccctcgagctgttcggcattcggccgggtgacacgctgctcgtgctcggcgatgagaaaaacggactgcttgtgacgccgccggacgtgatgcacgacgtggcgcggcagatctttcaaaatctggaggaagaggagaatcagaaatgaacgcagaagagatctatcgtccgctcggtgtctcgccgcaggtgtgtgccttcggcgagcgggtgctggacggactgcgggaacgctttgcggccgtagaccgcatcgcagaggccaatcaggccaaggtgcttgccgccatgcagaaaaatcgcgtcagcgcggcctgctttgccgcaacgacgggctatggctatgacgacgtcggccgcgacaagctcgagcgcgtctatgccgacacgttccacaccgaggctgcgctcgtgcggccgcagatcacctgcggcacgcatgccctgactgtggccctgtccgcgaacctgctgccgggcgacgagctgctttcgccggtcggtgcgccgtatgacacgctcgaggaggtcatcggcatccgcccgtcgccctgttcgctgcgggaatacggcgtgagctaccggcaggcggacctgaagccggacggcacgttcgactatgaggccatccgcgcctgcgtgaacgaaaagacaaagctggccaccatccagcgcagcaagggctatgcgacccgcccgacgttctccgtgcagcagatcggcgagctcatcgccttcctgaagtccctgaagccggatatcatctgcatggtggacaactgctacggcgaattcgtcgagccgatcgagccgagcgacgtcggtgcggacatgatcgtcggcagcctcatcaagaaccccggcggcggccttgctcccatcggcggctacatctgcggccggacggaccttgtcgagcgctgtgcctaccgcctctccgcgcccggccttgggcaggaggtcggtgcgaatctcggcctgctgccgtcgctgtatcagggcttcttccttgccccgaccgttgtcgcatctgcgctcaagggcgcgatcttcgcggccaatctctatgagcgccttggcttccgcgtcgttccgaacggctcggagtcccgccacgacatcattcaggccgtagagctcggctcacgcgagggtatgatcgccttctgcaagggcatccagtccgccgcgccggtcgacagctatgctgatcccatcccgtcggatatgcccggctatgaggatgaggtcatcatggcggcaggcgcgttcgtgcagggctcgtccattgagctctcggccgacggcccgatccgcccgccctacgccgtctattttcagggcggcctgacatggtatcatgccaagctcggcatcctgctgtccctgcagaacatggcagacgccggtctggccacgctgccggaagtacaataaataatctggaggtatcatcccttgaactggttctggtttgcactcatcgcgctcatctgctggagcggctccgatctgttttccaagatcggctgctgcggcgaaaaggataagacggcccatctgaaaatggtcgtcgccgtcggcctcgttatgggcctgcatgcggcctatatgatcgtgttccatcacgtctccgtcacctgggacgtcgtctggacatacctgcccgtctccctgctctacatcctctccatgacgctcggctatgtcggcctgcgctacatcgagctttccatctcgtctccgatctgcaacagctccggtgcgctcgtcgccgtgctgtgcctgtgcaccggtgcgctgtccgattataacggcccgcagaaggcggtcatcctgtgcgccgtcggtctggtgtgcctcggcgtcgtcggcctcggcgtcgtggaggcgcgcgaggacgacgatctgcgccgccgccgtcagaagcacgcgaaccgcaagtatgccaagagctggcttgccatctgcctgcccgtggcctactgcctgctcgacgccgccgggacgtttgccgacagcctcgtgctcgaacgcctgaacgaggactccgcgaacgtcgcctatgagctgacgttcctggccgccggcatcggctgccttgtctatctgctggcccgccgcgagaagttcacgttcaaggcggagctgcccaagtatgtcggcgctgcctgcgagaccgtcggccagctgttctacatctatgcgctggccgatgaggagcacgttatgatgtctgcaccgatcatctcggcctactgcgtagcctccgtgctgtggagccgcctgttcctgaaggaaaagctctcatggaagcattatcttatgatcgggttcgttgttgcgggcatcgtcattctgggcatttacgacatttagggaacctctgccggggctgtgtggccccggcagttttttggcatgctcccgcctgcgaaagcgccaaaaccgcttgacttcaggcaatttcgcgcttataatattattttggatcatgatgtaataaaaactccaaatggatcgttccggaggaaaaattatgctgaaaaatactgaaaaaaccatggacaagctcgtcgctttgtgcaaaaaccgcggcttcgtgttcgcaggctccgaaatctacggcggccttgccaacacctgggactacggccccctcggcgtcgagatgaaaaacaacatcaagcgcgcctggtggaagaagttcgtgcaggagaacccgtataacgtcggcctcgactgcgcgatcctcatgaacccgcagacgtgggtcgcttccggccacctcggcggcttctccgacccgctgatggactgccgcgagtgccatgagcgcttccgtgcagacaagctcatcgaggactactgcgccaagaccggcgaggagctgccgaagcccatcgacgccttctcgcaggccgagatgaagagcttcatcgacgagaagaacatctgctgcccgacgtgcggcaagcacaacttcacggatatccgtcagttcaacctgatgttcaagacgttccagggcgtcacggaggacgcgaagaacaccgtgtatcttcgcccggagacggcgcagggcatctttgtgaacttcgtcaacgtgcagcgcaccacgcgccgcaagctgccgttcggcatcggccagatcggcaagtcgttccgcaacgagatcacgccgggcaacttcattttccgcgtgcgtgaattcgagcagatggagctggagttcttctgtgagccgggtacggacctcgagtggttcgcctactggcgcggcttctgcaagcagtggctgctctcgctcggcatgaaggaggagaacctgcgcctgcgcgaccatgacccggaggagctgtgcttctattccaaggcgacgacggacttcgagttcctgttcccgttcggctggggcgagctctggggcgttgccgaccgcacggattatgacctgacgcagcatcagaacacgtccggcaaggacctgacgtatttcgatcaggagaagaacacgcgctatatcccctatgtcatcgagccgtccctcggcgtcgagcgctcgttcctggccttcctggccgatgcctacgacgaagaggtcgtcgggcaggacaagaagggcaacgacgacatccgcaccgtcctgcatctgcatccggcccttgcgccgtacaaggcggccgtcctgccgctgtcgaagaagctctccccggctgccgaggaaatctaccatgacctgcagaaggaattcatggtcgatttcgacgatgccggttccatcggcaagcgttatcgccgcgaggacgagatcggcacgccgtactgcatcaccgtcgacttccagaccgtgggcgacgagacgaccccggcggaccatgccgtgaccgtccgcgaccgcgataccatggagcaggtccgcatccctgtttccgagctgaaggcatggcttgccgaaaagctcgcattctgacatgagcgccccggaaaagcgcagcctgcgcgagcggctgcgcccgaaggagcggaagcctgccgtccgctggctgctgacggtcctgctgctggccgcggccgtgctcgggctgcacatgctgctgcagatgatcggcacgctggacttctcccgcggccgcttcagctcctacctgcatgtgccgaagatctacctgctgaacctgctgccggtcgcactgctcgtggccttcacctatttcgccacgaaccgcgcatggcttggcttcctcatcccgtccgtgctgctgttcctcatggacttcgtcaactatttcaaggtcacgctccgcggcgacccgttcgtggcggaggacttcctgaccattggcgagggcgcgggcatcatcgggcagtatacgctgcatttcccggcaatgttctttgtgggtatcgccctcatcgccgccgggacgatcgtcctgcaccgctgggcgcgcggccgcatgccgaagaagcgctggtggctccgcgttctggcgctggtgctcatcgtgctgctgggcttcggtgcatgggagctctggtacggcaatacagatctctatgacagcatgatggaggcgaatacctccctcttcaacgtctggaaggacgcagagaattatgcctcgaagggctttgtctactccttcctgaattcgctggcggaggccatgccccaaaagccggacggctactccgcgcggaaggcagaggacctgctcagcgcctaccccgaggcggatatcccggaggggcagagagtcaacgtcatcgcgacgatgctcgagagcttctccgacctgtccgtgttcgggaccgtctccgaccgctttgtgcaggacccctatgcggacttccatgcgctgcaggccgagagctacaccggtacgctcatctccgataccatcggcggcggtacgatcaatgccgagcgtgccttcctgacgggctactcctacccgcagcctcgctaccgccgcgacacggagtccttcgtgcgctacttccttgagcagggctatgagacggagggcggccatcccggctatgcctggttctacagccgcgagaagatcaacgagcgcctcggcttcgagacataccatttcctcgatggctactacgaaaatctgctgacggatgaaaacagtctggacggccacccgaacgacgagacattcttcgccgagcgggccgaaagctgggaagtgcgcgatccctcgaagccgtgcttctcgttcagtgtcagctatcagggccacagcccctatgcggacgacaccctcgtctggggcgagacctacatcccgcacgaaggcatctccgatgcggcctactacaccgtgaacaactatctcggcagcgtggccagcaccggaaagcagcttgccgcctatgtcgactcgttccgcgatgaccccgagccggtcgtgctcgtcttcttcggcgatcacaagccgacgctcggcgcaggcaacagcttctatgaggagctgggcgtcaacgtgcaggagggcacggcagagggcttctacaacctgtataccacgccgtatctcatctggaccaacgatgctgcaaaggctgtgcttggaagaagcgacattggcaccggcccgaccatctcgccgtgctatctcatgtccgtgctctttgactgctgcggctgggaaggcccgtcctggatgcagctccagcggcagacccgtgcggtgctgcccgtcatgcagagccgcggcatgtatcttgtcgcgcagggcagcgctccgactgcctcacagggcatcgccttgctgacctacacgctttccggcgacgcgctgcaggcaaagcagaactatgccattgcagaatactacgtccgccgcattcgtcccacgcaatcctagcatcccgcttctgcgttttgaaataactcgaaaaggaatgatcactatggaaaaactttacggcaaacagctcgaaatcatggctaccaaggcacggctgctcggacttgacgccgttcataccgccgcgtccggccatatcggcggcagcctctccgcgatggacatcctcacgacgctgtacttcaacgtcatgcaggtcgacccggccaacccgcaggatccggaccgcgaccgctttgtgctgtccaagggccactgcaccccggctctgtacccggtgctgtccctgcgcggcttcttcccgcaggaggatctgaagctcttccgctccatcaagggccattactccggccatcccgacatgcgtcacgtcaagggcgtcgacatgtccaccggctccctgggccagggcatctccgctgccgtcggcatggcgctggcaggcaagctggcaaagaaggactaccgcgtctacgccctgctgggcgacggtgagatcgccgagggccaggtctgggaagccgccatgtccgctgccaagtatcacctcgataacctctgcgccgtcgtcgatgtcaacggcctgcagatcgacggcgcgacgaaggacgtcatgccgtccgagccgctcgatcagaagttcgctgctttcaactggaacgtcgtccatgtgaacggccatgactacgatgcgctcatcgccgcattcgaagccgctgccgcctgcaagggcaagccgaccgtcctgatcgccaagacgacaaagggcaagggcgtgtccttcatggagaacaacgccggctggcacggcaaggcaccgaacgatgagcagtatgcacaggccaaggctgaggtcgaggccaaattagcggaactggagggcaaataagatggctggaaaaattgcaacccgcgccgcctatggcgaggcgcttgtcgaactggcagaacagtatccggagctggtcgtctttgacgccgacctctccaacgcgaccatgacaaagggctttgcggccaagtacccggagcgcttcttcgacatgggcatcgccgagtgcaacatgaccggcgtcgctgccggcatgtccacctgcggcttcaagcccttcacgaacacgtttgcgatctttgcctccggccgtgcctgggagcaggtccgcaactccatcggctatccgcacctgaatgtcaaggtcgtcggctcacacggcggtctgtccgtcggcgaagacggcgcgacccatcagtgcaccgaggatctggccctgatgcgcgtcatccccggcatgaaggtcctgtgcccctgcgacggctacgagatgaagctcgccgtcaaggcgctgctcgagtatgacggtcctgcttacctgcgcctgggccgcgctgccgttgagaccgtcacggacgagatcgagggctaccggttcgagctggacaagggcgttacgctgaaggacggcaaggacgtcaccgtcatcgccacgggcctcatggtccagatggcgctgaaggcccgcgagatgatggctgcggagggcatctccgtccgcgtcatcgacatgcacaccatcaagccgctcgacggcgagctggtcaggaaggctgcgctcgagacgggctgcatcgtcacctccgaggagcacagcatcatcggcggcctcggcggcgccgttgccgagttcctgagcgagaactgccccacgccgctcgttcgccatggcgtgaacgacgccttcggccgcagcggcacggccaacgccgtgctcgaggcctacggcctgacgccggaggtcctgtgcgacaagatccgcgaagcgctggcaaagaaacactaagattccttgcctccgccctgcttcagcggggcggaggctttctgttatggaggaccgatctatgatccgacctgtcacgtccgccgaccgcgccgtgctgcgcgagctgctggcggagttttacgatacggacgccgtgctgcacccactccccgcatcctaccacgacgcggcgctcgacgagctgttccgctcggacagcctgcagcgcgcctgcctgctcgagcaggacggcgagactgcgggctatggcctgctctcgctcaagtattcccacgaggcgggcgggctggagctgtgggtggaggagctgtatgtccgccccgccttccgcggccgcggtctgggacatgaatttttcacgtggctgcgcggcctttccgcagcggagcatatccgccgcatccggctggaaacggagccggaaaacgagcgcgcagcggcactctacgcccgcatgggcttttcaccgctgggctattgccagatgttccgggaggaagcaacatgatctatcttgacaacgccgccacgacccggccctgcgccgaggccgttgcggccgtgaacgatgcgctgaccgcccgctggggaaacccgagcgctgtccaccgcctcggcatcgaggcggcccggctgctgcgcacggcccggcaggatgtcgccgaggccatgggcgcggagacggagcgcgtctttttcacctccggcggcacggaggccgacaactgggccattttctccgccgccgagcggctgggcaagcgcggccgccacatcgtcacgacggctgtggagcaccatgccgtgctccatcccatgcagaagctggagcagcagggcttttccgtcacctatctgcagccggacgcggagggccgcgtgagcctcgaggctctgcaggcagccctccggccggacacgatcctcgtcagcatcatgatggtgaacaacgaatccggcgcggtcatgcccattgagcgcatggcgcggctgacgcaccgcgtctgcccgaacgccctgttccacaccgacgccgtgcagggctttttcaaggtcccgtttcgtgcgcgcacgctcggcgcggacctcatctccgtctccgcccacaaggtccatggaatcaagggcgcgggcgcgctgtacatccggcccggtctgtcgctgccgccgttcgtgctgggcggcgggcaggagagcggcctgcgcagcggcacggagggcctgcctgcgatcgcggcctttgccgccgcctgccgggctctgctgccgaagcgcacggaatccattgcccgccagcgccgccttctggcgcaggcgcaggagctgctgcgtgccatcgacggcgtacagctgctcggtgcgcaggaagctccgcacattctgaatctcgccgtgccgggtgtccgctcgcagggactcatcaacgccctgcaggagcgcgatatctacgtctcggccggttcggcctgcagcaagggccaccggagccatgtgctggaggccatgggcgttgacgccgcatggatcgacggctccgtccgcgtctcgctctccgatgagacgacggaggacgacatccgcgcactggccgaggccctgcccgccgtgctgacggagctgcggggcggagggcggcgcgcatgacccgcccgctccgcaatctcatctccgccgtcacgctcgcggccctgacgggcctgctcgttctggcggccacacagtggacggacgtctttttccgcttctatccgtcgttttcccgctggatcctcggcgtgctggccgggatcacgagcgttacgtccttcccgctgtgggagccgggcctgtgcctgatcgtgctgtggggcatcatctcgctgatccgcagtctggtgcaccatcactttctgcgctggctcagcgggctgctgcttaccctttgctttgccgcctttttcttcatgacggtctggggcctgaattattttgcgccgccgatgtccgagcgtctcggcatggaaacgcaggagcgtaccgccgccgagctgcgcgaggtcacggcctattttctgcagaaggccaatgagactgcgccgctggtcgagcgcgatgccgacggcgtcatagaagcagcggggctctcacagctcggcaagcaggccggggcaggctatgagacgcttgccaaaacgatggactgcttcgacggctccacggcccgggtcaagacgctgctgagcagcaaatggtttggcaaaacgggcacgacgggcattttcatcgccttcaccggcgagagcagcatcagctccacgacgttcacggcctccgtgccgttcacgatgtgccacgagatcggccaccgcatggccttcgcccgcgagaacgaggcaaattttgccgccttcctcgcctgtgaggcgagcgaggacgcccgctttgcctattccggctactacacggccttcctctactgctataacgcgctgcgcaaggtcgatgccgctgcggcaaacgaggtctggagcggcgcgtgcaacgagctgcgtgccgactgcgccgcggcgaactcgcactataaaaaagtggaagaccagaaggtctcccaggtcacggataagatttacaacagctacctgcagacggtcggtgtggaatccggccgccagtcctacggtgaggtggtcgatctgctgaccgcctggtactttacacaggaggccacgcaatgaaacgagcgccctggctctataccctgatgcagatcgccctgtggagcattcacggcgttctgatttcctacgcgcagcgatatctcgccgggatgggcatgcgcgacagtgccatcggcctgctgctcggcggcgcgacggcggcgggcttcgtgctgcagccgcttctggccgccgtatgcgaccgcacgcacctgacggtccgcgtgacgctgctgaccggcggcggactgatgctgctgtgctgcgcggccctcctcccggcggcaaagagcctgaccctgacggctgcgttctatgcagtggcctgctgcatggcgcagaccgtcccgtcgttcgtcaatgccctcggtatggcggcggagcggaagggcatgcgcctgaatttcggcatctcccgcggcgcggggtccatcggcttcggcctgacggcccagctggccaatgtgcttctgctgcgcggcggcctgcgcaccgtgccgctctactccctctgccttgccgccattctgacggccacggcgctctgcttcccccgcacggcggagaatgcgccggaggcggagacggagcgggcctccggccttggccggttcctgcgcggcagcccgcgcttctgcctgctgctggcgggcgcgttcctcctgttcttcgggcataacacccttgcaagctatctctaccgcgtggcccagtggaagggcaacgccgatgcgcagggaacggcgacgatgcttgcggccctgctggagcttcccatcctgttcggctttcctctgctgctgcgcaaagcgggcagcggggtctggctgcggctgtccggcgtcttttttacgcttcggctgctgctgacgctcgttctgcccggaacggccgggttctatctggcccagtgcatgcagatgggcggcttcgccctctataccgtcagttcggtgtattatgtcaacgagatcatccccgtgcaggacgccgtcaagggccagagcttccttggcgcggccggaacgatcggcgcggtcgccgcgaacgtgctcggcggcgcgctgctcgacgcctcgggcgtgccgctgctgctgacggtctgcacgattgtttccgccgtcggtgcggccatcgtgtggtgcgccgtgcagacaaaaaagcacgccgcctgctgagttcgacagacttcgcaggcagaacgtgctataatggcgctacagcttatccaatgcgagtgtacttcccgaccccggcgcggcgcgccggacccaaaatgcagactatccccccggattcacatccgaggggacttttttatatgggcagcgccgcacaattcatcaccggccttcgccggatattttttgccgatccatcggttcggaaagtttggagtattgcgcagccgttggcggctctgccgccttacggatgcggcatgcccctcgcgggcacacaaagtacgcctgcacttcccaaaccttggctcgaccaaaaatctctcggcgaatgctctcgatcaattgtgcggcgcagcccgaaagaacataataatgacccgcataaagctaggcgagaagaccgtattttaccttgatgcggtcgagcttttcgagcatcggctcaccgaacagccacaggaagcagaccgtcgccgcggcgtggacgcagtccaccgggaagccggagagcagataggccccgatcgtggcccagctcaccgttccctgccacagcagggcggacgagacgttcatcagcacgccgtagacgagcagggcggacagcgcgccaaagatgcacaggctcacgcggccgcgccgcagcagcccgcggcggtagagcacgcccgccagaaaaccgcacaggcccatggcgaacatctgccacggcgtccacggcccctgcccgtacatgacgttcgacagcagcatggcaagcgcccccgtgaggaaaccagcctcgccgccgagggccacgccgctgacgatgacgagggccagcaccggcttgaactgcggcagggcggagaacgccgcgcgcccggccacgcacagggccgagagcacggccagcagcacgagctcgcgcgccgtcgggccgcgccgctcgaacagcagggcgaacggcagcatgacctccagcagcaccagcagcgagatgaacaggtattttcggtcgcccagcagatacacgccgcagaggatcgtcgcgggaacagccagtgcgatcacgccgagcgagacccacgtccgcttggtcaaatgcctgcgcgggcctgcctccgaggcgcggcccgtcctgcgcgagacgagcagcatcgcgccgacgagaaggaccgccagccccacgcacagcgcgccctgcggcacggcagccagaaacgggatcgagattttgtgcgtcagctgcaggaacagcgtgacgacgcagccgagcagcccgagcgcgccgaggctgcgccagcgcggcagcggcttgacctcagacgggtgcagcaggtccttcggcggggctgcgggcggctcgcgccgctccgggggcggggtctccgtgccgccgcaggcggcgatcagctcctcgcacgtcacggcctgcggcagcaggcggcgggccatgcggttcgcggccgtcgtatagaagtgattcccggcgaagaagtccgtcgggccgccctcggctgcgatggagccgtcgaacatcagaaggcagcggtcggcatactgcgcgcagaattcaacgtcgtggctgaccatgacgaccgtcgcgccctgctccagcagaccgttcaggatcgcggccagctcgcgcttgacctgcgcgtccatgcccttggtcggctcgtcgagcagcagaagctccggcccggccagcagcagcttggccagcgcagcgcgctgctgttcgccgccggaaagatcgtagggatgccggtcgagcaggccctccagacggcagaagcaggccatttcctgcatgcgccgcgcctgctccgcctccggcagggaggcgagctgctcccgcagctcatcgcggaccgtggcgcggtcaaagagcatctgcgggtcctgcggcagaaggccgatgcgctcggtccggcagaagcgcttgccgcgcagcgggcggcgcagaccggccagcaggctcagcgtcgtcgtcttgccgctgccgttgccgccgagcagggcggtcagctggccgcgggcaaagctgcagctcaggtcctgcagcacgtcctcgccgtccttttcatagcggaaccagacgtccttcaggccgagcagctcctctccggcggggcggagcctgcgcggcgggacgtctgccagcgggtgcgacgcggcgtagcgcgccagccactgccgcccctccgttacggtcacggggcactcgtccgcgccgacggagccgctgacgcgtaccggcgtcggcatggagaaataaacggggctttttgccgcgcgcagggcgcggctgacctcctgcggcgtgccgtgggccagaacggtctgctccagcgccagcacgcggtcgcacagcggcagggcctcctccagccggtgctcactcaggatgaccgttgtgccgagctcgcggcggatgcgcgccacggcgttcaggaaatcggcggccgcgatggggtcgagctgcgaggtcggttcgtcgagcagcagcacgcgcggctgcagggccatgacggaggccagattcagaagctgcttctgcccgccggacagagcctccaccgggcgggagaaccattcctcaatgccgaaaaagctcgccatctccgccacgcggcggcggatgaccggcgtggcaaagccgaggctctccatgccgaaggccagctcgtgccacacgcggtccgtgacgatctggtcgtccggcttctgcagcacaaagccgatctcggcggcctgccgccgtgcatcgagagcggaaagcggctcaccgaagaaggagatctcgcccgtaaagctgccgtgcggcgtcagcgcgggcttcagcgcgcgcagcagcgtcgatttgccgccgccggacgggccaataagcgtgaggaactcgccctcctccacggaaaacgagacgtcccgcagggcggggaccgtctcctgcggataggtaaagctcaggtgcgagaccgtgatgcccgccattggatcgcctcctttgcgtcaaagatcaggggaaatgcggccagcagaacgaaggccgccgtccagagcgcagcctgcacaccggccgcgccgccgggcgcgggataataccaccatttcagcccgccggtcaggctcccggctagaacgatcccgcccagcgcggccagcacgccgagacagatgccgtcccgcagcgtaaagcggaacagggaaaacgccgttcgcttcggcaggccgtagccgcggctcttcatggagtccgccgtgtcgagggcgttttccagcgcccaggtgaccacgatggacacgacgcgaccggcgcggcggatgcccgccagccagccgcgctccgcgggccgggccagcttctgcgcctgcgcgacctcgcgcgtgcgccgcagcaggcgcggcacgaagcgcaggcccatggacagcgtcagggacagcgacggcaggatcctgccgaacagatagacaaatttatcggacgtcatcacggcgttccaccccatgaaccagagcacggccgtgccgagccgcacagcggcggagatgccgtagagcacggactccagcgtgcaggcgtttccggaagggaaacggaacaggacggtcacgccctgatgggatacgagcggattgacgaccgccgccagcagcatcagcggcagcagcatggccatccggcggccgaagccccgaccggtgcagcgcagggcgaacagcgccgcgcacaccagccccgcaagctgcacggccggatgggataaaaacatggcaaacgcaagcaccagcacgaagaacgtcaggtccaccagcggatgcaggcgcgcaaagccggagcgcacgggctctcacctcacaaaaaacactttgataagtttaccacaaaacaggtcggaagtaaactcatttcgtggcagcgcgtgtcgcggcggcatagaatgcagcgggaaaggaggaattttcttggctcgtgtcatttataagttcggcggcacgtccgtcggcgacacgcggcggctgtaccgcgcggcgcggcgcatcgccgcggcccaccgcgccggggacgaggtcgtcgccgtgctctcggcgcaggcaggcgcaacggatgccctgcttgcacgcgggcgggagatcgacccggactgcgccgggcgggaggcagacagcctgctgtccacgggcgagcaggtctccgtcagcctgtgcgcactggcgctggcgcgtctcggcgtcccggccgtgagcctgtgcggctggcagatgggcctgcagacggacggcagccacggcagcgcccgggtgctgggcctgcgcggcgaccgcatcgagcgggagctgcgggccgggcgcgtcgtgctggcagcgggctttcagggcgtggacgccgccggggatatcacgacgctcggccgcggcggctccgatacgacggcggtcgcgctggcggccttcctgcacgccgatctctgccgcatttatacggatgtcgacggtgtctatgaccgcgacccgcgtctgcatcccgacgccgtgaaatacggccgcatctcctatgatgatatgcttctgctggcccgcggcggagcgcgcgtgctgcacgaccgctgcgtggagctggcgcgccgggagcacgtcgtgctggaggtctgctctgcgttctcggacgcgcctgggacgatcgtcggataaaaaacgggcttgctgcgaacaccgcagcaagccccaaatggttcgttaataacccgttatttattctccctgcgcggggacaaacagcgactctgccagctcctgcagcgcttcgggtggtaccatgccgtccgtctcaaggctgtaggcaagtcccggcgcgatatcgatccagatgagcttgcagcccgcattgccgggatcgtccgaaagctcggcccggcaccagcggatggtcgtctccaccgtgtgcggatagacgcgctctgagccggagaggtctaccagacgttccgggtcctccgagtcacccgtgccgacgtgccagcggtaggaaatgccgtccagcgtgaacgccgtctccgccacggtctgcccgtcgatctccagaacgctgtaggtcacgttctccgcatcctccggggcgacggcgacatcgtagcccagtgttttcagaatgccgcaggcgctatgcagcacgctctgcgccgaatcctcggcaccgagcgcccactgtgttcccgtgcttccggcataccagccaacccagctctcctcaccgtccgtgcgcaggtccatggcaagaccggcgtcgctccaggacagctcctgcgtccagtttgccgatgaaccggtcagatcggcggcggagtccgtcttcagggagcgcgccgtatatctgatcccgctgctcacatagcatacctgcgccatgggaatgtcggaatccgtcgggaccagagaatagaccacgtcctgcgaatccgccgggacggccagcgtatagccgaggtccatgatcgcctttgcatcggttgtgacggaggagggtacagctgcctccgttgcgctcgtgccggactgcttctgcgtgccgtccggctgcacatcctgccgggccggagcgcgcagcagcggcacggcagccagcgcggcggcgatgcacaggcaggccgcggctgcaagcgggatccagacgtgcctgcggcggcgcaccggctgcatggcctcctcgagcagatcgtcgtccacggcgtgcatcaggcggaaaaaccggtcatcctgcttcatagaaatactccttcctcttccagcctcctgcggagccgcgcgcgggtgcggaacagcgagctgcggatgcgcccggagcttgcgccgcaggcctcggcgatctcggcgatgctctcgccgtaccagtagcgccgcaggaaaaaccgccgggcatcctcgggctgtgcgcgcagaaaatcattgagtgtgcgctgcagctcctgcaccatggcggcctcctccgggccgtcctttgccagcggcaggcaggcctccagctcctcataggcctccgtcagtgcggtctcgcgcttctgcgagtgatgataggcatagcggtcgagcgccaggttgcgcgtgatgcgcacaagataggcctcgagcgagcgcggcttttccggcgggatggcgttccatgcgcgcatacaggtgtcgtttacgcactcctccacgtcgcgctcatccttcaggatgccgcgcgcaacggagcggcagagcctgccgtatttttcctccaccgcgctgatggcgtattctacccggtggtagaacagctgcaaaatctcgtcgtcgcccataggtctcgtgcctcctgccgcgcctctgcggctgcagaagcgttctgtttatgcagacggaaaatctgcgggatggtttcgttgggaatagggagttaacccaatttttttcacacattgtatcgaaatccgacagctgcgtccatgctgttttctgcagaaaaagaaaaaggaaccgtctgccgctgacagacggttcaggctgtaacgcgtatcatgcaggaaaaacgccacaatccccgttcatacctgcagcttgccgcagcagaaaggcccttgaaaaggattcctgcaacaggctgcaagaatcctttgcagtccggcagccatctgttttacgttctttttatgctaccctgccgcggccagcatattttcgatcaggatgccgtagcccgccgccggttcgttgaccagaacatgcgtgaccgcgccgacgagccgcccgtcctgcaggatggggctgccgctcatgccctgcacgatgccgccggtctgcgccagcagggcgtcgtccgtgacggccagccggaggttgcgcccctgcggctcgtccggctcgacggagacgatctgcacggcatattcgcgcgtctccgtgccggaaacgttggagaggatcgtcgcgctgccggtgtggacctgcgcggcggcggccgtgggcagcggggaagcgtcctgcggcggcgccatggtgccgaaaatgccgcgctccgtgttgctgcggatcgtcccgcgcgggctgcgccccgtcacagccccgtgcagcgcgccgggcgttccgacctcgccgcgcgtgaccgatgtgacggcggcgggcagggcaaggccgctgcgcagcgggagcagggcgctgctgtcgcagacaccgtggccgagcgcgccgaacgtgccgttctccgggtcataataggtgacggtgccgatgccggtgatgctgtcacggacaaacacgccgagccgccagccgtccgcggtccgctggggctgcacggccgtttcggctgccttgccgccgcgctcatagcggatggtcagcgcctgcccgtccgaggcggagacggctgccgtgacctgccggaccgtgctgacccgctcgccgtcaatggcgcggatgacgtcgccgcgccgcagcccggcttcccgcgcgcagggattgtcctgcgccagctccacgatggaaacgccgtccgtctgcagctgcaggccgatggcctgcccgccggggatgagcttctcaggcagcgcagccagcgctgtgcccgccagaagcgcgagcagcagaaaaaggactgcgcatcgtttgaaaatttgattcatttgtcgtcctcccgcgtttttctcgctgttaatatggcgcggaaatcgaagaaacggcttagaaaatcccggcggaattcccttgttaaaaaatgcgaccggccgcgctgcaggactctgcagacacggccggaccgtttttatcctgtgcggatagaaatttcaaaatgttaaagccgccggatatcctgcccgacgaactggatcagacggtaggtgccgagcaggcgcgaggcgatctgcggagaatagcgcacggacagctgctccggcgtcagattcgtggagatgatcgtcgggcgcgattccatcaggcgggtgtttaccacatggtacagggcggagcagacgaactgcgtcgtcatttccgtgccgaggtcgtcgatgatgagcaggtcgcactgcaggtagcgctgggaaagcccgcggttttcctcctgcgacatgccaaatttttccgcttcaaaatcggaaaacaggtgaatggccgtatcgtatacaacgctgtagccgcggtcggccaccgtgcgcgcgatgcaggcggacaggaacgtcttgccgaggcccgttgcgccggagaacagcatgttcccggactgcatcgtgaaattctgcgcatacttccggcagtggttgaaattccgctgcatgagggcgcgggggctggtgcgcacgctctcggaatactcggcgggatagaggtcgagacggaaattttcaaatgtctcccggccgctgccgagcaggctcgtcagctcctttttctgctcctgccggcacagctcgcgcaggcacgagcacatctgcgcgccgacatagccgcgcccgccgcacttggcgcacacgggcgtgtcgtccagatagccgtcgtcaaaatccccggcctcgaggatccagctccgctcccgctggagcgcgagattcttttcccggacggcggcgacggcctgcgacgggtcctcgccgcgctgcagggccgcggccatcagctcggccatggtgcggcgcagctcgttgtcgatctcggccagacggggatagcgggcataggcgtccgcccggtgggcggcgttctcctgctcacgctccgccttggcctgctccagccgtgcgcgggcgcgatggagcacctgttcgctgtatgccatctcaatcgtcctcctctgccagcatgcgggccacggcctcctgcgccagcgggctcagcgcggcgtcatgctgctgataggcgctggcgcggcgctgctccggcttgcgcggagcgtccccggcgagaatttcctccgccgtgtgcaggttctgctcgtgccagcttgtcagaatggaattcatgtacgcccatttaagtgccccggtgttcagacaggtgcgctcataggccatgcggatcgtgtcgtcgcggaagcccatccggatccacgagaccagatatttctcctccgcgggagtcaggcggcgctggtcgatctgcagcagctggcgcagctgctgcacacgggtgtggagctgcagctgctgctgcacatagaacgaggcggtctccagcgtgtcgatgccctcgtccgcccaacggtaggcctctttttcaatggcgcgcatggacggcgcgcgcgaatcgcggcggcggctgcgctccagacagtaatagagcagcacgcccacgacctccgtcggcaggcggagataatcaatgagcgagagcaggatcttcagctcctccgtggagagcgtgcggccgagacggcgctgcgcctcgccgacgagattgcggaagcggccgtcgcccgcctgctgctcgcgcttcaggtcctcttcagtgtactgcgggcgctccggcgtgggatgcaccgggcgttcctcctgccacaggccaagctggcgcagcgtgtccgtcgcgccgaccatgcgcgggacggtgaagtgcagggcggccagcgccgtttcgcgcggcagttccgccttgcggtataaaaataaaactgcggcatccggattgccgcaggaggtgagcttgcggacctcttcttcggttagggtgattcccggcatggtgcttcatactccgtacaacaaaaatttcgagataattataccacagttccgggaaagcggcaagcgccgcgcgcggaaatcggcggatccgcgcagcgaaaaattttggaacgggcggaacatttccccggcaggtgcgtctaataaaagaaacagtccgggaagacagatcgggagggacatcgtatgaaacgagggatcgccattcttcttgccgccctgctgctgggcctgtgcgcctgcagcccgacgggggcggatgcatcggagccgggcgggacgcagcctggcacccagcccgcgacccgcggaacggaaacgacagcgggcacgcagcagacgcagccttccgcgcaggagaccgatccgacggcagaaacgccggaggagccggagatcaacgaggcattcaccgcagccgtccctgatgcgccggagggcgcactcggcgtgatgttcaacgagccgctggatgggctggagctgacggtgacgcagaacggccccgcgggcgaatatgaccgtgcctatatcgtggcaaaatatgttggctcgtgggtcaatgtgttcggcgtgacgtgggagagcgggcggctgaatgtcggcgacaaggccctctattcgttccgcaccgggcagggcgatgtcatcggcggctcgttcgaccgcccggacggcggcgcgatgtattatctgaccgtgacggcgccggacggcagcgattttggagaatacttgacctacaacggccgctggggctcgccgcagaaggaatatctcatggacacctgctggaatgcggaggcggtcctgcgcgaggctgccggtgcggacgaggactgggagctctatgacagccgcctcattcaggacgacggcatcccctatgtctgcttccggctggagggcgagacggagcggtatgcgctggtcccgccggacggctcgtgcgtctatgccgccgagctcgaccccgatacggatcgctactgtattaccggcgtattttaagagcaaatgaaaagcgctgcggatcagaagaggcttcataaggaagaatgggctatctcaaaatagaattttctgaaaattagcccaacaataaatgccgtggaaatccaattaaaactggatttccacggcatttatctaacttttgaagggaactattctcttacaattcgcattttgagacagccacttcttttggcgcgatccgaaaacggatcgatactggattttggtgacaagatccgatgctcgctgtacctatggacgaaaatgatattccgggctttgcccggagtgatattttccttttcggaacgtgatataaaagccgctcggcttttgtgatatatattcgcctgttaaactgccgcaggcaatatcacgatgcgaagcataatatcactgtccaaaggacaatatcactcgccgtcaggcgaatataattgaggcgcacttccttacggagtgcgcctcacggccgcagcgcttttttatgagattttacgcctcgatctcgtcgaaatcgtcaaggccctcgtcgcacttgccgaagcagggaaggagcttcttcagatcgtcccagaagtggatcatggcgactgcaatgctgccgacaacgacgacaccgccgatgatgcccagaatgagcttcagattattcttcatgaaattgacctcccgtattgaaatggtagttatagtataccgcaaaataagaatttcgcaaggggataattgtgaattttcagctcagatgcggacgatgcggccctccagacgcggggcggcaggcttctccggctccgcggcatagccgaggatgcagtggccgatgccgatccactcgccttcgacgccccactgctgcagcagggcctttccctcggccgaggcgaagacctcgcgggcgcggtggatccagcagctggcgatgccgaggctgtgcgcggcgttcatcaggttgccgagcgcgagcgagccgtcctccacggccgtgaacgcggcggcatccgccagcacgacgcagacggtcggcgcgccgtagaacgggtgagcgtccgggctgccgagcacaccgccgttgagccgctccagcgcggccagcgcggcaggctcctgcacaacgagaattctgacggactggcggcccatgccgctcggcgcgtaaagcccggtacgcagaatttcctgcagcgcctcctccggcacctgctccgggcgataggcccggcagctccggcgggtctcgagacagttcagaacttcgttcataagaaaactcctttcagatcatatataccatattgtagcggcgctcagtgagcgccatggaggctggcaatgattgcggcatgaattctatggcgtgaggccctcggaatgacaaatctggtggccattgccactgaatttgtaccgcaggatttgcgggtgcgcatggcgcttactaagcgccgctacagacgcaactggattttaccattttaacggcagtctgtaccggctgccggtgcagcgccgggcggggcgtgctcttcccctgtcaattgcgcctataaaaaatcagacatatccatacatcccgcggacggagacctcgccggagctgacgacgccctccgtgccgtccgggtagcggacgatcaggccgcccgcctcgtcgatgccgatggcgtgggcaaggcgcgtctctccggcgcgcaggatctgcacgtcctgccccagcgtcacgcagactccggcatattccgccagccactgcggcagcgcctcgggcagctgcacatccagctcgtgcaaacggcggaccatggccgcggcgagggcattggggtcgacggccgtgccgacggcctcccgcagcgagacggccacatcgcgcgcaggctcgggcagggcagccgtgtccgtgttgcagttcacgccgatgccgaccacggcatattccagcatgccgctgtcggcctctgccgccagctccgtcaggatgccgcagaccttccgcttgccgatgaccagatcgttcgtccacttgatgccgaccgcggcaggacagcagtcccggatggcgcggcggatggccacggcgacggcggccgtcagccacagcagttccgcagcctcgcgctgcggccgcagcaggacggaaaggtacacaccgcccggcggcgagacgaacgtccgcccgcgcctgccgcgcccgccggtctggcggccggtgacatagacgctcccgtgcggcgcgccgatcgcggcttgcgccttggcgtaggtgttcgtcgagtccaccgtgggcaggacattgatgggccaggggcagccctccagcagcgcgtgcacggcggcatcgctcagggccgattccggccggtgcaggcagtagccccgattcggcacggagtcaatgctgcagccgtcggcccgcagcgcctgcacggccttccagacggcggcacgcgtgacgccgagcgtgcggctgatctcctctccggagacatattcgccgtcccgcagcagggacagcacctctgcctttcccatggcattccctccaaaataatggttgcaattccggaccccgtccggtataatacgtttgccggtttcagtatacccgattttttccgggctgtaaatgccttttttcgggtgggaccgcgcgatcgccgctgcgaggcggcgaactgcttgcgcctatcgtaaacctgacgcaggcaaaatgtaaaccgtctgtaccgtgcccaccggtgcagacagaaatcagaaagagaaaagagaacggagaaaacttcatgaacaacacccattcctcccgcgcacgcagcacggttctgccgctcgtgcttacggccctgtttgccgcgctcactgccatcggcgccttcctccgcattcctgccggggaaatttcctttacgctgcaggtgttcttcacctccatggccggcatcctgctcggtccgtggtggggagcggcctcgcaggtggtctatgttctgctcggcctcatcggcctgcccatcttcacggagggcggcggcctgatgtatctggcaaagccttcgtgcggcttcctgctcggcctgccgctcatggccatggtcatcggtctgctgacccgcgacctgaaggcctcgacactccgcggccacgctgttcgcggtatgctccgcatcgcgctggcctgtgtggcgggcctcgccgtgctgtacctgatcggccttccctatatgtacttcgtgctggcaggcaagtggagcattcagaagactatcgtgtccggctgcctgatcttcctgccgtttgacgcgctgaagatcgttgtgacgacgctcctgtgcgtgcggctgctgccggtcctgcgcagggattgagcgaaaaaagtccttttttgcgcgcgaatgcttgcaggaagacctgtcttgtgataaaatcagactgtcaaaagacctgcccggccgaatttttgctttgcaatttggaaagcagtctggcggaaaaatccgaaagggcctttttgacaagccgaaaatataaggcaggaaaccggcggagcgatccgcggaaaggacggccccatgaacgtaaaacttgattttgtcctgcgggagatcgcaggggagacgctgctggtcccagccgggaaaacggcgctggatctcaatggcatgctgacgcttaacgagaccggtgcggctctgtggcgcatgctgccggaggcggcggatgccgaggcgctgacacagggcctgctgcaggaattcgagggcgcgcccgcagagcaggtccgcgcggatgtcgaggaatttcttgcccggctgcgtgagctcggcattgtggagtaagttcgcaaaattgtcagggaatatcccgattctctacaattttctcaattttccctgtaaaagccgtagaaattgatgaaatttgacgattgcggttttttgcgaatttcgctataataaaaaggctgaaaaaccgcaagatcctattattatcgcaccgtcggacaaagcaccggcggaacaaacgtaaatggaggatacgcattatgtctatcaaagttggtatcaatggttttggccgtatcggccgtatggtcttccgtgcaagcctgaacttcccggaaatcgaagtcgtcggcatcaacgatctgtgcccggctgactacctcgcttacatgctgaagtacgataccatgcatggccagttcaacggcaccgtcgaggctaccgagaactccatcattgtcaacggcaaggagatccccatctctgcagagcgcaaccccgctgatctgccctggggcaagctcggcgctgagtatgttgtcgagtccaccggcctgttcctgactcaggagaaggctgccggccatctggctgccggtgccaagaaggtcgtcatgtctgctccgtccaaggacgctaccccgatgttcgtctgcggcgtcaacttcgacaagtacacgaaggacatgaacttcgtctccaacgcttcctgcaccacgaactgcctggccccgatcgccaaggtcctgaacgacaagttcggcatcaccgacggcctcatgaccaccgttcactccaccaccgctacccagaagaccgttgacggcccgtccatgaaggactggagaggcggccgcgctgcttccggcaacatcatcccgtcttccaccggcgctgccaaggctgtcggcaaggtcatccccgagctgaacggcaagctgaccggtatgtccatgcgtgttccgacgctggatgtctccgtcgttgacctgactgtcaacctcgcgaagcccgctacctacgaagagatctgcaacgccatgaaggaagcctccgagggcgagctgaagggcgttctgggttacaccgacgaggccgtcgtttcttccgacttcctcggcgacacccgcacctccatcttcgacgccaaggccggcatcgctctgaccgacaccttcgtgaaggtcgtttcctggtacgacaacgagatcggctattccaacaaggttcttgagctcatcaagcacatgtacagcgttgatcacgccgagtaattctcatccaattgcataacgggagcgcgtcctaaacttttaggacgcgttcctttttccgtccgcttgcaacttttgcgcagatgcgctataattttccatagaggaatgtccccgataaccgcctgccttacccgggggaggcgatccacgatcaggaggtatgcaacatggccgcatcgaaagtctactttaccaccttccataccacgctggaggaaaacatccagcagaagctctcccgtctgctgctgacggcggggatggatcagatcgatttcagaaaccgctacgtcgccattaaaatgcacttcggcgagccgggcaatttggcctacctgcgcccgaactatgcaaagaccgtcgcggatcttgtgcgccagctcggcggcaagccgttcctgacggactgcaacacgctctatgtcggcggccgcaagaatgccctcgaccacatcgagtccgcctatgtcaacggcttcacgccctacacaacgggctgccacgtcatcattgccgacggcctgaagggctcggacgatgtcgccgttccggtcgatggggagtatgtgaagaacgcccgcatcggccgcgcactgatggatgccgatatcgtcatctccctgacccacttcaagggccacgaggccacgggcatcggtggcacgatcaaaaatctcggcatgggcggcggctcccgcgcgggcaagaaggagatgcacgccgacggcaagcccgccgtgaacgagtccaagtgcatcggctgcggcgcgtgccataagatctgcgcccatgacgccccgacgatcgagaaccgcaagatgcacatcgacacgaacaaatgcgtcggctgcggccgctgcatcgccgtgtgcccgatggatgccattgagggcgtgtacgacccgaacggccacctgctcaactgcaagatggcggagtatgccaaggccgtcgtgcagggccgcccgagcttccacatcagcctcgccatggatatctcgccgaactgcgactgccacacagagaacgacgtgcctgtcatcccgaatgtcggcatgtttgcttcgttcgaccccgtcgcgctggatgaggcctgcgccgaaatgtgcagccgcatgccgcgcaacccgaacgccgccttcgaggacgcctcctccgacgacctgttccacgccgtccacaccgtgacgcattggcaggaccagacggagcacggcgagaagatcggcctcggctcccgcgaatatgagctgatcgagatctgacagtatacaaaagccgcctctgccggaagaactccgacggaggcggtttttcgtaatttgattgcagcggcgctccgtgagcgctgttggcagctgcaggctgccgggcgtcctcgttgagcgttacgggctttcaagtttgtcattgcgaggagcaaagcgacgtggcaatctcgcagtacccggctcgatcacaggaaagccacggcgaaaacgtaactgccttcccgagattgccacggccccttcggggcctcgcaatgacacgtcaggggagtgcggcactgggggcggtgcgttcctccgaattggcgctgcttttgccgcttcgcggacgggagcggcatgccgctcccctacagcgcgatatgctgtctcactgaatatgaacgtggttattgatatgatcgatgcaatagcagcaatagcccttgcacttcgagcagtagcggaactcgaggtccgggtattctgtatccgttctgccgcacacaaggcacttgtggcggtaggggcgctctccggcgcggttctgataattctgcgcccagttggggttcgactgctgcttcggcgcggaggcacggcggaactcggcgcggcgcttacgctcggcgcgggaggcgtgcctgcgcagcgacagcggcaggagctgcggaagctcatgccagcagaaaagcaggcagggcagctgcgccacgatcggcaggaaggcgacaaggatgagaccgatgccgaggagggcactgccatacagcgtccagaaccggacggcttcgaggatgtcctttacaagataataaagaatgccgccgatgtccacgagggcgagccagcgcattttgaccgggatgaagaaaaacagcaggccgcgcgcttccggcatcagcgccgcgacagagaggaacatcgacaggttcagatagagcgccgagacaccgtaggaaacgtggaacaggaaatacaccagcatcgcatagacatccatggccaggatgccgatcagataatacaggttcacgcgcagtgagccccagagctgctccaaatagcgggcgggccaataggagcagtagagcgcgagagcaacgctgaaaatggagtagatgctcatatcgccgatcccggcgaacgtgaaaatatagctgaagagccgccagacctgtccgtgagcgatggcctgagggtcgaaggacagcgcgctgtacaggctcagcggtgtcccgaactgggaaagaaaatagaccagcgcgttgccgatgcagatccacagcatgagattcgggattcccttgttccggttgttgttcagaaaccggtggtaggaatagttgagtttgctcaatcggatccctcctttattaccgctattgtagcgtaaaaccatgggcttgtccagcaacaaagtgtgaattttagaagacgttgcaaaaaaaccggcgctgtggtatgataacggcagaaaaaacagaaaattcgactggccgcaggccagaaacggaggaaatcaccatgagccatgtccgcgatatgtcccttgccgagtccggccggatgaagatccgctgggtgcaggattttatgcccgcccttgtggcgatccgcgcgcgctttgagcgcgaaaagcccttcgccgggaagaagatcaccatttccatccacatggaggccaaaacggccttcctcgcgctctgccttgcggcaggcggcgcggaggtgcatgccacgggctgcaatccgctgtccacgcaggacgacgtggcggcgggtcttgcgtccatgggcgtggagacctatgccatgcacggcgtgaacgcagcggaataccgcggcctgctcgtcgaggcgctctcgtgctgcccggatctcctcatcgacgacggcggcgacctgctggacctgctgagcggggactatgcgcatctgggcaaaaacctgctcggcggcgcggaggagacgacgaccggcatccaccgcctgcacgcccgcgcccgcgccggggtgctgcccttcccgatgatgaacgtcaacgatgcgaagtgcaagcattattatgacaacaagtacggcacgggccagtccgtgtgggacgccatcatgcacacgacgaacctgctcgtcgcgggcaagaccgtcgttgtcgcgggctacggctactgcggacgcggtgtggccatgcgcgcaaagggcatgggcgcgaacgttatcgtcacggagatcgacccgatcaaggcgctcgaggcctccatggacggctgccgtgtcatgcccatggacgaggctgccccgcagggtgatctgttcgtcacgacgaccggctgccgcgacgtgctgacgcgctgtcattttgaggtcatgaagaacaacgccttcctctcgaacgcgggccatttcaacgtcgaggtcgactgtgaggcgcttgcggatatggcggtgcgcgtctatccgcgccggcaggatattacgggctatgagctggcggacggccgcacgctgaacctgctggccgagggccgcctggtgaatctggcctccggcaacggacacccggccgagatcatggacacgagcttctccgtgcaggcgctggcgctggagtatctgctgcaccacgcctccgagctgggcaggcaggtctatgacatcccggaggagatcgaccgcgaggtctcgcggctgaagctgcatggcgcgggcctgcacatcgacgcactgacgccggagcaggaggcctatctcagcggctggcaggtctgagccgatggagctgtatttcaagcagcgtctgctgtctttttttgatagcttcgatatctacgatgaggacgacaacgtcatctacaccgtcgagggtcagcccgcgtggctccacaagctgcacgttctgaacgccgcgggcgaacatattgccacggtgcggcaggagctgtcgctgctggcgagcttcgagcttctggtgggcgaggagagcatcggctgcgtggagcagaacttctctctgctgcgctcgtcgttcacgctggactgctatgactgggacatcgagggcgacgtgttcggcctggactacagcatcacggcatcggacggccggagcgtggcggcattttccaaggagctgttccactggacggatacctaccatctctcggtcccgcgtgaggaggatgttctcccggccctgctgatcgtgctggccattgatgcggcgcactgctcgcgcggcgggtgacgcgaatccgtataatacgatataatacgatccccctgaagcctgcgctgctttcagcacggcttcgggggaatcgtgattttttgggctgtgcggatcaccggccgtccttgatgcggaacagcagccggacaacgcggtagcggcgcttcagcagcagacggtagacgaggcgcttgttgcggtcgagacgcggcagatagcgattttcgcggaagtcggggaagtttttctccatgtaatcgcggaactgcccgagcagctcgctcttgcagtcgatgcgcgccacgcgcaccgaggcggcgatgagaagatggctgatggcaaggaacgtcagctcgtcgcggtaggcctcgcgcaggccgtgctccccgaaccagccgagaatgtcgtcaaaggcatagaggatctccacattgcgggcgcagtttttgttgttcatcgcgctgccctcgcgctggagatagtgatagtaggcccccggcaggcggacgacctgctccgccagtgccagcaccttcgtcacgatgcggatatcctcataccagaccttcgtggcaaagcggatgccgccctcggtaaacagcgtccggcgataggcgcggttccacggggccatgacgccgaagaacagctggggtgcgtccttcgtatgcgtgggaagatcggccggaagctcctcatgcagctcgcccgtgaccttgccgtcccgctcgacgagcgcgccgaacagatagaggtctgccggtgtggccgcgatggaggcggaaaggtcctccagcaggttcggtgcgagccagtcgtcgccgtcgacgaacagcagatagtcgccctgcgccagctcgataccgcggttgcgcgccgcgcctgcgccgccgtttggctgatgcagggcgcgcacctgattcgggtgcgaggccgcatagcggtcgcagatcgcaccgctgccgtcgggcgagccgtcgtcgatcaaaagaagctcaaaatcctgacacgtctgggccagaatggagtccacgcatttttccagatattcctcgacccggtagaccgggatgatgatgctgaactgcggcatagtgcttcctccgtttcatttggatcgtgtccctattatatccgctgccgcctgtttttgcaagccctcagacgagcagcggctggagctgctcaccccgcagcgctgcctcggccgcctccggcagcagggaaaaatgtgccacaaggctggcgggctttccggtcgggctgtcctgcccgaaggggacgaagtaaaaatgacggcgggccagcagcgcacccagattcgcggcgctgccggacaggccgtcgttcgtggaaacggccagcagcacggggcggccgttgcgcagatgcgccttgcaggcaaagctgacgggcgagtcggcgatgccgtttgcaagcttgccgagcgtattgcccgtacagggtgcgacgatcagcagatcaagcaggtgcttcgggccgagcggctcgacctgcgccagcgtgtgcagcggctccgtgccgcacagcgccgtgacctccgcccggaaatccgccgatgcgccgaagcgggtgtccgtctcccacgcggcgtccgaaaaaatggggacgaccgtatattgcgctgtcagggcgcgcagggcgtcaatggcctttcggaatgtgcagaacgagccgcacagggcaaagccgacagtcggtctcatgctgggaacgctccttcctgttcgagaattgcggcggcataggccgcgcccgcacttgcgggacagaatcttccgggcaggcccggcgcgtcgatgcgggtgacatccgtccgcgtgcaggctgggataccgcctggcgcggaggccagctccagcagcaggcagccgggcagaagcgcagcgagctggtcctgcgtcagcacgggtgcaggcacggtgttgaacacaaagtgataggcaagaccgcgggcatagcggccagtttcgtcggcttccagcccgagcgcctcagccgcggcgcggtcggacggcctgcgcgctgcgacggtcacgcgggcggaaagaccgtgcagcttgtttgccagcacgcggccaatgtgcccgtagccgatgacaaggcagggcgcgccgtgcagccggtacgggctgtgcagcacggcaagggcgatggcgccctcggctgtcagcacggcgttgtgcgttgtcagcggctccgtgccgaaaagctcgacaggctccgcgccgcagtcgagcagggcctgccgcagcgggctgagcccgccgccatagacccgcgtaccgcggcggcagcaggcgaatacggcggtacgctccggtgcggcggtcccgcgcaggcgctcgccctgcagggcgggaaacggaagaatgacaaagtcggcgggagccgggagcgcctcaggcatgccgggcacgccgcagcagcggacctcgagcccggcgtccagcagggcctgtgcggcccagcgctggcgctcgtctccgccgagcagaaagcaggttttggacatggcagcacctcctaccctcatcctatgcaatttttgcggtttcggtgaaaaaaagttgtcaattgcggtcggacttgctataataatacagtatgtcgaaaaagtcccttcgggatttttccgccggactgcattcaaaattgtaaaatagaactttgtaagattattttgcagtttttccgctgcggcgggtgatcaaacgcgaaaggataccctgacggtttcctttcacacgtttcctccctccgtaacttttggctggacagggtttccgaaagcctgtataataatattttgctttcaagagatgagagagaaaggagcgggcgagcatggagcggcatggctttgttcatgatatgctggacgttaaggtcctgatcttatatattatggcgcgggtcgcctatcccgtcgatctgcagaagatctatgagctgtcctatcaggatgacggcctgagctatttcgacgtggcggaggccgtgccgcagatgatcgagtccggccatctggagcgggtcgacggcgagcgttatgtcattacggaaaaggggcgcgaggccggctccgtgacggaggattctgtggcctatcccgtcatgcagcgggcacgcgcggccgtggagcgctataatcgcgacgtgcggcgcagcagctttgtcaaaacggagatcaggcagcgcgagtgcggcgattttaccgtgcagatgagcctgaacgacgaggtcagcgaccttttgcggctggagctgatggccccgacgcagaagcaggcgcaccgtctggcgggggcgttttcccgcaatgccgagacgatctaccgccttgtgatggatcagcttctctcggaggaaaaggaaaactcctgaaaaaatacagcttgctgcagggcccggacggggcttagcagcaagcttattttcgctacttgcatgtttcggcaaaaggtggtataatcataccagcagatccccaatcggcccaatcaagaaaggagcgacttcgaatgaaattccagttcacagagaaaaaagtcagcttgcccgagagcgttcatgcctacgctgagaagaaggtcatgaagctcgagcgcttcttccgggatgatgcggaggcacttgttaccttctcggtcgagaaggatcgcaataaggccgagatcacggttcatgccgccggtacctatttccgcgccagcgaggcgacttccgatatgtatgcatccatcgatgctgcggtcgccacgatcgagcgccagatccgcaagaacaagacccgcctggcccgccgcctgcggcaggatgccttcgtccgtcagccggatgtcacgtccttcgcgccggagcccgaagaaaatacctttgagatcgtccgcacaaagcggttccccatgaagcccatgacgcacgaggaggccatcttgcagatggagctcctggagcacagcttctttgccttcaaggatgaggagaacgacggcgcgttcgccgtggtctataagagaaacgacggcggctacggcctgatcgaggacgtccagtaagtctgccgcatattccgcagaaataacacgatgccgggagcgaaagctcccggcatctctgactgtcgaaaaaatgcccagccgaaagtttcggagggaaggaatgtgtgaaagggaaccgtcagggttccctttcgcgttcaataacccgccgcagcggcaaaattgcaaaataattctacaaaaatttcatttgcaattttgaaggcaggtaaatcccggagggattctttcgacaagctgaccgggagctttcgctcccggcatttttgtcatttcagcgcattggcacgggcaaatttgctcagcggctcccagcgcagattatactgcttcgccagccggccggcaagggcctttgcggcgtccggcgcgccctccttgctctccagctcgacctcggcaaatggaagctcctcggttttgccgtgcagcacgccgcagtcgcacgccagctcggcgcggctgccgtctgccagacggagcatgacgctgcggcgcaggaaccgcgcgccgcacacggggcgcagcggcgcttcgccgtagagctgcagcagctgccgcggcgcgccgaagtccagcagccattcgatggcggcgtcgtccaccgcccgggcctcgacctcccattcaccgcgggcgaacggctccggctggggcgtcttgacgcagacgacgctgcggctgccctcctgacggcggcggagcgtccagtgatttgtgcggaacgcattcgtctccgtgtcaaaataggtcgtttccatcggcgtgcacacgatggggccctccatccgcgcggccatttcggggtcgcccagcagacagtccagaacggcatcgtttgcggcggccagcttgaattccagttccttacccatatttatcacctcaatggcaatattatacacggtttccggaagctgcacaagtttttcccggaaaaatttccgctccgatttcccgacaaaactcttgcgccctgcgtgctaaaatcgggacaaatcgttcggcagcgcggcggctcggccttctccgcgcaccggagaggggaggagctcatgaaaaagtccggttctcagcagcttctggcgaaacagcggctgccgcgtgcgtccgtccggctgcacgggctcggggagtgcctgctgctgctcgggagcggcttcctgacggccggggcgcagatcggcgggctggccctgccgctcggggcctgcctgacggcctcgctgccgttcgggcggcgatctctgtcggcggcgctcggcgcggcggcgggctatgccctgctgtgcgagcctgctatggcggccgagcgcatcgcgctgacggccctgctgctggcggcgatcgtggtgtttcagggcacggcgctcccggcgacgcggtggttcctgcctgccatggcggccggaacggctcttgtgctcggcagcctgcaggtcttcggcgggaacggcgggtggcggcccgccctgcagtggctcacggtcagcgcggcggccggtgtgggaacggccgtcctgcgctgcgggaccggagcgggagagcgggggcggccgctgtattttgcggcgctgctgagcgggctgagcggcctgacggcgctcggtctgcccgtcgatccggggctcatcgggggttgcgccatggtctacggcgcgccggagctgtcggccgtgtgcgctgccgctgcggcgctcggcctgacggggaatctcggctggagcgtgacggcggctctgctgctgcctgccgtgacggcgcgggtcgtgcgcagtgatctcgcccgcgtgctcctcggcggcgcgctgtgctgcggcgttttgtggctgggcggtgtggggacgcccgccgcatttgccgccgtcggcatcggcataccgcttgggctgtggctgcggcggaccggtgcgctccgggcctctggccccgccgcggcggaggagctggctgcgcgccgcatgggggatgcggcgcaggtgctcgagctgctgcaggctcagctcccggtgcaggagcgaggccagagcgaggcggacagcgtctatgacggggcggcggagcgcatctgccgctgctgtgcgcgcttccaccgctgctggcagcacaatgcccgccagacctatgatgcgctcgagcaggcagccgggcggctgttgcagcgcggcaaggcggaggctgcggacttcccggcggagttccgcgagggctgctgccattttgacggcttccttgcggcgctcgatcaggagctggagagcatgctctaccgccgccgctaccgcgtgcagctgcaggagagccgggcgctgctgtctgaggaattcggctgcgtggcggaatatctgcgccggatgcaggccgagcttggcgcgccgcagcccgatgcgccgcgctaccgcgccgtgacgggcatctgcacggccgggcggcacggggccgccgcgaacggcgaccggggtgcctgtttccccggcccgcggaacgattactatgtgctgctgtgcgacggcatgggcacgggggagcctgccgccggactgagcgcggactgcgtgcatctgctcggcgacctgctgcgcgcaggcgtcgcgccgctcgatgcgctgcgcatcctgaacgggacctacctgctgcgcggggacggctgcttttccaccgtggacctgctgcacatcgatctgaccagcggggaggcggagctgctgaagtggggcgcagcgccgtcgtacctgcgctgcggggatacggtcaaaaaactggggacagcctcgcttccgccgggcgtgggggtgggaggagaccacacgccagagaggtaccggctgtcccttcggggaggagagatgctcgttctggtcagcgatggcgcgggagatgcagagagcgccgtggcgggctttgcgggagattcgccgcgggagcttgctgcgctgctcatcgcaggccttccggcagaggatgacatgacggccgtggcggtcgcgctcgcgccgcgtgcatcccgcgattaaaggtatcatattccggcaggataatctgtcgaaacagacgggcggggaaataatatttcccaagttcggtgcggacgatcccaaaaatcgatctttttcgcgcagaaacgatcaaatcacacatttcagacgaacccggcgggatttctgccgggttcgcttgctttttgtgcggcctgtggtcctgccggttgacttccacccgcacatgcattacaatagagactcccggcgggcaacgcctgccaatccggaatacagcgagcagggaaatgaagagagagaaatacgccgttttcacgatcgatgtcgaggattttgccgacacggagtgcgtggcaaagtccgggcagcgggtgaggcggcacatgctggacgggctggatatctatatccgcctgctggaacaatatcagatccgcgcgacgatgtttgccgtctgccggacggctctgcgagagcaggagcgggtgcagcgctatgttgaccggggccaccgcctcgcgctgcacgggctggagcatgtgccgccgtgcggcatggacgacgagcacttccgccgcgcaacgctcgcgggcaagcagcagcttgaagcggcctttcacacgcaggtcagcggctatcgcgcgccgtgcttcggactggacgaggaaaagctcgatattgtgcggcagcttggcttccgctacgattcgagccggatggacttcccggccgcgcgccatgtgaagcatctggacatgacgagctaccgcgagctgcgccccggcatcttccgcaagggcgatttttacgagttcagcctgtcgtgccagcgcctgttcgggcagaattacccgatctccggcggcggttatgtgcgcctgagcaactggagctttgtcctgccgctcctgcgcagctatctgcgcgaacaggattactatgtgttctacctgcatccgtttgagctttcgcggcagcaacagccgcagctggaggatctgaagctctatgaccagtattatctccaccgcggactgctgacctaccgccggaaggtcgaggctatcatcagtctgctccgtacactcggctatcgatttgtcacgttcgacgagcttgctgagcgaatggagaacaagtctgagcgaaaatgaacttgaacggaggagccaccatgatacgcgagacggaaaagcgccttctgcctggcgcagcctgcggggtgctgttcgtgcacggcatcctcgggtcgcccgcgcagtttgcccccttcctgccgctcgtgccgcaggattggtccttctgcaatctgcttctgcaggggcatggcggcggtgcgcgggatttctctgcggcctccatggcggtctggcgggagcagacccggcaggcatttgccgagctgcgcgcgcagcatgagacggtcgtgatcgcggcgcattccatggggacgctgtttgccgtgcaggaggccgtgcgttcgccggtcgagggcctgttcctgctgaatgtgccgctccacgtgcacgtccgtccccgcgcgctgcgcaatgcgtggctgaactacggcggcacgccgagggacccgtgggggcaggcggcggttgcggcctatggcgtggagcgggaccgcaatgtgctgcactatgccggctggccgccgcgctttttcgagctgttcggtgagatccgccggacgcggccgctcgtgcggcagctcgccgtgccctgccgggcgtatttttcggaacgggacgagcttgtctccgtgcgaagcgcgcgggagtttgcggatgttccgcaggccgtcgtcacgatgctcccgcattccgggcacgcctattacgaagcgcaggaggacctgccgctgctgcagtgcggcttccgtgccatgctgcaggaatgtgaaaagaaacgataataaatggccggtgcgaattctcgcaccggccattgtgatttttgggttattcctcgtctgccttcttggcgtcctcgatgatcttcgcctgattgatctgcgggacctcctcgtagcggacgaacttgaggctgtaggagccgcggccctgcgacatggagcgcaggtcgatggcgtagctgctcatttcgcccatgggtacctcagcctcgacgatctgccaaccgcggttgtcgggatcggggttcatgcccatcacgcggccgcggcgcttgttgaggtcgccgatgatatcgcccatgttggcgtccgggatgaagaccttcagctcgccgatcggctcgagcagggtcggaccggcggtgggcaggccttccttgtaggcgatgccggcagcggtctggaacgccatatcggaggagtcaacggggtggtaggagccgaagtacagtgtggacttcaggaacacgaccggataaccggccagaacgcccttgccgatgcagttgcgcaggcccttttcgacggacgggatgaagttcttcggcacgcagccgccgacggtctcatcggcgaagatcatgtcctcggactcgctctgcggctcgaagcggatgtaaacgtcgccgaactggccgtggccgccggactgcttcttgtggcggccgtggatctcgaccttcttcttgatggtctcacggtaggcgatctttgcagggcggagctcggcctcgaccttatacttgctcaggagcttggcaatgatgacgctcaggtggatgtcgcagacaccggcgatgatcatttccttcgtctccggatcgttgccgtaggtgaaggaggcgtcttcctcgttcagcttgacgagaccggcggcgaccttgtcttcctgacccttcgtcttggcgtagatggccatgcggtagcagggctctgcgtaggtcatgggcttgatggtgacgagcttgccgggctggcagagcgtgtcgccggtgcggacggaggcgagcttcgtgaacacgccgatgtcgccgcagcagaccttcgcggtcttggcgttgtccttgcccttcgggaagaacgtgttgccgagcttttcattgtcgccggtgcgggcgttaacaacggtcatggtgtcttcgatgttgccagagaggaccttgaagtaggagttcttgccgtactggtcggcgacggtgttgaacacgaacgcggttgcggggccgtcgggattcagcgggaactcggactccttgccttcctcgtcgacgcggacggcgggcttgccctccagcggggacggagcaaagcggacgaggttgtccagcagggcggcggtgccgaggccgttcatcgcgcagccgcagaagaccggcgtgacggagcgctgacggatgccttccttgatgcccttgagcagctcttcttcggtgaacggctcctccatgaagaacttctccatgagggcttcgtcggtctcggcgacctgctcattcagctcggccatgtactcttcaatcttctcttccgcctcggcgggcagggcgatctccttgccggagacgtcgtaggccttcttggagacgagatcgacaacgccgacggcctcttcgccgtgcaggatcgggaacgtgaaggggatgacggaggcgccgaagatatcgcgcagggagtcgaacgtattgaagaagttcgcatgctcctcgtcgagcttcgaaacatagaacattgcgggcagaccggcgtcggccagggatttccagcccttctcggtgccgacggcgatgccggacttcgcggtcaggcagatcaggccggcatccgcaacgcgcagggactgtacgatctccgcagcaaagtcaaagtagccggggttgtccagcacgttgagcttgcagccgccgaattcgacggggatgacagatgtcttgatggagtactgtctcttcttctcttcgtcatcaaagtcagaaacggtcgtgccgtcggcgcgcttgccgagacgggtgatcgctttggtcacataaagcatgctctcgcacagggcggacttgccgtcgccgccgtggcccagcagagcaaggttgcggatatccttcgcagtgtacatagttgaaaactcctttctaaacagcgcagaggccaagatgccctcccgctgcgggcggcatatcgattccgtgccacaattgaatttattatacacgatttcccagcgtttttcaattataattacagaattgtgaaaagtgcacgaataatattacttgcttttgtgcaaacgagccaaaaattcagagtctttgcagaataccggacagaaaaccggccacaagtgcccagatgagctggaacgcggcaatgtggaacggcgaaacggcggccgccgagccccagtagagcagcagcgcgcacaagcagagccccagaatgccggacagcaggctcagaaccgtggagaagcgcgttgtgctgcgcagcgtctgcgcggcggccacggccgaggcgaaggccccgaacgtctccttggcgatgagcgcgccctgcgtgtccgccttgccgccgacggcctcagacaggcgcagccgctcggagtagacggggaaggcgatgccgccgacggccagctcatagcgtgccgcgagcagctccggcgtgatgaggaagtcccgcgtggcgaggatgacggagttgccgggattggccagcagggcgcgcagcccggcgcgggtcgaagcgctcggcttgtatttcacggcaaaaattccggccagctcaccgttgacggacacatagacggcctgccgcacacgcgcgccgtcggacatgtgcacgcccatgctgcgcatgaacggcagcgagccgacaaggacgacgtcctgcccgatctgcgcgccgatgccgccgccgtcatagcagcgataggcgtccgcgcggcagcggcggccgaactgagcctgcagcagccggtcgaacagggcggcgaggggatcctgcgccgcttcgagcgcggcaagcgcgtaggacagcacctgcccggcgggcagcgtgccgtagagcttcataccgctggaggtgatgttgttcgcggggaacacatcctcgtcgcggaggatgacggtgtgctttccgccgaggacgcgggccccatgccagccgcacagggccgcgccgaacgaggccagccgccgcgccagcgcggaaaacggccgcgcgaacgacagcatggcggcgcagggcgtcgcgccgagcagcaggatgagccagcagcgcacaaagcccatcgggccaaggcgcgacagggccagcgcggcgagcagtgtgccgggcagggcgaggagggtatagacccggaaggcgcgcgcggcggggtccgggtcggagagatgacgcataaagtcgcgggtatcaccgggcgcgcagcgcaggccgtcctcgtccggcaggagctgcggcacatggcgcacgccgagcggccggtcaaagccgcagacggcccgcagcgtgcgggtcaggccctcgcgctcgcgcgtcagggcgtggagcaggccgaacagcacaagggctgccggggcggcgtagcccggcgttccggcggagagctgctgcacgctgtccaaaagcgccagcacacacagcacggcccccggcgtatagaggctcgggtgcacgagatcgcgcacgccctgccacagggcgtcggccgacagcagcatctgcaggcccagcagcgccgccgggagcagcagctgcagctttccgctcagaaacggcaaaaactgcagcgagaactgcccgtagcacacgagcagaagctgcatcagcatcagaagtccgctgaccgtcaggcgggcgcgccgcccgccgagcccggtgccgcacagctgcagggcctgctgcggcgtgggcggctccggctccggcttcggccgctcgacgatctgcacgggccgcttttttgccttcggcttcggcgcgggagcgctgcgctccggccgcggcggacgccggtccggtacggggcggaacacgtgcacgcgctccggctgcggttccggcggagaagcctgctgcggctccggctgcaccggttccggttccgggatcggctccggctcgggcaccggttcggacgccggttcggggacggactccgggatcggctccggctcctgcggcgcgccgaattcggccatgatctcctcgagcgtatattccggctctgactcagccgggaactgcgcgttattcagttgttccggctgacggtggttcatggattatcctctctggcgaacggcctcatacagcagcacggcggcggccgtcgaggcattcagggatgaaatgtggcccttcaggggaatactgaccttaagatcgcagctctctgcgacaaggcggctcatgccgctgccctcgttgccgatgacgatggcggccgggccgcgcaggtccgcgccggtgagggtcgtgtcgccgtcggctgccgtgccgaacacccagatgccgcgggccttcagatcgcggatcgtggcgacgaggttcgcaacgcgggccacgggcatatattcgagcgcaccggccgaggccttgccgacgacggccgtcaggccgacgctgcggcggcgggggatgatgacgccgtgcgcgcccgcgcattctgccgtgcggatgatcgcgccgaggttgtgcgggtcggacagctcgtcgcagatgacgagcaggggcacctcgcccttttcctgcgcggcgttcagcatatcgtcgaccgttgcatagtcatgggcggcgacggcagccataatgccctgatgcgcgcccgtggggctcatgtcgttgagcttgcggcggtcaacgcgcacgacgacggcgccgctctcctttgccatggcggcaaggcggccaagcgcacggtccgtgtcgccgtcggccagaaataccttgttgatggtgcggccgctgcgcagcgcctctgtgacggcgttgcggccctcaatcatatcctcaggcagcgattcctgcgcggcctcgctcggctttctcggctctttggtatattctttcatggatgcctctgctttccggcgcacgatacgccttttgcgatttcattaccttgggaagctctgaatcaatcatctgcggcggatgccggagctttttcgtcaatccatcggtatggaaagtttgtggtattgcgcagccgttggcggctttgccgccttacggatgcggcatgccccttgcgggtacacaaagtacaactgcacttttcatacctcgccttgccaaaaaatctctcgccatccactcttgctgattgaatcagaacttccctatattatagcaaagaatcgcgccggagacaacaccgagaatcgtcggacggatgcgaaacgggccgaaatccggacaaaaatccaaattcacagaaaatttacagcacattttgcagtgagaattgcagaaagcaccaaaatatggtatgatgcaggagaagcgaaaggaggccgattccatggcgaatcaaagcccgcaaaacagaccaaacggaaataataataatgataaccgcaacggcgaccgccgcagattttccattctgacgatcttgatcattgccgttgccgtgacactgctgttcaacagcctgctcagcaatgtgttctccgccggagagaagcaggtcacctatgatgccttcctcagcgcagtggagaccgatgccatttcgcaggtcgagatccagtccgaccgtatccagttcctgcgccgggatgagatggccctgccgaagtcacagcgcaccgtgtattacaccggcctgctgcccaatgtggatctgacgtccctcatttcgacgctggaggacaatcaggtggagttcagcggcgagatcgtcgagaacagcacgttcacgttcctgttctcgtgggtgctgttcccactgctgatgctggcgctgctcagcctgctcatgcgcttcatcatctcgcgcagcggtggcggagccggcggctttggtgccatcggcagcatcggcaagagcaaggccaaggtctatatggaaaaggagaccggcgtgacgttccgcgatgtcgccggtcaggacgaagcgaaggaatcgcttgtcgagatcatcgattttctgcataatccgcagaaatatgccgccatcggcgcgaagctgccgaagggcgcgctgctcgtcggctcccccggcaccggcaaaacgctgttggccaaggccgtggctggtgaggcccgtgtgccgttcttctccatctccggctcagacttcgtggaaatgttcgtcggcgtcggcgcgagccgtgtgcgcgatctgttccaggaggccagcaaggtcgccccggctatcatctttatcgatgagatcgacgccatcggccgcagccgtgacagccgcctcggcggcaacgacgagcgcgagcagaccctgaaccagctgcttgccgagatcgacggcttcgattcctcgaagggcgtcgtgatccttgcggcgacgaaccgcccggaaattctggataaggccctgctgcgcgcgggccgctttgaccgccgtatcatcgttgaccgcccgaatctggaggggcgctaccagaccctgctcgtccacacgcgcaacattcgccttgccgaggacgtcgacctcaagaagatcgcgcaggccacggccggcgcggtcggcgcggaccttgcgaacctcgtcaacgaggcggcgctgcgcgccgtgcgcatgggccgccagaccgtgaaccaggaggacctgctgacgtcgttcgaggtcgtcatcgcgggtaccgagaagaagggcaccgtcctgacggacatcgaaaagcgcatcgtggcctatcacgaggtcggccatgcgctcgtggccgcgctgcagaagcacacgcagcccgtttccaagatcaccatcgtcccgcatacgtccggcgcgctgggctacaccatgcagatgccggaggaggagaagtacctcaactcccgcgacgagctgctcgtggagctgcgcaccatgctcggcggccgcgctgcggagcagactgtgttcggcattgagacgaccggcgcatcgaacgatatcgagcgcgcgacggatctggcccgcaagatggtcatgcagtacggcatgagcgaccgcatcggcctcatggcgctgacgacgaagggcaacgagtacctcgacggccagtcctacaccgactgcgcccagacgacggccgccgccgcggacgaagaggtccgcaagctcctgaacgacagctacgatcaggccaagaaaattctggccgaaaaccgcggcctgctcgacgaagtcgccctgtatctgctccagaaggagaccatcacgggcgacgagctcatgcagtatgttgatgccgacaagcgcctgcggggctccaagcaggagaccctgccggaagcgggggcgtaagccatggatctggcttccatcaagaaattttttgcatctctgacgctgcagaagctcgtcccggtcatcctcatcgtcgtgatcgggcttctgctcgtcaagctgctgctgaagctgtttgaccgcgtgctcgaacgttcccggctggagcggacgatgttctcgttcctgcgggcggtcatgcgcgccctgctctataccatcctcgtgctcgtggcggcaagctccctcggcgtggacgtcacgtcgctcgtcgccatcctgagtgtcgtctcccttgccatttcgcttgccgtgcagaacgcgctttccaacgtggtcggcagcgtgacgctcctgacgacgcacccgttccacgtcggcgactttgtggagatcggcagcgacagcggcaccgtggaagagatcagcgtttcgtatacgaagcttgctacggtcgacggcaagcgcatctacatcccgaacagcgatgccgcctcggcgcgcatctgcaactattccgtcgagggccgccgccgcgtggacctctatatcggcgtgtcgtacgacgccccggcggagaaggtccgcgaggccctgctcgccgcggcgcagcatccgaaggcactgcaggaccctgccccgctggtcgtgctgaacaactatcaggacagcagcatccagtacctgctgatgctgtggaccgcaagcggcgactacctcgacgtgcgcttcgctgtgaacgaggccgtcaagcgcgagctggacgcccgcggcatcgccatcccctacccgcagctcgatgtgcactttgagccgcagaagcggaacacctgatatcctgatatatagtcagagcagcggcgcgtttgcaccgctgctctgactgtcaaaaaaatctgtctagccgaaagtctcggagggaaggatagtgtgaaaggaaaccgtcagggtgtcctttcgcgtcaaataacccgccgcagcggcagaattgcaaaataatgctacaaaaattcattttgcaattctgaaagcagcttatcaaaaaagcccaagggacttttttgacaagctgagcagcggcgcgccggcaggcttccgattttgtcattccgaggagcgaagcgacgtgggaatctcctgtaaccggttacgttttcgccgaggcctgcttgttatccaatatggtactgcgagattaccacggccccttcggggcctcgcaatgacaattccggaaccctgttccgttctgacggccagagcagcggcgcaaacgcgccgctgctcgtttctccccgcttactttccgcagctgccgcagcaggctgttccgccgcagtcgctcccctcaggatagaaggcgcggacggggaagtccacccggctgaacagctcgcaggggtcctcctcgcagccctcgtcgtcgcagcactcgcgcgtgggcatgcagtagccgccgctctggacggccagctgtgcgccgcgctcgagccgcacagtcgaaaactgcccgaccgtcacatacagccgccgcgtgccgcccgtgagcacgagctcctcgccgagggcttcggcaatggcgggcgggatctccgtcagctccgtctcgcagcggcagcagtcgcagacctcgcggaccttcgaggccaagatcatcgggtcgagggcctcgacgacaccgacggggaggcggtcctgcagcaggccgtccggcgtgggcagcgcgtccgtgctcgagaacgtctttgccttgccgcgcccgccgtagagcgcaacgcgctttgtgaagaccgcaaggccggtgatggtgacggggcgcgttccgccgacggtcgcatcgccgaggatgcggtagtagaacgtcaggtcgaccgcatagtgcccgcgcttataggccagcggctcgacctccacgcgcgcgaacagcagctcggcgcagcgggtcttggcgccggtggagcggtcgagcgccgcctgcgactcgcgggtgagatagacgcgcagatcctccacgcagtccttatccatgcagctgtccagaatctgatcggtatgaatgcagacacgcgcatcgcaggcctgctcaaggggtttgtctggcatacgataacctcccggaagaatcagtcaaaagcggaatactgccgtgccggcccgcttttaccccatagtatgcgcggcggaaagaaatgtgcgcgccgcacggcccgccgggagtagacaagggcgggcaagtatggtaaaataaaagatacgaaaacgataatggaagaggtgtgcgcatgaagacgaatgttctgggcgtacaatatgataatgtgaccatggcggaggcgctcgacacggcgcgggcgctgctgcagcggcccgaggcctcgtactgtgtgacgccgaatgccgaaatggcctatgaggccctgcatgacgagtcgttccgcgcgatcctgaacgaggcctcgctcgtcctgccggacggcgcgggcgtcgtgctgggggcgaagatcctcaaaacgccgctgaaggaaaaggtcgcgggcatcgattttgccgcgaacctgctcggcgtgctcgaggagacgggcggcagactgtatcttctgggcggaaagcccggcatcgcggagctggcggccgagaatatgaagaagacccacccgaagctgtgtatctgcggcacggcggacggctatttcagggacgaagctcccgtcatcgcgcgcatcaacgaggcaagagccgacgtcgtgttcgtctgcctcggcgcgccgaagcaggagcgcttcatgcacgaccaccgcgcggagctgaacgtccgcctgatgatcggcctcggcggcagtttggacggctttgccgggacggtgcgccgtgcgccgaagtggatgatccgcctgcagctggagtggctctatcgcctgctgcgcgagccgagccgcatcgggcgcatgatgcgcctgccgaaattcgtgttcgccgcatggcgggcgcgcggaaagaaggagtgacccatgggcaaactgatcgtttttgaaggaacggacggttcgggcaaatccacgcagttttcgctcctgacccgccggctggaggcacggggcgtggacttccgcacgatggtcttcccgcagtatacggagccgtcgtccgccctcatccggatgtatctcggcggcgagttcggcgcgcgtccctcggacgtcaacgcctacacggcctcgaccttctatgccgtcgaccgctttgcagctttccgcaaggtctggggcgagtattaccggaacggcggcctgatgctctccgaccgctatacgacctcaaacgccgtccatcaggcctcgaaggagccggagcaggaccgcgagaagttttttgcgtggctctatgatctcgagtaccgccatatgggcctgcccgtgccggacctcgtgctgtatctcgacgtgccgacggagctgacgggccagatgcttcgccgccgcgagcacgatacccacacgcatgcagacatccacgagcagaatatggactatctgcgccgctgccgcgccacgggtctgcaggcggcaaagtactatggctggacggtcatctcctgcgcaaaggacggcaaaatgcgttcgatcgacgacatccacaacgaaattttcctgcgcgtgcaggaatgcctgaaggagaactgacacatggtatatctcatccttggagccggttttgaagaagcggaggccatcgtgccctgcgatctgctgcgtcgcgccggagtcgaggtgcgcctcgccggcatcggcgggacggacatccccggcagccacggcatcccggtccatgcggactgcgcggcggaagcggccgagctgacgaaggcggacatgctcatcctgcccggcgggctgggaggcgtccgctccatccgcggctgcgaaccggtgctctgtgccgcacgggaaatggcgcaggccggaaaatgggtcgccgccatctgcgccgcgccgacggtgctggcggagcttggcctgctggagggccgccgcgccacctgctaccccggcatggagccggaaatgtgcggggccgtcatgcagaatgcgggcgtcgtgcgcgacgggaatttcatcacgggccgcgccgccggaagtgcctttgccttcgggctggcgctcgtcgaggcgctgtgcggcgcggaaacggctgcacgcatcgctgcgcaggtcgtctggaacggggaggaggcatcccatgactgaggaacatcgcagcgacggccggtccatcgacgagatcctggccgaagcgcgcgccgagctggacaaaacgccggacgagccgcagcaggccgccgaaccggggacgccggagccggacgattttacgccggatttcggccatacgttcgacgactacggtgaattcgaggagccgcagcccgaggaggagcttcctccggagccgccccgcaagcgccacaagcgcattgtgccgctgtttgtgaagatcattctctatgtggtgatcgtcgccgtcgtctccgtcggggccgggtatgccgcctgggcctgcgcgacggatgtgctggccttcggccgctcgagcgataccattcaggtcaccttgccggagaatgcgtcgctcgacgccattgccgacatgctgcacgacaacggcctgatccagtacccgtggcttttcaagctctactgcaagtttacgcattccgcgggccgcatggacgcgggaacctatgagctggcctataactatgactatcatgcccttgtcagcggcatgacggagagcggcggcacccgcacgaccgtgcgcgtcatgctgccggagggcgcaacatgcgcgcagatcttcgccctgttggagaaaaacgaggtctgcacggccgaaaagctcggcgagagcgccgcaaacacgcattttgactactggttcctggaagacatcccctatggcgagacgaaccgcctcgagggcttcctgttcccggatacctatgatttctatgtcaacgacgatcccgaccgcgtgctcgagaagctgctgtcgaatttcaaccgcaagttctcggacgatgcttccgcccagctcgaaacgctgaacacggcgcttgccgagcgctggaccgcaaagggctatgacgagagctatatcgaggcccaccgtatgacgatctatgatctcgtcaccgtcgcctccatgatcgagaaggagacagcctccgccaaggagagcagcaccatcgcctccgttatctataaccgcctgtgcgatcccgcaaactatccgtacctgaacatcgacgcaacgatcgtctatgcgctcggcggcgtcgacggcgcgctgacctatgaggacacccagatcgacagcccttacaacacctataaccgcacgggtctgcccgccggaccgatctccaaccccggcctgtcaagcatctccgcggcgctgaacccggccgatacgagctattattactatgcgctcgacgactccacgggcctgcatcacttctccgagagctatgacgagcatcaggccttcctggcggggcagaacgatgcgtaagcccgaactgctcgcgcccgccggagacatggagcggctgcgcatggccgtcctctatggtgcggacgccgtctatctcgccggaacgagcttcggcatgcgctcctttgcggggaatttctccccggaggagctgccggaggccgtcgcctttgcccatgcacacggtgtgcgcgtgcatgtcacggtcaacaccatgccgcgcggggacgagcttcccgcgctcccggcacacctgcgcctgctgaacgacagcggcgttgacgcactcatccttgcggacctcggcgtgttccgcatggcgcagcgcgaggccccgaactgtgagctgcacatttccacgcaggtcagcatcgcgaacgccgcctgcgcggccgcgtggcatgagctcggcgcaaagcgcgttgtgctggcacgggagctttctctcgaggagatccgcgtcatccgccgcgatacgccgccggagctggagctggagacgtttgcgcacggggccatgtgtgtgtcgtactccggccgctgcctgctgtccaactatatgacgggccgcgacagcaaccgcggcgcatgcgcgcagccctgccgctatcagtacgccctcatggaggaaaagcgccccggcgagtatttccctgtgttcgaggacgaaaagggcacctacatcatgaattcccgcgatatgtgcatgatcgaccatctggcagagctggcggaggccggcgtggactgcatcaaggtcgagggccgcgccaaatcggcctactatgctgccatcatcacaggggcctaccgccacgcgctcgatgccgtcgccgccggggagccggtcgacccggtctggcgcgacgaggtggagcatgtctcgcaccggcgctacagcacgggcttcttcttcggccagccggggcagtatacggaaagctcccgctatatccgcgactggcaggtctgcgccatcgtgacggactgcacaccggacggcatggcgacattgtccctgcgcaacaagtttgccgccggggatgaggtcgagatcgttggcccggatacgcgcccgttttccgtgaccgtgccggtcatgcaggatgcggacggcctgccgctgcgcgagccgcgcacgccgcagatggtgttccgcatgcagctgccgcgccgtgtccccgcgatgagcatcgtccgccgcgcagtcgacctttcggcaaagtgaaaaacagcgggccgctgcatcgcagcggcccgtttgatatgaaatctaacttgtatatgatacctgcgtgacggtatagccaagctggcggagcccttcgacaatgccgtcctcgcccagcatatgggcgatcccgacgatatagaacacgttcttcccggcgcgcagggcttcgtccgccgcccggatcatgacggcgttgcggtccgtcacaagggtgcggccgaattcttccgcggctgcctcttcctccggcgtgagcggctcgtccggttcagcctccagcagatcgatgatcgcggcctcgtcgccgctgcaccatgcatccagcagcgccgcggcgtcctcctccgtggcggcaaggacctccggacggatggcctgctgcagagcgtagacctgcgtctcctcggacagcgcgccgagcgcgcggtagacgtccgtgtattgctcgacctccaaaatttctgtgccgtcggcctttgccatctgcaggaaatagcggtccacgccgccgtccggcgagaagcgcgtctgcgccagtgccagatttcctgccagcaaataccagaaaatgggcatgtagtggtcgagcatggtctgatagccgccgaggtccgtcagcacctgcttcgcgtcggcgtaggtctgcgcgtccagatgggcgtcgatggtcgtgccgtcggtgtagacaagacagcgcatcatttcgacctgcgccgacaggtctgcctccagcgcgagaacgtcgctctccacggccagcgtgtcgcaggcggcataggcgtccagaagctcctgcggataggtgaggccgtcgctgacgtggatggagccgagcaggtagaacgagccggaatagccgtttccgctgacctgccagaacagcggctgtgctggctcggatgccgcatcatcctgcgcggcgtggtcggggagcgtttccgccgtttccactggcggctccgctgcgggctgcgtcggctccggcgcggcggagcaggcgcacaggagcagcagcgcgagggccagcagcatggcaagggtacgtttcatgggcagcggtcctttctgaatcgttttccttatcgtacgggatttcgatagcgtttgtcaagcgccaaaggggctgcggaaaatttctcgcgattttcgaaaaaagtgcttgcaatttgtggggcgttgtggtagtatattggagcacgttgagtgcgtacgcgccggtagctcagctggatagagtgactggctacgaaccagtaggtcgggggttcgagtcccttccggcgtaccaaaaataacctttgccgtaaggcaaaggttattttttatgtctgcgggaaaaaacagcactgttttgttgagaacggcccggcactgccgatatgaacaggccgccgatcaaaacgaacaaaccgcttgcatcttgtgcctgcagcggcggtcagtgaccgccttgtacagggatattcaaccgtgtgagggcgctggtgcaccgccgcaccacctgacgtgtcattgcgaggaggccgcaggccgacgcggcaatctcgggaaggcagttacggtttcgccggagctttcgtgatatccgatatggtactgcgagattgccacgtcgcttcgctcctcgcaatgacaaacttgaaagcctgcacgttcggcgagaatgcctagcaatttgcagctgccttaggcgctcgctgagcgccgctacagacagggaaacttcgcgcaaggggatgaggtctccggttcttcccatgataaaaagaaaagctccgaaactcgaaagtctcagagctcagactgtcgaaaaacctgcccagctgaaagcttcggagggaagaaaagtgtgaaaggaaaccgtcagggtgtcctttcgcgtccgatcacccgccgcagcggcagaattgcaaaataatactacagaattgaattttgcaattctgaaagcagcttggcgaaaaatcccgaagggacttttttgacaagctgagctccgaaacccgaaagtctcggagcatttatggagctgctatccagattcgaactggagtccatgtcccgcggagcaggctccgcgggaacccggaacgacctcgaatcagaatgcgcttcgcgcaaggggatgaggtctccagttttgcctacggtaaaagaaaaccttcaaaacccgaaggctttgaaggtttctggagctgctatccagattcgaactggagtccatgtcccgcggagcaggctccgcgggagcccggagcgacctcggatcagaatgcgcttcgcgcaggggatgaggtctccagttttgcctacggtaaaagaaaaaccttcaaaacccaaaggctttgaaggtttctggagctgctatccagattcgaactggagacctcatccttaccaaggatgcgctctacctgctgagctatagcagcatttcctgacagctctgctattatatcagcaggatagaaaattgtcaacaactttttttcatttcgtcgattttttcggggcggaggaagcgggtgatctgtgccatgagggcggggttggcctcgctgcgggtcgcgccgaacagcaagtcggcgtggccgtcgtgctccggctcggcccagagcagggcctgcgcctgcggcagcgcgtgcagatgggccagaatggagctgcggtgcagcggagcgatccagtcgtgcacgccgccgacgagcagcagcggcgtcccggactcggcggcagcctgtgcggcggtgcggcgcagggcgcgcagtccgaagcgcgcggcctgatagaggtacagcgccggataatgcgcataggcaagcacgccgatgtggtgcaggaccggcgagagcgtggcctccatgggactgttcaccccgccgaggcacacggccgcatccacccggcttcccggcagggcgcagcagacggcatagccgcccatgctgtggccgagcaggacgaggcggcggctgccgaagcggccgttttcctccagaaagcgcagcgcggcgcgcaggtcgtccgctgcctgcggaaagccccggcacgaccggcccgtgctgccgtagcagccggtgtagtcaaatgaaaacacgcgcagcccggctttggcgagccattggatctgcggcgcataggaaaacgctccgttcccaagccctggcgcgaggacggcgagcgtgtcccccgtgccgcataagtagccctgcaggcggttcggcccgctcaaaaacgtgagccttttcgcgggcaggccgagctccggctccggatcggcgtcgtagcgccggaagcagcggtgatagatcagaacggtcaagagaaacagcgtgagcaatttttcgccctcctttttttggagggtatgcccgttttttgcgattttcaaaccgcgttctaggaaattccgccgcgctgtgctataataagaaatcctgtgatgggaagaagagagaaagagggcgcagctatgggggagcttccgtttgcactcgcgccggaggcggcgttgggcgcatggctccgggaggcggagcgggagatggagccgcaccgcacggcggggacctatcgcggctttgacggcacggagctgccgtggcaggccgtgcacgccgaccggccgcgtgcccatgtggtcctcctgcacgggttcacggagtttccggaaaaataccgggagctgtgccgttatctccgacaggcgggctgcacggtctggctgccggtgctgcgcggtcacgggcagggcggcatcgtgcatgtcgaccggttcgaggactatgtgcgcgatatggcctgcttcctgcgggatatcgtcccggagcggccgctgctgttcggccactccatgggcggcggcgtggccgcacgtcttctgcaggagctgccggactgtgctgcacgcgccgttttgtgctcgcccatgctctgtccgcagacgggccgcgcgccgcactggctggcgctcggctgtgcccgcgcactgctgcggcggggcgagcgggagaaaagcccgctgttttccggcgcttatgatcccaacgccgaattttcgtgcagcggctgcacgagccgcgcccgtttccgcgccgccatggactgccgcgcagagtgtcctgcctatcagacgatgggcgcgtcgaaccgctgggtctatgaatcgctcgccctgcgcagccgggtcctcagcccgcgcgcctgccgcagggtgcaggtcccggtcctggtgtgcagcgccgggcgggacacgcaggtcagcctgcgggagcagcgcctgttggccgcgcgcctgccgcaggggcggctgctggagttcccggaggaaaagcatgagctgtacaacgccggaaatgccggattggcggcattcctgtgtgcggttctggaatttttcggcctgacggccggatacggaaaggaagagacaaaatgaccttacttatcgttatcgatatgcagaatgacttcgtgaccggtgcgctgggcacggcggaggcgcaggcgatcgtgccgcatgtgaatgcgaagatcgcagcggcggatgccgtcgtctatacactcgacacccacggcgaggactaccttgccacgcaggagggcaagaggctgcccgtgccgcactgcatccgcggcacctggggccacgcgctggccgacggcctgaccgtccgggcggaggcagggcggatcgagaagccgacgttcggctccactgccctcggcgagctggtgcgcagccgcttcgcggcgggcgaaatcgaccgcgtggagctcgtcggcctgtgcacggatatctgcgtcatttcgaacgccctgctgtgcaaggccttctgcccggagcttcccgtttccgtggatgcggcctgctgcgcgggcgtgacgcccgagaaccaccgcaatgcgctctctgcgatgcagtgctgtcagatcgacgtgttaaatattgcacccgacgcgaagtgacagctcgggatgaaactgtaacaggatatttctttggacatttcgacggcggcgtatgaaaatagcgcagctttcggggaatgcacattgcgaaagcaatggggttttgctatagtggctacaaacgaaaactgtcgagaaatgagggtcgactatgggaaagaccgcttttctgttctccgggcagggcgcgcagcgcgccggcatggggaaggaattctatgaacattttgcctccgtccgcgcgttgtttgacgctgcggaggagcttcgccccggcacgctgcagcagatgttcgccgggagcgatgacgagctgcgccagaccgaaaacacgcagccctgcctgtacctggccgatcttgccgccgcctacgccctgcgcgacagcggcctgcagccggaggctgttgcgggcttctcgctcggcgaaatccctgcgctggcctttgccggggcctatgacggcatgacgggcttccgccttgcctgcgcgcgcggtgcgagcatggcgcgggccgggagaaacgtcaacgcctccatggcggccattgtcaagctgccggacgagacggtcgagcgcctctgcgccgcctatgaccatgtctggccggtcaattacaactgcgacgggcagatcgccgtctcgggcgaccgggatgagctggagcgcctgtatgccgatgtcgcggccgcaggcggccgcagcatgccgctgaatgtcagcggcggcttccactcgccgtatatggaccccgcttcggcggagttcggcgcgatcctcgcggacacggtcctgcagaagcccgcgcttccggcctatgccaaccgcacggccgagccctacggcgagaatgtccgcgagctgctcacgcagcagatcaaccatccggtccgctggaaggagacgctgcgccatctgaacgagcagggctttgacacgtttgtcgagtgcggcgcgggcatggtgctgtgcaagctcgtgcgcaagaatctgccggaatgccgcagctttgcggtcgacagccttgccggtctggcaaagctgcaggaggagggactgctgtgctgctccgcgacctgatccgcgaatatacgcagagccgcacggagctgccccccgcgcctccggcgcgcccggtgccgcagacgcatgtctgtccgaagtgcaagatggagagcggccgcacggccgtggagcagggcgcgatgatctgcccggcctgcggtgcgtatttccgcatgaatgcgcgggagcgcatcacgcatacgttcgatgccgggagcttccaggagctggatgccgatgtgacgagcgtcgattttctgagcttccccggttatgccgaaaagctggaaaaggcccgcaaaacgacgggcgagaacgaggccgtcctgtgcggaacggccgccatcggcggcatgttctgcgcgacattcgtcatggattccagctttatcatggcctccatgggctctgccgtgggcgagaagatcacccgcctgtttgagttcgcactggcccagcgcctgcctgtcatcggcttcacggcctccggcggcgcgcggatgcaggagggcgtcgtgtccctcatgcagatggcgaagtgctccggcgcggtcaagcgccacagcgaggcggggcttctgtacatcgccgtgctgaccgatccgacgaccggcggcgtgacggcttcgttcgccatgcaggcggatatcattctcgccgagccgaacgcgctcatcggctttgccggccgccgcgtcgtggagcagacgaccggctcgcagctgcccggcaatttccagcgcgcggagttcctgcgcgagcatggctttgtcgacgcggtgatcgagcggcgcgctctgccggtcacgctgggcaacctgctctatctgcacggaggatgagcgaaaatgaatgcttttgaacgcttgaaagaggcccggcacgccgggcgtccgacgggcgcggcctatgttgccgcgctgtttgaaaaccgcctcgacctgtgcggcgaccgccgcttcggcgaggacccggccatcatttccggcattggcacgctcagcggccgtcccgtgacctatatcgccatcgacaagggcgcggacctcgacagccgcatgcgcaaccacttcggctgccccatgccggagggctatcgcaaggccctgcgcctgatgaagcaggccgaaaaattccaccgccccgttatctgcctcgtcgacacgctcggcgcctactgcggcgcggaggccgaggagcgcgggcagggcgaggccatcgccgagaacattctggaaatgatgggcctccgcacgccggtcgtctccgtcgtcatcggcgagggcggcagcggcggcgcgctggcgctggctgcggccgaccgcgtgtatatgctggaaaacgccgtttactccgtcatttcgccggagggctgtgccagcatcctctggaaggactccggccgcgtggcggatgccgcgcagtgcctgcacatcacggcggccgatatggtcgacctgcatgtggccgaggatatcctcccggagaatttcgccgatttcccgcagatgtgcgccgccatgacggtgcagcttacgatggacctcgacgagctgtgcgccctttcgccggaggagctgctcgagcagcgctaccgccgctaccgccgcatcggcgtgtatgaggaaaacggcagtattgtccgctttgccgaacactgaaaccttccggcccatcccggagtattataaacaccatgtaatttttgaatcataaggagatagatcaccatgacgaagactgaaattgcagcgaagatcaagaacatgatcagcgagaacctgcgcatccccgaaaacatgctggacgacgatgccgagctgttcggcggcgacatcggcctggactccgtggattccctcgagatcatttccggcatcgacgacctgttcggcgtcgacatgaccggcgtggaccgcgagcacttccagaccatcaacgcgctggcttcctatgtcgaggagcatgtggagcagtaaatggaaaagcgttgtgtcatcaccggccttggcctgatctgcgccgccggtaacgacgtggatacctgctggcagaatatctgcgccggaaaaaccgggatcgacgaggtcaagtccgtctcgacggagggctgcgtctcccatgtgggagcggaggtgcactgtgagaatctccctgcgcccgaatatgaccgctccgtccgcctttgcctgcatgcggcccacgaggccgtgcgcgacggcaggctgacggacagcgccgtccgcgaggcgggtgtcatccttggcagctgcgtcggcggcgctgcgagcatcgaccactattacaccggcctgctgcagggccgcacggaggagcaggatgttctgaagatgtccgcctccgccattgcggcgaacactgccttcgcgctcggcgcgaacggcgaaacggcgaacatcgtcaatgcctgcgcggcgggcacgatgagcgtttcgtatgcgtgcgacctcatccgcctcggccgcggcgaaatttttctcgcgggcggcacggatgccttctcatcccttgcctatgcgggcttcaatgcgctgcatgcgctctcggccggcccctgctctcctctgaaccacagcaacggcatttccctcggcgagggcgccggtgttctggtcgtggaggagtatgagcacgccatccgccgcggcgcaaagatctactgcgaggtggcgggctggggcgtcagctccgatgccttccacatcactgcgccgcagccgcagggtgaggggcagatggccgcgctgcaccgcgccatggtcaacgccggaacggaagcgggcgacatcggctacatcaatgcccacggcaccggcacggccaagaacgacgcggcggagttcctgtcgctgcacacgcttttcgagggcgcggctccgtccgtcagctcgacgaagtccatgacgggccactgcctcggcgcggcgggcgcgatcgaagccgtcctcagcgtcaaggcgctgacggagaacacggttcttccgacgatgggctatgccccggcggatctggccccgctggccgaaaaggccgggaacctcgactgcgttgtgaacgtcgcccgcgagcgcgagctggagaacgtcatgtcgaactcgttcgcattcggcggcacgaacgccagcatcattttctcgaaaaagccgcacccggcggagcagaccggcaagcgccgcatctgcgtgacgggcatcggcgagctgctgtccgaggcggacggcacggcgagcgttcagcgcgagctgacgccggaggatttcggcgcgcgcgatgtgaagctcggcttctatcgcaagctcgaccgcttcagccagatgcaggtcctcagcggcgtggacgccctgcgcgatgcgggctttaccatcgatgcggacaacgcctcccgcgtcggcagcacgatcggtacagcggacggccccatggccgagatcacgtcgttccagaagaccgtctgcgaaaagggcccggctgcgggcagcgccttcagcttcccgcacaccgtgtataacgcggcgggcggctacctgtccatttttaccggtctgaagggcttctgcgccacgatcgcaaacggcacgcaggcgggcctgcagagcgtcatctgtgcctgcgatgagctgcgctccggcgcggtcgacgccgtacttgccgccggaacggacgaaaattccgaaaatatcaccgaggtctattcgcacctgccgctgcccggccatgtcgtcggcgagggctgcgtgacgatgctcctcgaggatgccgctgccgcacaggcgcgcggcgcaaggatctacgccgaaattctcggctatgccgggacgcatcaggcggcccgctacggctcggagcctgcgcaggagcaggtcgaccgcacgctggcagaggccctgcaggatgcgggcctgaccgccgtcgaccgcctgttcaccgcacaggagatgaaggcccgcaccggcgacgcccgcgcggcctccgccgctctggcgttggcagaggcctgccgcgccgtggcatccggcgagtgccgcacggctgctgcgctggccaccggctggaccggcagcgtcagctgcgtgatcgttgggaggaaagaagcatgagcattgcacttgtgaccggcgcgtcgcgcggcatcggcagagcctgcgcgctggcgcttgccaaacgcggctatgatgtcgcggtgaactatgtctcgaacgaggctgccgcgcaggcggtcgtcgcggagatcgaggcgctcggcgtgcgcagtctggccgtccgcgccaacacggcagagctgccggaggtcaaggatatgttccgcaccgtcgtgcgtgagatgggcggcctcgatgtccttgtgaacaatgcgggcgtcgtggacgaccgctatctcatgatgctcacggaggattccctgacccgcagcctcgatatcaatatcaagggctatttccactgcgcgcagcaggcggcgctcaagatgttcaagaagaagtccggcgtgatcgtcaacatctcctccgtcagctctgtgctggccattcccggccagagcgtctacagcgcgacgaagggcgcggtcaatgcgctcacggcgacgcttgccaaggagcttgcgccctacggcatccgcgtcaacgccgtcgcccccggcttcgtcgagacggagatgctcgaccatatcccgcaggagcagcgcgagggctatctcaagtccgtgccgatgggccgctttgccaagccggaggaggtcggcgacgccgtctgcaccctgtgcgacccgacgctgtcctacctgacgggccagacgctcatcctcgatggagggctgagcctgtgaatctgctggagatcaatgcgcgcatccgtcagcgtccgccgttccagatgatcgagcgcgtgacggcgctggagcccggcaagagcgccgacggcatcaagtgtgtttccgtcaacgagccgtattttcagggccatatgcccggcctgcccatcatgccgggcgtcctgctcatcgagagcgccgcgcagctgtgctccctcgtcatcgaggcagacggcagcgacgacagcaaggtctatgtgctgctgaaggtgcgcgatttcaaattcgtccgtcccgttgtgcccggagaccggctggagatccatgccgagatggtgcgcggcggcgcgggggtctacacgttcgacgtgacgatctcctgcgacggcggcgtgcgcgccaagggcgagctgatgtttacggccgtggcgcaggattccatctacgcatgagagtcctcgtcctcaacgccagcccgaagggcgagcagagccacaccatggccatcacccgcgcgtttctctccggcttcccggagggaacgcagacggagctgctcgagctgtgccatctgaatatccggccctgcacgggctgcctcggctgctggacgaaaacgcccggccgctgcgtgcagcgcgacgacatggatcgggtctatgcggccattgcggcggctgacgttatcgtcgagagcttcccactgtatttttacggcattccgggcacgctcaagacgctgacggaccgctgcctgccctataccaaggcctatggatggagcagccgggccgtgcacgagctgcgcgaacccgccatgctcgaaaagagccttgtgctcatctccacctgctggcacacgggcattgagcgcctgtatgcggcggtacgaacggcctatgccgagtatgcgcccggctatcaggcgatcttctgcccgcagggcgagctgtttgccatcgacgcctgccaccggcaggtcagcgcctatctggccgatgcggcgcaggcggggcacgaggtcgcgcagaccggccgcatcgcggacgacacggcggcgcggctggcgcggcccatcctctcggatgccacgttcgagcgcatcacacgcccgcactggagcatcatcgacgaataaacagcggaggcggagcatttcagctgagtacttttttcaaaacggatgcggaacatttccgcatccgttcagcttgacgaaaagtcccttcgggcctttccgccaagctgccttccaaaattgcaaaatagaattttgtagtattattttgcaattttgccgctgcagcgggtgatggaacgcgaaaggacaccctgacggtttcacacttttcttccctccgaaactttcagccgggagaaaagcctcgcagagtttgcgctcgcaagcgcaaagaaagtgggaatcattttctccggcggcgtgtacgtcggagaaaataccgctcggctcgcaaacgtgcgaagggcgtgcccttcgtgcgctgcagcgagccgcagccttttcaaacgagagcccagtgaaacgggtctcgtttgagagcttgtcaaaaacacttttttgacaagctcacggatgcggaacatttccgcatccgtttcgtcaaatagggcaagaagaatagcgcaggggataccctgttagaaaccatggacaaaggagaacaaacctatgaaacggatatttgcggttctgctggcgctgagcctgcttctgcttgccgcctgctcgaagggcgtttcccccacggagccgtcccagaccgagcctgccacgcaggccccgaccgaaccggcgaccgacgctccgacggagccctcccagacggagcccgccacggagccgtcgcagcccacggaggaggagggcccgttcaccgtgacctatgcccacgcgcaggccgacacgcacggctccggcgaggtgtgggtgcagctgctggccgaggtcacaaacaccggcgcagagccgctgacgctcggcgcggcggactggacagtctgcacgccggacgggacggagcttgccgtccgtaagggcgtttccgcctatccgcagacgatcgagccgggcgaaaagggctggtattatgatgagttcactgtcgatacggcccagacgggcgagcttgccgtgcagtatgacggcgacgccctcgcagcatccgtccgcgcggcggagcagagcggcgtgcgctatgccgtctcggatgtcaatctgaaggattccgtctatggcggcgtggagttgacgggccgcatccgcaacgacacggcggagcggggcagcctcgtctgcgtggcggccgtgctgcttgacgagtcggaaaagccgctcggcgtggtctacaccgtgctggacagcccgctcgaggccggcgcggagacgacgttcggcatgagcagcgagatgctcccgccggaggtcaaatctgcggacatcgcacaggtcgagacgttcgcctatccgcttgcggagtaagtatataaaaaacggaccgggtcggagataccgactcggtccgttttatacgggactcaaacgttgaagaggaagttgacgatgtcgccgtccttcatgacatactccttgccttcactgcggacaaggccctttgcctttgcagttgccatggtgccgcaggccttcaggtcgtcgaaggcgatgacctccgcgcggatgaagccgcgctcaaagtcactgtggatcttaccggcggcctgcggggcgcgggtgccctttttgatcgtccaggcgcggcattcgtcgctgccggccgtcaggaacgagatgaggccgagcagctcatagctcgcctggatcagacggtcgaggccggactgcttcaggcccagctcttccatgaacatggccttttcgtccgggtcgtccagctcggcgatgtccgcctccagcttggcgcagatcggcagggcaagggagccctcctcgtcggccagcttcttgacctgctggaagtacggcacggactccggatcgttcacggcgtcctccgagacgttcgcggcatagatcgtccgcttgagcgtcagcaggtcagacgtggcgatgagggcgcggtcgtcgtcggagcattcaaacgtgcgggcaagcttgcccgcattcagatgctcgagcagggcagagaaaacctccgcctcgcgcaggaagcgcttgtcgccgcccttggcggccttctgggccttgtccatgcggcgctcgcacatttcggcgtcggcgaggatgagctcgaggttgatgatgtcgatgtcgcgcagcgggtctgtgctgccctcgacatgggtgacgttcgggtcgtcaaagcagcggacaacatggatgatggcgtccgtcgtgcggatgttcgaaaggaacttgttgccgaggccctcgcccttggacgctcccttgacaaggcccgcaatgtcgacgaattcgatcgtggcgggcgtgaatttcttcggctgatgcaggtcgcgcagccactccaggcgcacatccggcacggccacgacgccgacgttcggatcgatggtgcagaaggcgtagttatcggcgggaatgcccgcatttgtgatcgcgttgaacagcgtggacttgccgacgttcggcagtccgacgataccaagtttcatggatgctgatctctcctcttgtttcgagtatgttttgcacctattatagcagacgagtacggctctctcaagctgtttttgtccaaatatcaattcgcggcgcggcggtcatagagctttgcaaggccgccttcggaggtctcgcggtattttgcgctgatgtgcaggccggtctccttcatcgtgcgcacgaccatgtcgaagctgatgttgcgcgagccgcacagcaggccggacaggttgaaggcatccatggcgcgcttggcagccacggcgttgcgctcgatacacgggatctggacaaggccgcagatcgggtcgcacgtcaggccgaggtggtgctccatggcgatctcggcggcgtattccgtctcctcgatgctcagacccatcagagcgcacagcgcggcggcggccatggagcaggccgtgccgatctctgcctgacagccgcattccgcgccggagatggagccgttgcgcttgacgagagcgccgaacagaccggcgacggccagcgcgcgcaggacctgcgcatctgggatattgtgcgttctctgcatgtacagcagcacggcgggcagcacgcctgcggagccgcaggtcggcgcggtgacgatggtgccgttgtcggcgttctgctccgaaacggcaaaggcataggcacacacgatgcgcagctcgcgcacctgcgggcgctcgttttccttgccttgcgcatagagccgcttggccttgcgctccacgttcaggccgcccggcagcgtgccctcagcggccagaccgtctgcaatggcctgcttcatggtctgccagacctctgcgaggaagtcccagatgccgggcccctcattcagctccacatattcgctgagcgaaatgtagcgccagcggcagaactgggcgatctccgcaaaggaattttccggatagacttcgtcctgctcctgcggcgcgtcctgcccctcaatgcggatgtcgccgccgccgatggaggccacgcgcatggtggcgtagggcttgccttcgcggcaggcaaagaagtccagcgtgttcgggtgcggcaggctgtgcggcgtctcctctgagaagacgacctccgtccgctcgcggccgagcacttcatacagcacgcggtccgtgccgtggccgcgccccgtcttggacagcgaaccgtaaagcacgacacggtaggtctccgcgtcgggatatttgctcaggaaaagtctggcggcgcgctccggccccatggtgtgggagctggacggccccttgccgatcttataaacgtcgcggatcgatttcatccgggatccctccatatttctgtgatcccggatattatagcattctgccatggaaaaaacaatcccggccatatccggcaagggaacaaaaaccgcgaaaaaccgcctcaaaaggtggaaaaaatgccccgttcccgaatcgtgatatccgggaacgggacggcggtcagggcttgcggagcgcttcgagggaaagctcgcccgccagcttgaacagggcgtctgccacaacggtctccagcgggagccgggcgctctccgccacgcgggtatagaaggcggcggccgccgcgtcaaggtcaatggtgagtcgcaagggaaacggcctccttcggggaaagaatcctgctccatagtatgctgaggcttgacaggcgtgtgaaaatgggttaaattattatggtatattggtatcgctgcgcaacggcgtcttccggcgcgctgcggcagcttcgaaaggatgaggcaggctatggccaaagaaaagaaagttgaacagatcaccgatatggaggtcgattttgcccagtggtacacggatgtctgcaaaaaggcagagctgatcgattattcctcgatcaagggcatgtttatctaccgtccgtacggctatgccatttgggaaaatatccagcgtctgatggatgcggaattcaagaagaccggcgcagagaacgtctatatgccgatgctgatcccggaatccctgctgcagaaggaaaaggaccacgtcgagggcttcgcgccggagtgcgcgtgggtcacgatgggcggcagtgagaagctcgaggagcgctactgtatccgcccgacgtccgagacgctgttctgcgagcacttccacgacatcatccactcctggcgcgacctgccgaagatgtataaccagtggtgcagcgtgctgcgctgggaaaagacgagccgtccgttcctgcgccaccgcgagttcctctggcaggagggccacaccatgcacgccacggccgaagaggcccgcgaggagaccgagcgcatgctcaatgtgtatgccgacttctgcgagaacgtgctggccatgccggtcacgcgcggccagaagaccgacaaggaaaagttcaacggcgccgaggcgacctatacgatcgagtgcatgatgcacgaccgcaaggccctgcaggcgggcacgtcccacttcttcggcgacggctttgccaaggcgttcgacattttctatacggataagaacaaccagaaggtcaaccccttccagacgtcctggggcgtctccacgcgtctgatcggcggcatcatcatgacccacggcgacaacagcggcctcgtcctgccgccgaagatcgcgccggtgcagatcgtcatcatcccgatcgccatgcacaaggagggcgtgctcgagaaggcacgcgccgtcgccgagacgctgcgcgcggccggccttcgcgtgaagctcgacgagtccgagcagagccccggctggaagtttgcggaatatgagatgaagggcgtgccgctccgtctggagctcggcccgaaggacatcgagcagaaccagtgcgtgcttgtccgccgtgacaacggcgaaaagagcttcgtctcgctcgactccctggtcgaatccgccaacacgctcatggatgccgtgcatgacggcatgtatgccaaggcaaagcgcaaccttgacgagaatatctacgatgccttcacgctcgaggaggccaagcgcctgcagcaggagcacggcggcttcatccgcacgatgtggtgcggcgacgaggcctgcgagatccgcatgaaggaagaggcggggatgacgagccgctgcatcccgtttgcacaggagcatcttggcgatacctgcgccatctgcggcaagcctgccaagaagatgatctactggggcgttgcctactgagctgttgaaaaagtccaaaggactttttcaacaatgggatctcagtccgctgcgcgcacgaatcgcccgtcaaagacgggcgattcgcacactggcgggctgagcggtattttctccgacgtacacgccgccggagaaaatgatctcacttttttcgccgcctgcgggcggcgaactctgcgaggctttttgtacacgaagcccggagcgttttctctgggtcagcttgtcaaaaaagtcccgttgggctttttcgccaagctgctttccgaattgcaaaatcaaattttgtagcatgattttgcaattctgccgctgcggcgggttatttgacgcgaaaggaaaccctgacggtttcctttcacacgatccttccctccaaaatttggggctggactggtttttcaacagtccggaatgcctgtgaagcattttccctgagattcccacgtcgctttgctcctcggaatgacacgactgggagttctctgtcaaatgcaaaccgcccgcagcaggggcttcctgctgcgggcggtttgaaaaaggagggaaaaatgaaaaaagaaagaaaagaaaatgcatcacacttactatccatattatatccgggaattattaagaagaaaaccaagaaaatattaagtttatttgaagttgacggctcccatgcccaggacgggcagccggtctggtttagcctgggatttttggggaagaatcccaaaaagaattgcaggcaagtggctggcttacctgcaactcccggtttaaagtaagagggggaaaatgaaaaagattaactcaacgcttctggtattattgtaccccggagatattaaaaatataagccagaagaaattaagtttgtattaagcgggcgggccgtaccggcgcgaaaaatggttgacaaatcacgcgtccgctgatagaatagtccaagaatcgtgaaaattcgcgttgaagaagccaatctgcggcagaaccgtcagcgagcaggggagagtgcaagccctgcggccgatgctgcagaccgccacttccgagcggcccgcgacgagtgggacggcccatccccgttatccgatgactaagatgccgcgctgcggtaattagggtggtaccgcgagaagcctcgcccctatatccgggggtggggtctgctttttattccgagggaatctctgaacaaatcgtctgcggctgagcagcgaatcttttgccccatccgtacagtttggaaaacgggaaatacatccagtattcctccgtttcccaaactttcgcctgagacaaaatctccagctgtcagctcttgacgattgattcagcgcttcccgagtattttcaggaggatgattcccatggccacaaaaaagtatggcgtcaatgagctgcgcgagatgttcctctcgttctttgagagcaagggccatctgcgcctgcccagcttttctctgatcccgcagaacgatgcgtctctgctgctgatcaactccggcatggcgccgatgaagccctatttcaagggcgaggtcacgccgccccgccgccgtgtctgcacctgccagaagtgcatccgtaccggcgatatcgacaacatcggccacacggcgcgccacggcacctatttcgagatgctgggcaacttctcattcggcgactatttcaagcatgaggccattgcctggtgctgggaattcctgacgaaggtctgcggcctcgaggaggaccgcctgtatccgtccatctatgagaacgacgacgaggcgttcgagatctggaacaaggagatcggcatcccggccgaccgcattttccgcttcggcaaggaggacaacttctgggagcatggctccggcccgtgcggcccttgctccgaggtctattatgaccgcggcgagaagtatggctgcggcaagcccggctgcaccgtcggctgcgactgcgaccgctatatggagatctggaacaacgtcttctcccagtttgacaacgacggccatggcaactataccgacctcgtccagaagaatatcgacaccggcatgggcctcgagcgtctggccgttgcctgccaggacgttgactccctgttcgatgtcgacaccgtcatgaacatcacgcacaaggtcacggagatcaccggcgcgcactacggcatgagccacgagaaggacgtctcgctgcgtgtcatcacggaccacatccgtgcatccgtctttatgatctccgacggcgtgctgccgtcgaatgagggccgcggctatgtgctgcgccgcctgctccgccgcgccgcccgccacggcaagctgctcggcgtggaccatccgttcctgtgtgatgttgttgagacggtcatccacgagaacgagggccactatcccgaccttcgcgagcgcgccgcctatatcacccgcgtcgtccgcgtagaggaggagaacttcgcccgcacgatcgacggcggcatgcgcattttctccgagatgctggcgcagcataaggaaaacaacgaatccgtcttctccggcgcagatgccttcaagctctatgacacctacggcttcccgatcgacctgacggtcgagatggcgcgcgaggagggcatggaggtcgacctcgaagccttccggaagctcatgcaggagcagaaggtccgcgcacgagaggcacgcaaggccctcggcgacctcggctgggccggcatcgacttcggtcaggatattcccgagacgcagttcgtcggctatgacaaaaacgagaccgagggcaccgtgcttgccatcgtggcggaggacgagtcccgcagcgagatcgccgcaggcgtcgaggctatcgtggtgctcgaccggacgacgatgtacgccgagatgggcggtcaggtcgccgaccacggcacgatcaccggcccggacggcgtgttcgaggtcacggacgtgcagaagaacaagggcggtaaattcatgcactacggccgcgttgtgagcggcacggtcaagctgggcgaatcctgcaaggtcatgatcgatcctgagcgccgcgccgctatccgccgcgctcatacggccacacatctgctgcaggccgcgctgctgcgcgtgctcggcgagcattgccatcaggcaggttctcttgtggagccggatcacctgcgctttgacttcacgcacttctccgccgtcacgccggaggagctggtggagatcggtaatcaggtctccgagatggtgctgcgcggtgagccggtcgagacgatggtcctgccgatcgctgaagcgcagaagctcggcgcgacggccctgttcggcgagaagtacggcgagaccgtgcgtgttgtgaagatgggcgaggattcactggagttctgcggcggcacacatctggacaacaccgcaaaggtcggcccgttccgcatcctgtccgaggcctccgttgcctccggcgtgcgccgcatcgaggcctacaccggcaaggaggtcctgcgccagacggagcagatgagccgcctgctgctggatatcgcccacgagctgaagacgacgccgaaggagctcatgcagcgcgcccacgccatggtcggcgaggtcaaggagctcaagcagcgtctggacgccatgaaggacaagctgttcagcggcgagatcgaccgctgcctgtttgcggcgcgtgaggtcggaggcctgaaggtcctgaccgtcatgcgcaatgacatcgcgccgaacgacctgcgcaagatgggcgaccagatccgtgaccgtgagccggacgccgtagccgtgctggccagcacgcagggcgaaaagatcacgctgcttgccgtctgcggcaagaacgcggtcggccgcggcatcaaggccggtcagctcatcaaagaggtttccgcagcctgcggcggctccggcggcggcaagcccgattccgccatgggcggcggccgcgacctgctgaagctggacgacgcgctggcgggcgtggatgattttgtcaccgcgcatctggcgtaaatttgggaggaaaatgatgaacgactgcattttctgccgcattttggcaggcgagatcccctcgaagaagctgtatgaggacgaacagtgcctggcgttttatgacatccagccgctggcaccgcagcatttccttgttattccgaaggcccacatcgcctcggccgcagagctgggcgaggagcaggccgcgctcgtcggtcacatcttcgccgtcattgcgaagctcacgaaggagctcggctttgccgacggcttccgtgtcgtgacgaactgcggcgaggacgccggtcagaccgtaaagcacctgcatttccatgtgctcggcggcaagacgcttgggtccttcaactgataagagaccagaatacctcacctggggcgggcaatagcccgccccggttttttcggcggaagggagggcggaccatgcgcattctcgcgatgttctccgcggcgtttgcggcggcagccgcgctgtgcgcctatgcgctcccggctgcgtggtgctggctgcccggtctgtgcctcgcggcccttgctgccgtgctcctgttcctgcacggtgacccggtccggcgcgtgcgcacgatcgccctcggccttgcggccgggtttctctggtgctgggcggatgccgggcggctcgtgcccgtccgcgccctctgcggcgaggggcagaccatcgaggccgaggtctgcagcttgccggaaaggacacaatacggctaccgctgcgttaccctgctgcaggggaaccgtatgcagttctatctccgcaatgcgccggaggatgccgcccttggcgaccgcgtgcgcgtcacggcggatgtgacggagacagggaattccctgtatctggcgtccaatgacattctcctgctcggctttgcccgcggcgaggccgaatgggagcatccggagcaggtgtcgctgcgctatgctccgcagcgggctttgctgaccgtgcagcgcacgatcacgaattgctttccggccgatactgcgccgcttgccatcgctctggtgacgggcgacacgtccggcctgccctatgctctgcagacggccatgtccgatgcgggcatctcccacatcgtggcggtctccggcatgcatgtgacgctgctgctcggcgtggtgcgcctgctgtgtctgcggcgcaggcggctgacggcgggcgtcggcattacggtgatggtcttctttgctgccatgctgggctttcggccctccgtcacgcgcgccgtggtcatgaacgccgtgctgctgctcgcgccgctgctcgggcgggagaacgacgggccgacgtccctatgcttcgccctgcttctgctgctcctgccgaatccgcgcgccattgcaaacgtcggcctgcagttgtcgtttgccgccgtggcgggtctgcagctgttttccggcggcctgacgggctggctggagggcctgctgcgtgtcgcggccctgcgggagcgccatccgctcccggcgcggctgctgcgcggaatttcggcctcgcttgccgcgacactcagcgcactgacgtttacgctgccgctggccgcgtggtatttccggtcgatctcactggccgctccgctgacgaatctgctggccctgccgctgttcagccttgcgttctcgctcgggtgcgtcacggccgtgctgggccttgtgtggctgccgctcgggcgcattgcggcttggccagcagcgtggctgctccggctggcgcgcggcatcgtcaccacggcggcgggacttccctatgcggccgtctatctcaaccggaccctcctgtgcgtctggttcgccgctgcggttgggatgtttgcggtctttctggcccagcggcgcaggcagcccggcgtgtttgcggcctgccttgccgtgacgctgacggcagcgatcctcggcgcggccctgtgggagacggaccccgtctccatgacggcgctggacgtcgggcagggcgcctgcaccgttctgcggggcggcggtgcgacatttgtggtggactgcggcggcgagggcggagaggctgccggcgaaacggccgcgcgcgagctgcgcatgggcggtgaaacgtccatcgacggcctcattctgacgcatctggatgcggaccactgcaacggggccgcgcagctcatggcgcgggtgcaggtaaggcggctgttcctgccggagcaggagagcgacagccgcgaggcgatcctgactgcggcggagcgctgcggcacggagatcgtctttgtcacggaggacctgacgcttgatttttccggcggcagcctgcagctgtttgcgccggtcctgcccggctcgcgcaattgcggccttgccgcattgatgtccgcgggagaatatgatatactgatcccgggcgatatgccggccgccgcggagcgcgtgctggccgatacgcacagcctgccgcaggtggaggtgctcgttgtcgggcaccacggcgcggccggttccaccgcgccggagctgctgcaggccgtttcgccggagatcgcagtcatttccgtgggcgcggacaattcctacggccatcccgcgcaggccgtgctcgaccgcctgacggaagcgggcgcggccgtataccgcacggatcaggcgggcgatattacgatcacgaggtaaggctatggcaaaaaaagcggaatccggcggctatgcgcgcctgaagggcgatctggcgcagaagacgcccggcagcttctatgtgctctatggcgaggaggactatcttcgccgctactatctttccatgctgcgcaggcagctcgtcgacgggccgacggaggacttcaacttccaccgcctgacatcggagaatttttcgatgcaggtcctctcggagagcctcgaggccctgccgatgatggcggagcgcacgatgatccaggtcgacgacgtcgatctgttcgccctgccggaggacgaccgtacacagctggcggcgctgttttccgacatcccggactatgcctgccttgtactcgtctatgcggacttcaagccggacaagcggaagaaaaagctctgggacgccatggagaaaaacgccgtgctggcggagttcgcctaccagaccgagcgcgacctcacggcgtggatcgtgcggcacttccgcgcggagaaaaagaatatttcgcccgcgctctgcggctacctgctgcagcgctgcggctcgtccatgacacggctcgatgccgagatcgcaaagatctgcgcctattccggcgcggacgacattgtccgcgcggacatcgacgccgttgtggagccgacgctcgaggcggtcgtttttgagatcaccgacgcgctgggccagcgggagtttgaccgcgcactcgagcgcctgagcatcatgctcaagctgcgggccgagcccatcgccatgctcggcgcggtcggcagccatatgcgcaggctccatgccgcgcgcatcctgcaggcggccgggaagacctcgcaggaccttgcctcgctctgcggcgtcgcgccgtttgcggccaacaagtgctttgcgcaggcgcggcggctgtcggaccgcttctgtgcgcaggccgtgctgctgtgctgcgaggccgaccggcagatgaagacgtcctatgacgacccggcgcggattctggagcttctgatcctgcagctcgccgaggaggcccgccatgattaagctgcggcaggccatcgtcgtcgaggggcgctatgacaaaaatgccctgtgccagctcgtcgatgcgcccgtcatcgagacgcatggcttcggcgtgatgaaggacaggcggctgctcggatttctgcggcaggtcgccgcggcacggggcctcattattttaacggattccgacggcgcgggcttcgtcatccgcaattttctcaagggcgcgctgccgccggagcaggtgctgcacgcctatatccccgatgtgccgggcaaggagcgccgcaagcgcgcccccggcaaggagggcaagctcggcgtggagggcatgccgccggaggtgctgctcgaggcactgcggcgggcgggcgcgcaggcggaggattcgccggagccgccggaccccatcacaaaaacggacctgtatctcgccgggctttccggcggcgcggacagcgcggcgcgccgccgcacgctgcagcaggagcttggcctgccggagcatctcggcagcgcggggctgctgcaggcgctgaatctgctgatgacgcgcgaagaatttcaacaccgctatggagaactgcgatgatcgatatttcggtaaacgagctggtcaagtcctttgaggtcggccagaccctgctggacggactgagctttgacattcacgagggcgaatgcgtcggcatcatgggccgcaacggctgcggcaagacgacgctgttccgcctgctgacgggggagctgtcccccgattccggcgagatccatatcgccgctgggaagaagctgggcctcatctcccagatcccggtctatccggccggattttccgttgaggatgtgctgcgcacggcctttgctgcgctggcctctctgaagcgccggatggaggaactggaaaaaacgctcgaaaaggatgcttcccgagcgaatctgagcgaatatgaccgcctgagcaacgcctatctgacgggcggcggctatgagcaggacacggaagtcgacaaggtctgcaacggccttggcatcccggccgaaatgcgcggccgcgaatttgaccgcctgtccggcggcgaaaagacgcgcgtgaatctggcgcgcctgctgctcgagaagacggacatcctgctgctcgacgagccgacgaaccatctggacctgcgcagcgtggagtggctggaggactacatccggcacttcaagggcacggtcctgacgatctcgcacgaccgttatttcctcgatcaggtcgtgcagcgcatcattgaaatatccgcgggcaaggccgagttctacagcggcaactacagcttctacctcgaggaaaagcaggagcgcttcaaccatcagctccggcagtatgagcaggagcaggccaagctcaagcagctcggcgtcaccgtcgagcgcatgaagggctggggcatcaacaaccgcgtgctctaccgccgcgccatgtccatccagcaccgcatggagcgcatcgagaagacggagcggccgaccaaggagaagacgctccgcgcccgcttcggcgaaaaggagttccacggcgacgaagtcctcaccgtcaagaatctcagcaagcagttcggcggtcggacgctgttttccggcgtggagctgacggtgcggggcggcgagcgcattgcgctgctcggcgacaacggcaccggcaagacgacgttcctgcgcgtgctgctcggcgagctgcccgcggagggaaagatcaagttcggcccgtccgtcaagtcgggctatctgccgcaggtcatccactttgcccacccggagcgcacgctctatgacacgatgctctatgagaagaactgcacgccccagacggcgcgcgaccgcctcggcgcattcctgttctccggcgaggacgtgttcaagaccgtcggcacgctctccggcggcgagcagtcgcggctgcggctgtgcatgctcatggatgaaaaaatcaatctgctcgtgctcgacgagccgacgaaccatctggacgtcgcctcgcgcgaatggatcgaatgcgccctcgaggactacgagggcacgctgatcttcgtctcgcacgaccgctatttcgtcgataaattcgccacccgtatctgggagctttcagacgggaccatccgcgacttcccgtgcggctatgccaaataccgcgccattctggagcacgaggcggctgcccgtcagcggcccgcccagccgaagaaggagaagcaggccaagccggtctccggcagcaaggagctggaaaagctcgtccgcaggctcgagcgggagatcgctgcgaaggaggacgaggcggcgcagctcgagcaggcgctggccggagctgcgagcgactatcaggagctgctgcgcctgacggcgggaaaggagcgctgcgaggcggagctggaggacctgatggcccgctgggaggagaccgcgcaggcgctggagcaggggtgaggcctgcacgccggatttcttaatggattgttcatgaattctgcggctttcggacttgtgtccggaggccgcagcggctataatataccatgactatatcggctccgtacaccccggagcggtcaaaaggagatttttgcatcatgagtgaaacctgcggaggcaattgctcgagctgcggtgaagcctgctcggagcgcaagccggagagcctgcaagcgcagcccaatccaaagtccaagatcggcaaggtcatcgccgtcgtgtccggtaagggcggcgtcggcaagagcaccgtttctgccatgctggcaacggccatgcagcgtaccggccgccgtgccggtgtgctggacgccgatatcaccggcccgtccatcccgaaggcctttggcgtcagcgaatgcgccagcgcggatgaggagggcatttaccctgccgtgacggaaagcggcatccagatcatgtccgtgaatctgctgctcgagcacgaggacgaccctgttctctggcgcggccccatcattgcgggcgcggtgaagcagttctggacggacgtcgtgtgggaaaatgtcgactatctgttcgtcgacatgcctcccggaacgggcgacgtgcccctgacggtcttccaatccctgccggtggacggcattgtgatcgtcacctcgccgcaggagcttgtctccatgatcgtggccaaggccgtgcgcatggccgagatgatgcatgtgcccgtcatcggccttgtggagaactacagctatttccgctgcccggactgcggcaagtgccatcagatcttcggcaagagtcatctggacgagacggcgcaggcctatcatctgccggtgctcgcgcgcctgcccatcgaccccgccgtggcggaggcctgcgatgcgggccgtgttgaatcgctcgacacgacggagctcgagcctgccctgcaggccatcctcgcgcgctgaggcaccttttccacggaattattttccgatacaagggaacgaacggcgcaccggcgccgtctatatagaggaaacagtccggcgaaaaaccagagggactttttcggctggctgagaggaagcgccattgcggcgcagaaacggaggatctacgatgaagaaacgaatgctttgctgcctgcttgcgctggtacttgcggtcgggctgctgtctgcctgcggctccgtgaaagcggcggtttatgtgcagtctgtggcggcgcttacgggctatggctcactcggcggcgcgaatgccagcgccggtatcgttgtggcgcagaaggagatcaaggtcgaacgcgattccagccggaagatcaagcagctcaatgtcggggtcggccaggaggtcaagaccggcgaggtcctgttcacctatgatatggaggacatgcagctcaccatcgacaaggccaaacttgagattgagcagatgaagaacaacgtcaaggatctgacgtcccagatctcccagctcgagaaggaaaagaagagcgcgcccacctcggagcagctctcctacaccgtgcagatccaggcacttgaggccgacaagaaggaagcggagtataatatcaccgtcaagcagaaggagctcgattccatgacctccggctccggcaccgcgaatgtgacggctcctgtggacggcaaggtgcaggccatcaacgagaacggcacggacagcagcggcaatgccgcagcctacatcacgctggtgcaggacggcgcttaccgcgtcaagggcaagatcaacgagctgaaccgcagcgacatcgccgtcggcgttcccgttgtcatccgctcccgcgtggacgattccgtctggtccggcaccatcacggagatcgatacggaaaacccgagctccagcaacgccggcttttcctatggctacggctattccaattccgatgatacgagcagctccagcaactatccgttctatgtcgagctcaacagcacggacggcctgatgctcggtcagcacgtctatatcgagccgtcggacggcggcacagtctccgacaccatgaagctcgacgcctcattcctgcagggctctgcggaggagggcttctgggtctgggccgagaaggacggcaagctcgagaagcgcaccgtcaccgtcggcacgttcgacgagacctacaatacctatgagatcctcgacggccttgcggcggaggactacatcgccttccccgaggacggcatggaggagggcgacccgacgacgcacaccatgccgacggaggatccgagcgcagagccgagcgacggcgtcgatgacagcggcatgatcgacaacggcggcatcgacgacggctatgtggacagcggcgctatcggcgacagcgcggacactggcctcatcgagggcggcgaagaggagtctgcaggcagcgaggacggcgagtcttctcagacgggaggagtcacctatgctcgttgaaatgaaggatatctgcaaggattatccgcagggcaaggagaccgtccgcattctgaaaaacatcaacctgcaggtcgaggagggcgactatctcgccatcatgggcccgtccggctccggcaagacgacgctcatgaatctcatcggctgccttgacgtaccgacgagcggcgaatacctgctgacgggcgagaatgtcaccaaggccaacgaaaaccagctggcggagatccgcaaccgcctgctcggctttgtgttccagagcttctatctgctgccgaagctctcggctgtggataatgtcgccctgccgctgctgtacgccggtgtgaacaagaaggagcgccgcgagcgcgccattgaggcgctgcagatgatgggcctcggtcagcggctgaatttccgcccgaaccagctctccggcggtcagtgccagcgcgtcgccattgcgcgtgccatcgtgggccgtccgaagctgctgctggcggacgagccgaccggcgcgctggattctgcggcgggcaaccagatcatggatattttcgatgcgctgaacgacaccggctctacgatcatcatgatcacgcatgagcaggagatcgccgagcgcgcaaagcggatcaattatatccgcgacggcatcctgtcagacggcagaagggacggtgagagccttgcataagaaaaagagtgtcaaagcgatcgtaatttcgggcgtcagcctgctgcttgccgcggcgatcgtcgtgggcgtgctgtggtaccttgggcatcgcagcgaccccgtcaaggtcgcgcccgtgtccatgcttatgggctggctttcgaacgagagtacgcagtccggcaacgtgacagcggataacctgcagaagatctatgcctccgatacgcagaccgtcacagccctgctcgtgcaggagggtcagaccgtcaagaagggcgatccgctgttccgctatgacaccacgctctccgacattcaggtcgagcggcaggagatcgcagtcaagcaggacgacctgaacctcaacaaggccaaaaaagaccttgccaacatcaaccgcctgcgcccctatgtgccgacgcagccgacggatccccccacggagccgacggagccggagccgacggacgagccgacccagccgcctgagccgacggagccgaccgttcccattgccccggaggagctgccctatctcatgggcggcgagggcacgcaggcctctccgctgttctacctctgcgcggcggatatgcagtacgatcagtcctattttgaagagctcctcggcgaaaaaacggagctgtgggtcgtgttccaggtgcgcgagggcaatgccctgcacgccgagctgctcagtgagcttccgctgaagcttacgcgcgacgaggaaacgcagtccatccgtttcacggtgttcattcccgagcaggacgacgtgaaggaggagaacaagaccctgcgggcagctgcggcggatgtctctgccagcccggatgtcacggtcgtcgactatgacggcgaatacactgcggcggagatcgcaaagatgcgcgccgagaagcagaaggaaatccgcgaccttgacctgaagctccgcatggacaaggtcgagctggagcgcatgaagcaggaggcggcgaacggcgtcgtaacgtccgcgctggacggcacggtgctccgcgtgaatgaccccgacacagccaagcaggagggaagccccgtcgtgatcgtctcgggcggcggcggttattacgtcaagaccggcgtgacggagcttgaccgcgataaatatccggtcggcacccagatgcgcatccagtcgtgggagcacggcgaggtctacggtacggtggcggagatctccgataccccggtgccctcctccaataatccctattactcgtccggcaaccagaacgtcagcttctacaccatgctcattgcgctcgatgcggacagcccgctgcgcgaggacgagtgggtcgacgtctactttaacgctgcgtcgacgaccagcgaggatgccttgtgcattgagacacgcttcatccggcaggatgacggcggaagctatgtctatcgccgcggtgaggatcagctcctgcacaagcagtatgtcacgacgggcgtcgtgcagtggggctatacggagatcaaaagcggcctgacggccgacgactggatcgccttcccctacgggaaggatgtgaaggagaacgcagagaccattgagagcgacaactcggatgatttctactactacggcagctattaacgggaggcgagagcatgtttgaaaatatccagcttgcatttcagggcgttttcggccataagctccgctcgttcctgacgatgctcggcatcatcatcggtatcgcttccatcatcacgatcatctcgaccatcaagggcacgaatgagcagatcaagcagaatctcatcggttccggcagcaatatcgtcaatgtccagctctatcagaatgactgggccgtcgacatgtcctatcagacgccggacggcatccgcgtcctgcaggacgggcagcgcgatgagatgattgccctcgacggcgtggcagatgtgacgctctaccgcagccgcgagaatgttgagggcttctattaccgcaacacgggcttcagcggcaagctctacggcgtggacgatcactatttctccgtctacggctatgaggtccgcagcggccgcggctttacggcccgcgactttgcctcggccagtaagaacgtcatcctcgatgagacggcggccaagacgctctttagctcggacgatcccatcggtaagatcgtggagatctccggcgagccgttcacggtcgtcggcgtggtgagccagaaatccagcttcgagccgaggatcaactccgtgaaggactatgcgatgtatgtgcaggagtccagcggcctggcctttgtgccgacgtccgtctggccggtgctctaccgcttcgacgagccgcagaacgtggccgtccgcgccacgtcgaccgacaccatgaccgacgcgggcaaggctgtcgcggactatctgacgagccatcagatcatcgccagcaaagccacgggcgacaacagctattcctaccgcagcgacgatctgctcaagcaggcccagcagctgcaggaaatgagcagcgcgacgaacaaccagctcatctggatcgccagcatctccctgctcgttggcggtgtgggcgttatgaacatcatgctcgtgaccgtcacggagcgcacggcggagatcggcctgaaaaaggccatcggcgcaaagcgccgccgcattctggcacagttcctgacggaggcgtccgtgctgaccggtatcggcggcctgctcggcgtgctgggcggcatcggcatgtcgcagctcatctcgaagttcatggatacgccgacggcgctgagtgtccccgccattctcgtggcggtggtgttctccgtcctcatcggcctgatcttcggcctcgtcccggccgtgaaggcgtcgaagctcaaccccatcgaggctcttcgccgcgaataatgcgttttctcatgcagccgcccgaaaaccgggcggctgctttttcctattgcaatttgcgggccgttccgctacaatcataccgtgccgggcatcccggcgcgatatctgcaagagagggaacacgcatggagaaaaaagcggtctatcccgggtcgttcgacccgtttaccaacggccatatggacatcgtgcgcaaggcctcggccatttttgaccgggtctatatcgtcatggccgtcaattctgagaagcggcgcgcctttgactgccgccgcatgcaggaggccatggagcgcgcgctggcggacagcggcatccgtaactgcgaggtcagcatctacgacggcctcatcgccgagtatacgaagcatcacggcatcggctatatggtccgcggcctgcgcaacaacatggactacaactacgaggaaaacatcgccgaggtcaacaagctcatcgatccgtcgctggaatatgtctacttccgcgcggataacgtcgccgtgtcgtcctccatggtcaaggagctgcgccactacgggcaggatgtctcaagctatgtcccgcccgccatcgccgccctgctggcggatggaaatacggagcgctgatactagaatctgataaaaagctttaaaagctttttatagcgccgagggcgcgtcagattctgcatgagacggcgcagcgtgcgtcagcacgatgcgagtgtgcgtagcacacgggattcctgatgaaatgttttaatcaggaatcagtatgaggagttgcagcggctgtcgttaaaatggtaaacgctcacagcacccaaaccgccggccctgccggcggttttttacgcgcaaaaacggaaaaactgaaaaaagttctgcgctccatcttgacagaataccctgcaggggtatataatcaagataccccaatggggtatttgaaagaacgaggtgaccgtcatggaagaatgctgctgccagaagaccaaggtccgcacggacgaagaatacaagagcctgatgaaccggctgaaccggatcgagggccagatccgcggcctgaagggcatgctggagaaaaacgcctactgccctgacatcctgacgcaggcggctgccgccaacgcggcggtgaacgccttctgcaaggagctgctggccgaccatatccgcacctgtgtcgcggagaatatccgcgccgggaacgacgaggtgatcgacgagcttgtgcgcaccatgcagaagctcatgaagtgaagcgatcccggaaattcatcggaaaggatgggaacgatggaacaatatcaagtgaccggaatgagctgcgcggcctgcagtgcccgcgtggaaaaagcagtctccagggtgccgggtgtgacgtcgtgcagtgtgagcctgctgacgaactccatggccgttgagggaacggcggacgaagccgccattgtcgccgccgtgacggaggcgggctatggcgcaaagcgcaagggcgcggagccgtcggccgcccggccgtccgaggcactcgaggcgctggaggaccatgaaacgccgaagctgaagcaccgcctcatcgcctcggtcggctttttggtcgtgctgatgtacctctccatgggccacatgatgtggggctggccgctgccgggcttcctggcgggcaaccacgtcgccatgggccttaccgagatgctgctgacgatcatcatcatggtcatcaaccagcgcttcttcctcagcggcttccgcagcctgctgcaccgcgcgccgaatatggatacgcttgtggccctcggttccgccgctgccttcggctacagcacctatgcgctgtttgccatgacggccgcgcagctgcacggcgatgccgagctggtcatgcactatatggacgaattctattttgaatccgcagccatgatcctcacgctcatcaccgtcggcaaaatgctcgaggcccgctcaaagggcaagacgaccgacgccctcaagagcctgatgaagcttgccccgaagacggcgacggtcgtccgctccggtaaggagaccgtcgtgcccatcgggcaggtgcgcaccggcgacatttttgtcgtccgccccggcgagaccatcccggtggacggtgtcgtcgaggagggcagcagcgccgtgaacgaggccgcgctgaccggcgagagcatccctgtggataaggctgcgggcgacgccgtctctgctgccacgctgaaccagtccggcttcctgcgctgccgcgcctcgcgcgtcggcgaggatacgacgctctcgcagatcatccgcatggtcagcgacgcagccgcaacaaaggcccccattgcgaaggtggccgaccgcgtctccggtgtgttcgtcccggccgttatcagcattgcgcttgtcacgtttgttatctggatgcttgtcggccagaccgtgggctatgcgctggcgcgcgccatttccgtgctcgtcatcagctgcccatgcgccctcggccttgccacgccggtggccatcatggtcggcaacggcgttggcgcaagacacggcatcctgttcaagacggccgcttcgctggaatcggccgggcgcgtcgagatcgtcgcgctggataagaccggcaccatcacgcagggcgagccggaggtcacggacctgctgcccgcgccgggcgtgacggaggatgagctgctgcggctggccaatgcgctcgagcagcgcagcgagcatccgctggcccgtgccgtggtgcgccgcgcggccggaatggacgcgccggaggttacgaatttccgcgcgctgcccggcaacggcctgacggccgagctggatgggcagaagcttgcgggcggcagccttgcctttgcgcagagccttgccgcgatcccgcaggagacgcaggaccgtgctgcccggctggcagagcagggcaagacgccgctgtttttctgccgcagcggcaagctcctcggtgtgatcgccgtggcggacatcatcaagccggacagcccgcaggccgtccgggagctgcagggcatgggcatccgcgtcgtcatgctgacgggcgataacgagcgcacggcaaaggccatcggcgcgcaggccggtgtggacgaggtcatcgctggcgtcctgccggacggcaaggaggccgtgatccgccgcctgaaggagcagggcaaggtcgccatggtcggcgacggcatcaacgacgcccccgccctgacgcgtgcggacaccggcatcgccatcggcgcgggcacggacgtcgccatcgacgcggcggatgttgtgctcatgaagagccgtctactcgatgttccggctgccatccgcctgagccgcgccacgctgcgcaatatccacgagaacctgttctgggcatttttctacaacgtcatcggcatcccgcttgctgccggtgcgtggatccacctgctcggctgggagatgaacccgatgttcggcgcggcggcgatgagcctttcgagcttctgcgtcgtgacgaacgccctgcgcctgaacctgttccacatccgcagcacgaagcacgaccacaagcggaagaaccatgcaaagcagaccgttgcaaaaacggctgaagatcataaggaaaacaaggaggaaacatccatggaaaagacaatgaagatcgaaggtatgatgtgcggtcactgcgaggcccgcgtgaagaagtgcctcgaggccctgccgggcgtggaaaaggccgaggtcagtcatgtcagcggcacggccgtcctgacgctgtccgcaccggtcgacgacgcgctcctgaagaagaccgtcgaggatcagggctatcgggtcatctgaatccggaaaaatactgccgcaggggtttgctcctgcggcagtattttttgtggcgcaatgccaccggatttgtcattgcgaggaggccgaagaccgatgtggcgccctgagcgcgaagcgcgaggaagtgcccttggggtgcaatctcgcagtacccgattggatgacgggcaggctgttgcgagagattcccacgtcgctgcgcgcctcggaatgacaagcctgtttaccttgcgccgttgaatcactgctgcgatacctgcaactgccttaggcgcttactaagcgccgctacagacgcaatcggtgcataccatttcaacggcagccattacgaagcggtagagacggcacgagattgccacgggcgcaaagcgccctcgcaatgacaaatctggaagccttgcgccgttgaatc

SEQ ID NO: 11124 - DNA, 58025 bp, Unknown
  gut microbiota DNA sequence
cttgcaccactgaagttatgccgcaaacgctgcctgtctccacggggtcaccgcccggaaagggcacgccgctgcagtcagatttgagccagctgcaggagcatcacatcaaaatcaatgtcctgcccgccgatgcggaagaaggccgggaaggtgcacagcttccggaagccgaatttttcatacagccggatggcgcggacattgtcactgcgcacctcgatatcgagctgggcaaagccgttttcccgcgcaaaggtaaggacggcctccgtcagggccgaggccgcaccgcagccccaccacgcccgcttcaggctgatgccgaacacgccgcggtggcgcatccggccgggcttgcggttcaggctggccgtgccgatgagctcgctgtccaccctggcaagatactgcacatggtccggcgaatcgacctgtgtgcgcagataggcctgctcctcctccggcgcaagcggcacgccctctgcgccgaagctgaggttgtccgtctcgccgcccacgatcttcaggtagtccagcagcgccgcggcatcctccggccgggctcgcgtgatcgtaaatgcgttcttcttttccatgcttcttctcctttccgatcatacggcgggaggtctcccgccagaatgcagctcgtcaaaaagtctttacggaccttttttgacagtccaagaattctccgcgcggtctcagagcacgagccgcgcgatctccatggtggcgatcttcaggaccgcgccgccggacatcacatagaaccagagctcccgcattttctgcgttctggcgatcggtgtggcgatcgcggcgacgacgatcagcagcgcaccggcacagccgacgacggtcggaacgctgacgagcggaaacacgcccggtgcgcagctgccgtcgatggtgtgctggatggtcttgtccagcccgtcccgcgccgccgcaaagcagcagacgaccagaccgaacaccagcaggagcagcgttctcctgccccagcaggcgatattgccgcggttccagacggaaacgccgatgtagcccagcagagtaaggatcatcagtgtcgttgccgtcgtgacggcgtttccaaaatacagcttcatggtaaattccccctttctctcattgcgctcttgacgtttcggcggcgacggccgccagcaggacgcccatggatacccacggcgctgccgcgcataacgcgcagtgctgcggtgctcgtgggataacgaattgcgttcataaaatcttcctctcaaaaaacagacgcagcgcatgatcggaaccgcgatcagcactgcgtctttgcgtctggctgtttatgtaaccgttcggttactttctattatagggactgtcggcccctttgtcaaggcctttttccgatttttctatgtgccgcatacaaagtgccccgggagaacccggggcactcgttcgctgcttatgcgtaatttgcttcaggcgttctgcagcgccgcaaagcggaacaggatcgtcgccagctccgcgcgcgttgcaccggccttcggcgctagctccgctgcgctgcggccattgacaaggccctctgcaacggcccatgccatggcatcctgcgcaaatgcgctgaccgcgtcggcatcgccgtaggcgctcaggtcggcgcgcttctcggtattgctgccgagatagcccgcaaagcgatagagcatcatcgccatctgctcgcgcgtgagggaagcatccggatcaaacagtccgccgccgacaccgttaacgatgccgttctccgaggcccagatcaccgccgcgccataccagctgtcggcagacacgtccgtgaagctgctctcgcggcccgccatgtccggcgcgcccgccatacggtaaagcaccatgaccagcattgcgcgggtcgtctcgccgttcggctcgaacaggccgccgccgacgccgttcatcacgccgtttttcagcacccagtcaacgtactcgtgataccaaccattccggtcgagatccgtgtaggcttcgctcgggcaggtctctgccgtagtctcacgctgctcagtctcgccgcagcggccgcacttgcgctcttccagaccagtgtggaagcaatcggcttccttcaccgtcgtccagtcgccgtagtcgtggcccagagcagggatttcctcgcccttgctgtgcacctcgccgcagcgcgtgcagaccatgtcgcccgtgtagcccggctccgtgcaggtggcttccttcgcgccggtcagcttgtcgtcatggccaagcggctggcggatctcgctgatataggtgtagtcgcagtgcttgcagtgattctccgtgtagccgtagccctcgcaggtcggggcgactaccgtcgcctcgcagtcatggcccgtagcatccacgaaatcagccttgtagctgtcgccgcaggcagagcaggtataggtcgtgtagcccatatgcgtgcagtccggatccgtcctgaccgcctcatagctgtgggcgatcatcgggatggactcggtatagctcttgccgcagttcgtgcaggtgaaggtacgaacgccctcctccgtgcaggtcggctgcttcgtcacctcgctcgtgtagctgtgatccgctgcctgcgtatagctgtcgacgtagctgttgccgcagcgcgtgcaggtatgcgtcgtatagcccatggcgtcgcaggtcggagctgtcacaacggcctgataatcatggccaagtgcctcggtcatggtatcgacatagctgctgccgcagacggagcaggtgtgcgtcgtgtagccgcccttttcgcaggtcggggccgtcacgacgtccacatagctgtggcccgtggccgggagcatcgcgtcgacatagctgtcgccgcagacggagcaggtatgcgtcgtgtaaccggcggactcacaggtcggagccgtcacgacgtccacatagctgtggccctttgctgccacatagttcgtgcggtagctgaggccgcagcgcgcgcaggcagactcggtatagccgtccttctcgcaggtcggctccacgaccgtcacggtcagatcgtggccgagcggctcaccgaccttgaccgtcagcgtattgctgaccgcatcgcagtggtcacacttgacatagtagaccgcggcttcggtgcaggtagcttccgacttgatgacatcagaggcagtgttcgcgaaggtatgctccgcgtcggcctgccacaggaggatcggatgtttcgtcgcggtgcagccgctcgtgaaggcagcctctgccagatcggcgttcatcgtggaaacgaactccgcgttcgcaatttcctctgcggtcctgacagcggcagtctgggtctcggcatttttcacggcgccgatgccgcccttttcacaggtgccctcgaggtagtagaggtttttgatgacggcatctgcgctgctcaccgtgccaatgacagagccataggtaaaggttgtgttgcaggtgaccgtgccgaggttgaagcagctgaggacctcggagttcgcgcagtagccgacgataccggcgggatagttgccgccggccttgatcgtaccggtgttgtagcaggccgtgaccttacagccgttcggcagattggaaacaatgcccgctgcgcaggtgctgggtgcggtgatgctgccggtgttgacgcagccggtgatggtactgggctggctgccgctggaaatgttgccaacgatacctgcgcagtagcgccagccggtgacattgccgctgttggaacagttggtaacattcaggctgtagtaagcaccgccgacaacgccgccgacgctctgccagtagttaccggccgtgcgcttgatggaaacatcgacattcgaatggagattcgtcaggtcggcatagtccgcacggccaacgataccgccgacgtaagcatcgttaacaggcttgttggaaccggcgacaacggtgccgttgaccgtcaggttctcaatcttcgcgcggttggtggcgttggcgccggagacccagccgaacaggccgcgatagagcgatatcggggtcttgctgctgtagttgatggaaagatgatcaatggtgtgattccggccgttgaaggtaccggcaaacttcttagaagcggtgccgatgggcgtccactcgtaaccggcgaggtcgatatcggccgtcaggatgccggagagcttggcgctgccgccgttgaccttctgggcgaaccatgccagctctgcgccggtgccgatgaggtaaacgccgttttcgtcggtggcaggttccgtggtggtcttgccgtcccaagcgttctcggccgccttgcggacggtgaacttgatggtcaggacgccgttttcgacctttgctgcgtcagcagagccgagcttgaaggagccggtggtgcggacatagccgagctgctcgacggcgtaggaatacgggccatagccgagcttaaaggtgccgtcggcctcggcggtcactgccttgttgtcacggtcggtgaacgtgggggtgaggccgtcgatcgcgttgccgttttcgtccacggggacgagcttgacgttgtaggtgaccttcgtgttgacctcgacggaaacatctgccagacggctggcaacaaagctggtggtgaccgcggagaagttcgtgccgacgccggtgtcggtcatattgtacagcgtatcaaacgggctggcggcggagtacatgccgccggagatataaccgtcggtgaccataacggtcgttttgtctgagccttcggggaaggtgatgtctgtgggcatctccacggtgacggaggctctgtccatctgccagtactgagtcagctggcccttggactcctcttcctccgcgctgtagttcagatatagcaacgtggggttgaagataccggaaaccttatccatgccgcgatacaggccgtcgaaggagagcgtgaccttatcgccgggcatgatgggctcgccgtcattcgaggcattcttcacggtgacgctcatctgcgccacgcgcgccagacggtaggacgtgccggtggaatcggtcagcttcaggatgacggtgccgccgagcgtctttgccgtgcggaagggcaggagggaggcgtggaacatgccgttctcgtccgccgtaagctccgtccagccggacagggtgctgttcagggcagcgtcggtggtgacgacggcgtagctggccgtcgcgcccttggtggtagtaaagtccagcgtgggggcttcgtcggtgtcaaggtagtaccacgtgtcgtagttgtagtcccactccgcaccgcgggggctggtcgtgccgccgttaaagcggatgacggcgtcagccttgccggctgccttgttcgtgataacgaacacaccggtgcgctcgggggcggttgccgggaagagaccgccgtgggttccggcaacgtccttgtcgttgtacaggtcgatggcgtcgtaggtgacggccacgatgtccgtgccggtgggcgtcacgtcgagccagttgcctacggcgttgccgccgctgacctgcgtaacgtccgccggattgccctgcagcacctgaatgttgaagctcggctcgaccatgatgttgcctgcatcgttattgattagctcccacatacggtacgcgcggatgcggtaggtgtcgctcacgctcataaagccgctgtggctcaggaagacctgcaggtcggcttcgtcgcgggaggataccgtcgtgccgaggtccttgaagctgtgagacttcctgtcggtcggcgcgccggagtcaaaggtgatcgtcttttccgtcttttggttgaggctggacagccagccggccttggtcacataggtaccggtctcatcgaccagacgccatgtgtagttgttgttgcgctcagaaacgcggtaggaataggtggtcatgccggtcgcgtcgtccttcgcagtcttgtacggctcgaccgctctggtgttgaagttgttgtactggaagaacagggtgaactccgccgtcgtgggcgcagtgatatccagctccacggcgttggcgatcgtgatgttcttcgttacgacgttgtaggaaggcgccgtggtctggttgatctgctgattgaacatatacttttccgtgttcgtcggataagcatagatgttgtacagcgaagcgttctgcgcctcccacgacaggaaggggaaggcagtgtagtcgctgccgtagcgggtgtaggtatagtgtgtaccggagtggatcatgctgccggtaacgggcatgatcatctcgacatggtagtcgtccgtgccgaagtactcgttcttctcgttcctggtcgtagcatagacgctgacaacgccgagatggatgtcgttgccgccgccgccgtagatgtccttctccatcggcagaggcaggctctgaccgccaagatagatgtcataggcctcggtcgcagtgttccagccgtagccgcgcgtggagtagcggccggtgctcagggtggcgtagaacatgttgtaattgttcacgaccgtgttgctggccgtcgccgtttcgtcggctgcgtcaaaggcgctgttggtgaaccggacctcctcgtagtcgtgcagctcgtactttgtgccgtcgacctcgacatagtccttctcttcgccgtcgatgatggtgtaatcggcggggttgtagacgtacacggtcttgccctcggcatcggtaaaccagccgacatagtcaaactgattttcgtcgatgcccgcggtcttgtacatcttgaggatcgggtacctattgccgtttgtgctgtagttctggtcacggccgacgtagaagttgatattcgcttcgacgacatcgacgaaggtcagcgtcagcgtccaggtatcggcagagtagccggcgtcgttctttgcgcggaacttatagatatatgtgcctgccttgctctggaccaggctcttgttcacgccgccgaacattgcttcctcaaagtgctgctccccgctccacgtcgcaccgccatcggaggacatggtgtagaagtagttcttgtaggtcagcgtgccgtttttcacgccgaagatcttgccgtccatcagatcgtcgagctgatagctcttgccggtctgaacttccgcagcggcatcggtcacaccgtcgagcagatagggcgctgcaggatccttcgcgccgcagacggtgcagacgccgtctttatactgatgtgcgcgggcctcctgccataccagcagcggatagccgccgcagccggtattctccttgaagctgctgccgagcgtcggtgccagcgccttcagctcctctgcggtcttcgccgtggcgttctcgtcgccaatcgcggaagcgctgccgaggtaatacacattggagacctgatccgcactgccgacagccgcgccgatcgcgccgctggccgcggctgtcgtgaccttgccggtcgtgtaggcatttgtcagcgcagatttctccatgacgccgatcagaccgcccatgagcgtcttttcggtggtcacatcgccggtgctgtaggcattggtgatagtcgcctgcttggcatagcccatcagaccgccgacataggtaccggtcgccgtgatcctgccagtgttatagcagccggtcatcgtgccggaatagagctcatagcacaggccgccgaggttgttcacgccggtgacatcgccttcattgccgcagttcgtcacagtcgtgtcgatcatgacaccggccagaccgcccacggaggctacattgccgaccttttcatcagcggtcacattcacgcgggaaatgacattggaaagctccgcattccgagcagagccgaccacgcctgcgacatagcccgaataaacggagaattcgcttgccgcgttcacgctgcccgtgaccgtcaggttctgaatgaccgcatgtttttcgggcgtgccctcgacctgaccaaacaggccgagatacagtctctcgccggaggccgccgtggcatagtccacatgcaggttggaaatggtgtggttcgcgccgtcaaggcttcccgcaaaagctacactgccattgccgatcggcgtccagatcacatcggtcagatcgatatccttcgccagaatggcagagatcgcattctcaccgccgttgaccttcctgacaaaccagacaagctcgtcggcattgccgatctgatacacgccgtccttctgcgcaggctccgcaggagccttgaccgtcacagcacactgtgcctttgcctcgccgcagctggccgtgatcgtggccgtaccggtctttccggcagtcacgacgccgttctgcacggaagcgacctctgcatccgtcgtcgtccaggcaatggtcggatccgtcgtatcctccggctggatcgcagcggtcagggccgccgtgtcgccggtatacaggttcagctcggtcttatccagcgttacagccgaggccatgaccgggggcgtgaccgtaacggcacattctgccttcacggtgccgcacgtcgcagtgatgacagtctcgccggccgccttcgccgtaacgatcccgttttccaccgttgcgacctcttccttcgaggagctccagacaatggtatccgtcgtgttctccggctggaccgtggccttcagggaagcggtctttcccgccgtcagcgtcagctccgtctggtccagcgtcacgccggtcgccggagtgacctcgcgggtcagctcgagatacagctcatacgtcgtgcccgccatgacatccataatgctcagataggcgaccttgctgttttccgcaggcgtgaagggcttttcatccttgtccgtcagcagggccgtttccagctccgcagccttcagggtgaagggattcgcgccagcctcgttgagataattgctcttcttgtccgtcacgagcaggaagctcgcatccgccacatggatcgtcacatcactgccgtagggcagcacggcacggtacttcgtcccatcctcgccgccaacgcgggaaagggggctggtcttgccgccgacgctgaccgtgagcgggctggccgtgaccgtgacggtgcactcggccttcacgctgccgcacgttgccgtaatgacggtgctgcccgcgccgaccgcagtcacaacaccgtccgcgaccgtagcgaccgcctcattcccggtcgtccaggtcaaggtatccgtggtgttttccggctgtgccgctgccgtcagaacggcagtttcgcccgtcatcagattcagcgtggtcttgtcgagcgtcacgccggtcgccgggacgaccgcagccgtcttttcaaagcggactgccacatcgtcataggcgaagtaggcgggctgcgagaagccatagccgttatcgctggagccggtcacattgaacgtgaccttcaggaccttaccaaggccggacaggtcccactttgtccagtccatcatgatgttcttcggaccgttgcagaggtagatgctggccgttccggtcttctcccctgccgcgttatagcccgttgcgaccagcttgacccaatcgtcgtcgccgatcttggcagtcagaccgttgccgtcgatgtagcagttgagcgcatagtccatgttgttgacatacatatggtcaatgacacgggcggtgccgtcggcaaaggttagggtcggcagggaggcctcggtcaggccatagccggaattatctgcatagccgtaatgcacggcaaagttattcgagccgttgtggccgccgccggtccgctccagaccggaaacgtcctttttataaacggtaagctgactctcgaagccgccgtacttgctgatctcaccggaaacatagttggaaacggcatgaccgccgctccagtagcaccaggagccatagccctcggacagggtgttgctgagccaggtattgttcttatccgtccacttgtaggcagcgtcgacggagtcgacaccggcgccgctctctccgtagagcatcttgccgccgtactgcgggctgtcaatgagactcgtccagttgtttccgcctgcgaagttcgttccgcccttatagtcggcatcctcgaacgtgaggacgcgcagctcatagtcgggctctgctgcgaacgcactgacgggcagcagcgagcagaccatcacaatggccagcacgagcgccagcaggcgctttccgcacgctgcgggtttcgtttgcataagcgatctctccttttactgataatgtgtatcggcagccgccggagcggcagaagcagggttcagccccgccacagctgagctgcagggggcgctttgttttcccttcggaaaacaaaaaaacggctgaagggatagcatacctatcccctcaaccgattcgggctatggaaatctcccagtaggtcttctgagttgcgcctccggcggagcatccgccacgtctgctgccctgccttctcagtttcccaatgaccggctttcgccgacggacagcagcctcagcgctcacagcgacggtcatccagaaggcagctgccttctcggggtactatccccattcccttgtttaccaacgcgcctgacggatcctccgccgttgcggccacgcggtctctgcgagtcgtgtgattcaattttatggtccggcaccagccggaccatccttgattatatcgtcccggattcagaatgtcaatcgtattttatccgaaaaggcaaaactccccgcaccgttttcggcacggggagtcgctgcattgtagaattacttctcggcagccttatcctgctcgatgaggatgcgcagcgcaccgacggcgacctcgacgctcttcggcatctcggtataggccatgacggaggaggcgcggcagccgcggatggaagagatgacaaagatcgcggcagactccatctcagagctgatgacattgccgcggcgccatgcttcccagcgagccttcagccacggctcggcgggcatgttctccggctcgtgctggccgtagaaggaatccttggactgggtgatgccctcgataaagttgtagccgagctgcttggcggagtcggccagagccgcgacaacgtggcggtcggcgacggccgggtactcgatggggatgtagtgcttcgtcgtgccctcgtcgcggacggcagcggtgttgatgacgccgtcgagcgtcgggtcgaacgcgcggtcgcagacgcggccggccgtgccgacgcggatgaaggtgtccgcgccgcaggcgatcagctcttccaggcagatcgcggtggacgggcagcccatgccggtggagacgacggagacgggaacgccgttgagcgtgccggtccaggtcttatgctcgcggttgtgcgcgacgagctttgcatcatcaaaataggatgcgatcaggtccgtgcggaacggatcgccggggagcaggacatagcggccgatgtcgcccttgcccacgcgaacgtgataggtcttgccctcatctgtaaaaacagccatagtaatttacctccaattattatctcttgctcttatcatagggaacgccaatgacgccgggcgcattggagcgcttcgtggagaacgccagaacaatcagcgttgccacataggggagcatcttgaagaaggcctccgggatgccgaggttatacaggaacgggataacggaatacgacgcggcaatggtcttcgtcaggccgaagaacagagcgccaagcgcgataccccacggcttccactggccgaacacgacgacggacatggcgaggaagccatagccgctgacgctggcggtgtaggtcgtggtcgtcggcaggatgaacacgaggccgccgagaccggccagagcgccggagatcaggacgccggcatagcgcatcttatagacgctgatgccgacactatcggctgcctgcgggttttcgccgcagctgcgcaggcgcaggccgaagcgggtgcgcttgaggatgaaggccgtgacgatcaggacgaggatgccgagatacgtcgtgacataggccttctggaacaggatcgggccgaggaccgggatcttgctgagcagcgggacggcgtcgatacggaatgtgttgcggaagacgacctgctccgtgccgagcatgacgcgggcatagaagatgcagaacgccgtagcaaacgtgatgatggccgtcgagctgatggtctgctccgccttcaggtggatggaggcaaaggcgtgcagggcgctcaggagcataccggcaaggatcgagatcaggatcgcgatcagcagaacgagccatgagggcatggcggcacttgccgagcggatgaacatgatgcccgcgaacgcgccgaagaccatgatgccctcaagtgcgatgttcagaacgccgctgcgctcggagaacaggtcgccgaggccgacgagaagcagcgggacgaggaagatcagcgtctgctggcagataaagataaacagattcatttatttctccgctcctttcccggtgtggtgcacatccgtcctctggcgaagctgccatctgcggatgccttcgcggatgatgaaggagaatgcgctgaagtagacgatcacggaaacgatgatgtcgacgatctccgtcgtgaagccgtaggtctgcatgtagaagcctgagacctgcatatacgcgatgaaaataccggtgaatatgatgccgatcgggtggttcatggcaagcagggcgaccggaatgccgttcatgccctctgccgcctgcacgtcctcgaccttgatgtacttaccggcggaggaaaggtacagcagcgcaccgccgaggccgatgagagcaccggagatgagcatggcggtcatgatcatacgcttggcatcgacgccgaagccgatgctggcgtcgcggttcttgccgcaggccttcagctcgaagccgaaattcgtcttctccagcaggatgaacacgatgatggccacaacaataacgatgaagatgccgatattcgcggagctgtccgggaagagcttctccaggccggccgtcgggaggcggtgagccgccggcacggggcgggtctggttcttcacattgtcatagatcggggcgatcttgatgagatagttcacaagatacatgccgatgtagttcatcatgatcgtcgcaatgacgatattcacgcggcgataggcgtgcagcaggccggggagcagggcccacagggcgccgccgatcatgctggccagcagtggaacgatccatccgattgctccggggagattccagacgctggcagtatagacgccgcagaaagcgcccacgatgaactggccggcgccgccgatgttgaagatgcttgccttgaagccgaagccgacgccaaggccggtcatgatgatcggcacggcataatacagcacgttgccgaaggtcttcatgccgctgtagaagccgcccgtgatgagcgcactgaaggccgggaatgcattcgagggattcgtcgccagcaaaacaatgaggccgacgagcagaccggccagaatggccagaatggaggaaagcacgcccgcgtagtctctctggcggcgcggagcaaggggacttgtctgttttttcattttaccgctcctttccgcttgctgccggacatgtagaggcccagctcattgaccgtaacctcttccggacggacatcggcaacgatctcaccctcgtagaagacgatgatgcggtcgctgatgttcatgacctcttccaggtcgaacgaaacgaggagaacggccttgccagcgtcgcgctggcggagcaggttcttatggatgttctcgatcgcgccgacgtccaggccgcgtgtcggctgcatggcaagaatgacgttctcatccgagtcgatctcgcgggcgatgatcgccttctgctggttgccgccggacatgctgcgggccgtgctcttcgcgccctcgctgctgcggatatcgaactcttcgatgagctcctccgccagctcgcggcgcttatggaagcggatgaagccgtggttctggaattccttgcggaaatacttgcgcattgccagattttcttccagcgtattgtccaagatcaggccgtacttgtggcggtcctccggcacatgggccagtccgtgcacattgcggtagcggatgggggcatggctgacatcctcgccgttgagcaggatcttgccgctgttctgtttcagcaggccgacgatcacgcggacgagctcgctctggccgttgccttcgataccggccacgcagaggatctctcccttgtggacggagaacgagacctgattcagaatattcttgttcgggttgcgctccgacttgagcgttacattttcaagcgtcaggacagcatcgcctgcatgctcgggagccttctccagatggaagtcgatcttacggccgaccatcatttcggaaaggtcctcgacgctggcggtcgaaacgtcgcaggtgccgatgcacttgccgcggcgcaggaccgtgcagtagtccgaaactgccttgatctcattgagcttatgggtgataaagatgatcgccttgccctcgcgcttgaggttctgcatgatgatcatcagttcgtcgatctcctgcggcgtcaggacagccgtcggctcgtcgaagatcaggatgttgttgtccttgtagagcatcttcaggatctctactctctgctgcatacccacggtgatgtcagagactctggcatcgcagtcgatattcaggccatagcgctcgctcagggcaagcaccttcttgcgcgcttcctccatctgcaggacgccgtgctttgcggtctcgacgccgaggacgatgttctcgagcacggtgaagttctgcaccagcatgaagtgctgatgaaccatgccgatacccagcgcattggccgtgcgcggatttttgatctctgcctttttgccgttcacgaggatctcgccctcttccggctgataaaggccgaacaggacgctcatcagcgtcgatttaccggcgccgttctcgcccagaagggcgtgtatctcgccatagcggacgcgcagggtgatgtcgtcattcgcgacgatgccaggaaacaccttcgtgatgtgcagcagctcgatcgcatagttgtccataaaatgatccccctagttggtaaacccggcagggaaacgccacagcgctccctaccgggtccgccttatctcatagtcgtttactcgacgacctgaaccgtcacatactgcagggtcgctgcaacatcctcgatggtgaccgtgttgccatccgcatcgacatcgcggcggatgccggaggtaacgccgtccttgtcagccttcaggacttcgacgatggcatcatagtcagcctgcgtgaagttcttgaagcgggaggactccatgggaagaccaacagcgtcttcgttgatggtcagagtctcgctcgtgccgccggggaacgtgtcgttgtagtaagccttaatcgcgccgtagacagccggagtgagcatcttcatggcggaggtcaggcaggtctcggtgatctgggacatgtcggtatcaacgccgatggagacgcagtcgccgccggtggcctcgcaggccgcgaagacgttgtccgggccgccgcagccgaagatgcactcggtgccggactgataccatgcagcagccttcgcctggaagtcaggagagttgccgaaagcgccggtataggtgtacttcatctcaatggagccagcctcaaggccgagctccttggcagcgtattccgcgccgtccacgaagccgtagccgaaacgaacgacagcaggaacagccagagcgccgaagaagccgagcttgcgatagccttccttgacagcagcatagcccgccaggaagccggactgctcttccgcaaagaagatggagcaggtgttgtctgcgatgacggtgtcgtcatcaagggtcggggtggcgtcgaccagaacgaagtggacgtccggatacatggtctgagccttgtagatggcttcgccgaacaggaagcccggggtcacgacgagctttgcaccgttgttgacagcgccctcaatggcggagaggtagctctgcgtggactggtcgatcggggtgtagtaggtgtaggtcttgccgttctcttcggcgtactgcttcaggccttcccaggagaactggttgaagccgcggtcgtcgatagagttggcatcggtgatcagggccagctcagcctcgccgccggaaaccggagtggtagcttcgctgccctcagtgttggtcgtggtgtccttggtgttctcggtgttgtcattgccggagccggcgcaagcggccagggacaggaccatgacaagcgcgagaatcagacagaagattctctttttcatgttgcctcctaaatgtaatacatttttatactcagtccgcaagcggaccaaataccgttgttattcagcctgctgtcagactaaatgtcatgttattttgtggatcagggagccgctgattcaattctcaagagcggacggcgaggaatttttcgtcgagtcgaggtttggaaagtgcaggcgtactttgtgtacgtcaagctttccaaaccgatggatcggcggaaaagatccggcatccgccgcagaggatttattcaggggcgactttttaagcctggggtttggcaaagtagcccttattcgcagcggggaagccgccctccggcagcatctcacgcagggtgaactgcttataatcctccggtgtcctgccgtggatgaccaggaactcgtccgggtcgcagaactctgccatgacctgacggcacacgccgcacggggagcagtactcggtcagcgggccgcgcgggccgccgacgatggcgatggccgcaaactcgcgctcgccctcgctgaccgccttgaagaaggccgtgcgctcggcgcagttcgtagcgctgtagccggcgttttccacgttgcagccggtgtagatcttgccgctctttgtcaggagcgctgcgccgacgcagaaattggaataaggcgcataggcaaattctcttgccgcgatggccttatggataagctcagggatgttcatgttgtttcctccttcttaaatcccacgccaaggcggcggatgagcggccgccacatggcggcgaacacatcgcacagcttgccgcccagcagcagattgatgaacgtgccgacgccgatgtcaccgcccgtcagccaggtggtcagcagcatgaagccgcagtacacatacatcgccgtaccgtagctcttacggatgagctttgccacggtcaggatgagcatgtccatgggctgcacaccggcgtcgagctgtacataccagccgagcgcgatgcaggaaatcacaacaccgagggtgcaaagggcgatgcgtgcccacatcggcggcatggtcggaaaaatcttccccagcaggtcaaggtacaggttcagcagcggcccgaggccgaagccgatgacaagggagccgaggcccacaagggagcgattcgcgaagataaaaatcgcgagaacggtgcagttgaagatcagtgtgaccgttccggtctgcaggccaagcatgcggcccagcccctgctggaacgaggtgttcgtatcggagccgacgcccgagaacacgcacatggcgataccgagtgccaggacgatccaggccgggagcagcaggagcagctgccgcagcaggcgcttgccgttctcacaggtgaaaatggcggattttgcgttttgtttcatgcatacctcatgagccggatcggatcagagtttaccaattccgatgatttcgaaggaacaggcgctcggggaacagctgcacgtggtcgggtgaacggctccctcaatggctcgtacaagagaataccactttttttacgccgtgtcaatcgaaacgttttcacaaatatttccattgcgaattgtgcattctgacgatttttttcggctgatgtcgtcgcccggaatgcatatcgctcttaacagacgttttattttgttacataatagcgtaagaaagcgcacatcacaaatcatgcttgacagctgtagaatggcctgtataatagtattgtgtaaagacatgcttatttcgcggggtcaatctaaggttttgtttacgaacacatgattatttcaggtctttccgggagggatgcaccatgggccgccaaaagcgcgcttatcaatccgtgaccattcgcgacgttgccgagcgggccggtgtagcagtttcgactgtctcgcgcgtgctgaacgggctggaccgcgtcagcgaagaaacgcgccggcgtgtcgaacaggctgcccgcgagctgtcctatgtaccaaataatttcgccgcctccatggtcacggggcagtccaagatcctcggcattatcgtgccgagcttcacgcacgacttcttcggcttcatcgcacagacggcagagcatgtgttccgcaagcatggctatctcaccatcgtctctgccagcggcgaggacccggtcgcagaccccgccgccttcctgcagcgcttctaccacatgctcgacggcgtgctcctcgtgccgacggccgcgcgcctgaaggacctcgagtcctttgacaagccgctgctgctcgtcgaccgcgacatgccgggcagctcgttcagcagcatctcgtttgacaacgagcctgcctgctatgagctgacgcgccgcctgacggaaaagggccaccgccgcatcggtcttttggtgctcaacagccccatgaacatcggcgcggaccggctggcaggctgcctgcgcgccctgcgcgaggccggcgtggagcaggaccccgcactggtgcgctgctgcgcggcggctgccgtggacggctatacccagacgcggctgatgatgaccatgccggacccgccaacggccatcgtgtgctgcagcgaggaactctgcaccggcgcggtgcgcgcgtgcatggatctctctcttgtccccggccgtgatatctcgctcgtcagcttcgatgagctgattaccccgctggccccaacagccatcacctcggttttctccccgcgccgcaaaatggccaaggtcgcagcggagcgcctgctggaaatggtcgccaatccggcaaaacgcacaccgcgcaaggacgtcgtcgagacgatcatccacgagcagcacagcattgcgcagctttaagcgcactgcgttttatttttcaggaaggaaaatcatcgatcatgagcgaatatcaaccggcaaatcttgaaaatctctttgtcaagcgcgcaggcaagcgcatgcgcgtcgcctcctgcgacccgacgggcggcaataacgacaatgtcctcattccctccggcgagacgtatctcttcgccgacctgcagggtcccggtatcgtcacgcactttttctgcaccatcggcaacccgaacaaacgccgcccggaatgcggcatcggcacggaggaattcaacgtccgcaaggtcgtgctgaatgtctactgggacgacgaaacggagccgagcatccaggcgcccctcggcgatttcttcggcatgggtcacggcattacaaagagctttgccagtgctcccctgcagatcacgccggaggatggccgcggcttcaactgctggtttccgatgccgttccgcaggcgcgcccgcttcaccgtgaagaacgaatgctgcagcccactgcacttctatttctatgtggattacgagcaggtcgattccctgccggaaaacacgctgtacttccacgcgctctggaaccgcgaatgcccgacggacggcatcccctcctcggcgcgctcccgccatatggaatggatcatgggcggtgagcaggacaagcacctctccgccgagggcaactacgtcctgctggacgccgagggcagcggccagtatgtcggctgcaacatcaacatccataatctggaaaatagcagcgagtgggactggttcggggagggcgacgatgccatcctgatcgacgatgagccgtggccgccccgtctgcacggcacgggcatggaggactatctcggccttgcgtggtgcccgacgcaggaataccacgcgctctataacggctgcacgctctcgcccatggacaactacaagggcatggcatcgtattaccgcttccacatcctcgaccccatcatgttcgacaggcacatccgcgtgacgttcgagcacggccacaacaacaaccgcagcgacgactggtccaccacggcctactggtaccagacggagccgcataagcccttccaccccatgctccccgtggagcagcgcctgccgatcgatcagaagctctatgagtggaccggccgccgcgaattctgcaaaaacgaggaaaacgtccgataaatacttggaggaggacctaacggtcctcctcgatcattttcttgacatagtagcagaatcaggatataatatgactaccatcaataggaggtgttgctatgaaccatggcatttccatccggccgtctaaggatatccgcacgaattatgcgcagatctctgccctgacccggcagaatccagtcgcgatcactgtcaacggcaaggaggacactgtccttctcagccacgaggagtatcaggagcagctgctccgcatcagcgaactggaggcaaagctgtccatgtacgctcaccttgcccaggcgatggacgacatccggctgggccgggtgcagtccgcagacgctgtttttgacgagcttctcggggagctggaggctcctcaggaatgagcacgcaggtcgtgttcaccgggacggcgaaaaacgatctccgggagatcgccgttcatcttgcaaaacggtccggcagccgggagcttgccgtccgctttgtccgggagctgcaggagcagacggcgatcctggcgcagttcccggaatccggcgcattcccgcaggaccggatgctgaagagcagcggcttccgttttctgacgcacaaggactatctgctgttctaccggtacgaaagggccgagggtcgggtctatatcatggccattttccacggcaggcgtgactacctgcgcgtcatgcagcaatatctgtaacgtaaattgggaataaatgtggaggaggaccgatcggtcctcctccattttttggcggcactgcacaattcagccagagcattcggcgagagattttttgtcgagacaaggtttgaaaagtgcaggaatactttgtatacccgcaaggggcatgccgcatccgtaaggcggcaaagccgccaacggctgcgcaatatttcaagattttcaaaccgataagttggggcgaaagacccgctgagcgccgcagccgattgattcagaggttccctaggtccagctctgccatgacggcagcgcagcgcgggcacaggccgtccgcattggccttcgtcgagtgcatccagcagcgcgggcacttcacgccctcggcgttgcgcacctcaatgcgcaggccggggaaggcggttccgctgccggtcacgttcgcggcatcggggtcgtcgtccgtcaggatgacatccgaaacgagcagcagggccgtcaggtccatgtccttcacggtctcgagggccttggcagccgcctcgtcgcgggcgcagagggcaacatgggcctcgagcgccttgccgatgcgcttgtccgcgcgggcctgctccagcacgccattgacgtcgctgcgcagggcgatgagcgtatcccagcgggccatggcctccgcatcgagggcgtaggcctcatagggctgcaccatctcgttcagaacgacgttgcgcacgtcgtctcccgcacggtgcggcatggcctgccagatctcgtcgcaggtgaacggcaggatcggcgcgaacatccgcgccatggcgtcgacgatgagatacagcgccgtctgcgcgctgcggcgcttcaggccgttgcgggactcgcagtagaggcggtccttcaggatatccagatagaagctggacagctccacaacgcagaaatcattgatggcgtgagtcagaacgtggaattcatagttgtcataggccgcaaagcccgtgcggatcagctcgttgagctttgtgacggcccagcggtccagctccagcatatcctccggcgcaacaagatgctccgcgtcgaagccgtcgaggttgccgaggcagtaacgggccgtgttgcggaacttcaggtaattctggctgagctgcttgaagatctccttcgagcagcgcacatcggcgcggtagtccgcagaggcggcccacagacgcacgatatctgcaccgaaatcgcggatgaggtcagccgggtcgacaccgttgccgagggacttgtgcatggccttgccctcgccgtcgaccgtccagccgtgggtcaggcactcacggaacggagcaccctgcccgagcgcgccaacagacgtcagcaggctcgactggaaccagccgcggtactgatcggcgccctcgagatacatcgtcgcgggccactggtccggatgctcgcggcgcagggaggcaatgtgcgtcgagccggagtcgaaccagccgtcgagcgtgtcggtctccttttcaaacgttctgccgccgcagtgcgggcagctcagaccctccggaacaagctccatggcctcgcgctcgaaccagacgttcgagccatgctcgccgaacagggcggagatgtgggcgatggtctccggggtgcagacgggcttgccgcagtccttgcagtagaacaccgggatcggcaggccccagcggcgctgacgggagatgcaccagtcggcgcggtcgcggatcatggcgaccatgcggtccttaccccacgcgggcagccacttgacattgtcacaggcggcgacggcctcgtccttgaaggactcgacggagcagaaccactgcggcgtagcgcggaagatgatcgggctcttgcagcgccagcagtgcggatagctgtgggtgaattcctcggaggcgaacagcgcgccgctctccttcagatcggccagaatgacggcgttggactcgtcatagcgcaggccggcatacttgcccgcagcctcggtctgacggccgcggtcgtccacggggacgatcaggtcgatgttatagcggcggcaggtctggtagtcgtccgcgccgaaacccggggcggtgtggacgcagcccgtgccggaatccatcgtgacatagtccgcgcagacaagcagggactcgcgcggcaggaacggatgctgtgccgtcatatattcaaagtaacggccctcatggcgctcgacgatctcatattcctcgatgccgccggccttcatcgtcttttcaagcagcgcctcggcgacaagatagcgctcgccatttgccgccttgacgatgacatagctctcctgcgggttcagggcgatggcgaggttgccgggcagcgtccacgtcgtcgtcgtccagatgataacataggtgttttcagcctcgagctttcccttcgtgtccttcagggcgaacttgacgtagatggacgtgcagggatcgtcctgatactcgatctcggcctcggccagcgccgtctcgtccttggggcaccagtacacgggcttcaggcccttgtagatatagcccttgcggtacatctcgccgaagaccttgacctcctcggcctcaaaggccttgtccatggtcttatagggatgctgccagtcgccgaggacgccgaggcggcggaagccgctcatctgacggtcgataaagtcctgtgcaaaggcctgacaggcattgcggaactccgggatcggcatggccttgtggttgagcttgttcttcttgatgatggcggattcaatgggcatgccgtggttgtcccagccgggaacgtaaggcgtgtaatagccgcgcatcgcatgggagcggacgatgaagtccttgagcgtcttattgagcgcgtggcccatgtggatatcgccgttggagaacggagggccgtcgtgcaggatgaacgcgggcttgccctcgttcttttcgagcatcaggcggtagacattgatcttgttccagtgctccagcatgcccggctcgcgctgcggcaggcccgcgcgcatcgggaagtccgtcttcggggtgatgatggtgttcttatagtccataaatgcctccatttatttcttttaaacgcttgtaactggttattgtcccaaaaaatcctctgtctcatcaagagacagaggatttctctgcggtaccactcctgttcccccggaacgggggcgcttggggcgcgataacgggcgcaggccgtctccccttacgcaggcacatggcccttccggagaaaagctcgggggtgatgccctgcagcgcgcgtctgccttgcatcctccggcagctttctgaacgcgcggggtccgcaggtccgtccccttcgtcgcttgatcggtattcgattccggtacgaatgtactgagattcttaccgctttttcgggtcgtaattccgcccgaactgcagatcttcaaattttttgctcacggggaagccgtgcagcgtgtcgagcttgcgcgtatcgccggagtgatcctcctgcgcgatgtcgccgagcgtcgagccgctgaggctctgctcgatctgctggccgatctcctcgatgagggcgtcggccttctcctcggcggagggatgagactgctctgcctcgtagtcataggcgcggttgtgagacggctccttcggctgctccttcggggtcagcacgggggtctgcggctccaccggcggggtgaagcggtggacgcgctccggctcctccggctgggagggcgtgagcggcgtctccctgcgcagctcgtcgataagctcgagctggcgcttcaggcgcttttccatgccgtccaggaactgcgacgtggcggccttggccgcatcgaggcgctcctgctcctcgccgacgagggcgtcgacattgttcgtcttggcgctggcggcatcctctgcctcatgcagcatctgcgcgcactttttctcggcgtccgcgaccatctggtcgcacgtcttctgcgcggcaagcagggcgttctgcatggaagcctcctgcttgcggtattcctccagcttttccacaagaatgcgcatcttgctcttcagcacggaattttctttatagagggtaacatagtcctcggtcagcggctcgagaatgtcatcgacggagtccatatcgtatccgccgaacagcgccttctcaaagctgatgtcctggatctgctgcggggtcagcatcgtcttcagctcctgtctctgtcttgcgtgggatggaacgcaccttagaagtacatcccgttgttttcgagttcctcaacgagatcgccaacgacatccacgttgtacggcgtgatgagataggtggaaatggcgatcttcttgatcttgccgtcgagcgcataggcgcagccggagaggaagtccaccagacggcgggcgacgtccttgttcgtggactcgaggttcagcacgacggcctgcttgtcgcgcaggtgatcggcgatgtcggagaccagatcaaagcggtccggcttgaccagcacgacctgcagctgggtggtggcgttgatattcacgaccttgttgccgccgcgggtcgtctgcgtatcctgcgcggccggggtgctgcggctatagctgcggcgggaagactgaggcgcgggagcgggatcgttgtccagcggctcgtcgtcataatcatcataatcatcctcttccggttcggaatacgggtgagtcagcttcttcagttcgtccataaatcccatgggttcgtcctccaatattgtttcgatataatcgttaatcgctctttgcctgcgcatagttccgcgggccgaaaatggccgtgccgatgcgcaccatggtgctgccgcaggcaatggcgtcctcgaaatcgtccgtcattcccatcgacaaaaaatccataaaaatattatcgtatttttgggctgttatgtcaacagcaattctgcgaattttttgaaaatatctgcaattatcgccctttttcctgccgatcggcggcaccgtcatcaatccgcgcacgcgaacggcgggataatctgccatttcttccacgatccgggggaattccttcagcaggaagccggacttctgcttctcgcctccggcgttgatctcgagcaggatatcctgcacgatgccgcgcttggcggcctcggcattgatatccgcaagcagctcgcggcggtccacggactcgatcacatcgacctgcccgacgacctgccggaccttattgcgctgcagcgcgccgatgaagtgcaccggagcgccgtcataggcatgctcgtccagctttttgaccagctcctgcacgcggttctcgccgcagcagtccaccccggccgcaatggcctcgcgcacggcggcgctgtcgttcatttttgttgcggcgcacaggcggatgtccgccgggtcgcgcccggcagcccgggcggcagccgcgatccggctgcggatctgcgccacgttttccgtgatcatgctcatgcttccatcacctttccgtcctcgatgtcatccgaggtcaggataatatcgtcgcccggccagaggtttcccgtgctggactgatccagctcgacaacgtagccgtctccgtacgcataaaggatctccaccggcttccagcgggcgcgcgcgccctcgagcacatagacgcccgcctgcccatcgaccatatagagcgcctgcttcggcacgcgcaggccggtataagaggagaaaatgatatccgcgctctggcggcgcagggccgtgacctcctgcggctcgcgctcgcaggacagcacgatggtacaaacgccgtcctccgcctcgctgatggcctcgacctgcattctgatctgggagagcttttccagtccgaagctgacggtcagcgtctcgcccgcggcagtctgctccgcgcgcgcctccgggatctcggctgcaaaataccacttctggcccgtgatgagcctgccgacggcattgcccggaacggcagacgcatgctgcgcagcggcgcgcagctcgctcggcttcatctgcagcacgctctccggcgtgagcacgcgctcaaggccgtccgtctgctcggaaaaatagccggcgctctcgaccgtcacggcctcggcgctctgctccgtctcggcggagagcgcggagatctgcgactcgagctcggcgatgcggccctccatgcgcgcggcgtcgtccgccgtcacgctgcggcgcagcacgagcggctgcagctcggacatcacatcgtcggcctccgacagatcgcggcgggccgtcagtgcagccagctcgccgagggccttttcgatggcgtcgtccgtctgggtcgtgtcctcccctgccgtgccggaggccgcatagcgcagctgcgaaagctgttcctgcagggccgtgagcctgtcgcgcttttcgcgcgccgcagaggtctgatagccgtctgccacgcgctgcccgctgccgacgcgctcgccctcggtcagggcgcagaccacaacgggctgtgaggccgtgatgatctcctcctcacgcactacaaagccggaaacggtctgcccgtcgccggcttcgcagcgcacggcagtctcgagggtgtagctgctcccgccgctgccgaaaaggaccgacagcacgagataggccaccacgatgcctgccaatacgatggatacgattttcaggtaaaggtctccctgctttttcatctgggtactcctgtccggccggggcactcggcccgcggcccgcgggagcagggtcttcaggtacgaacgggctgcgccgggacaagcgtggagatggcgtgcttgtagatcatctgctgcttgccgtccgagctgagcacaacgacgaagttgtcaaagcccgtcacgatgcccttgagctggaagccgttcatgaggaacatggtcacggccgtgtgctcgcggcgcacctcgtttaagatcagatcctgcaaattttccgtgtttgccatatgtggtactccttttctttgttttccggctcagccggtgttggaataccacgattgtatcagattccgctgtcgaaatcggccgctttttgcagggccgcgcggaaaatctcgtctgcgcccgcagaggcgtcgagccactgcacggcgggattggcgcggaaccacgtcatctggcgcttggcatagcgccgcgtggcctgctggatggtcccgagcgccgcctccggcggcaggccctcctccagcgcctgcacgacctgcttatagccgatggcctgcaggctcgtcgcccggtccggcacgccgctgtcaagcaacgcgcggacctcctgcgcaagtccctgcgcatacatcagctccacgcgcagatcgatgcgggcatagagctgcgcgcgctccgggaagtgcaggccgagccacagcggccggtagcgaggcgggattgcccggctctcccggtcgaagtccgtcatggtcctgccggtctcctgccagatctccagcgcgcggacgatgcgcttcacgtccgagacggacagccgcaccgcccgctcggggtccacggcgcgcagctcgtccagaagcggctgtgcgccctcctcggccgcgcggcgctccagggcctcgcgcctgccggtctgcggcagcggcgcaaactgccgccccgcgatgagagaatcgatataaagccccgtgccgccgaccagaatgacgggcttcccgcgcgacaggatgtcctgcacgcaggcatccgcctcctgcacatagcggctgacggagtaattctccgccgggtccgccacgtcgagcatgtggtgcggcacgccgccgcgctcctcgggcgtgggctttgccgtgccgatatccatgcggcggtagacctgcatggagtcgaacgaaacgatctcgccgccgagcgcctgcgccagccggacggacagggccgtcttgccggaggccgtcgggccgacgatgcagatcatatggtctcgctgctccatggtcaggccctcttgaactgccgctcaagctgcgaagccgtcagctccagacagatgggacggccgtgcgggcagtatttcaggtcattgcgcgtcagcacctcgtgcaccacggcctcccactccttcgggtcggtgtgccagccgcccttgatggcggccttgcaggcgatggtgtgcagcaggcggtcgcgcagctccgtcgggtcggcgtgccgcccggtcagaagctcggccgccagcgcggtcagactctgcgcggcgtcgtccggcgcgatctccgtggggatctggcggatggcgagcacgccgtcgccgtaatccgagatctcatagccgtactgcgccagcagctcggcattttccagcagcacggccgcctcctcgcgctccggctcgcacagcacgggtgtgagcagcagctgcggcatcacgggttccgtgtcggcgcggagcttttcaaacaggatgcgctcgtgcgcggcatgcttatcgatgaggagcagactccctgcctgctcaacgaggatgtaggtgttcagcgcctcgccgatgatgcggtagtccggtgccttgggcagcgggagctcctgctgcgtctcttccgtctgctttggctccggagggaccggctcatcgtgcttcaccggcggctcatcgtgcttcccgggcgtctgccgctcgggctgcggagccggtacgggcgcttcccgctgctgcaccggcgcagcaggctgtggggccgggcagggcggttcggggcgggtcacaggctgcaccggcctcggcgaggcaagcgccgcaccgtcgcggcgctccgtcagcgagccgatctgctcgagcaccgtgcgggaggccgccgggcgcgggccgtcctgcagggcggccgctgcggcgcggtattccgccgccgacatggtgcggaaagcggaatttccgtcgttctgcggcttcagcttcatctgcacgcggccggaggcctgctccagtgcgccgagcacgccgtaatgcacgcagtcgaacacctcctgctcgcgcaggaagcgcacctccgtcttcgcggggtgcacattgacgtccacaagatgctccggcaggtgcagatgcagcacgcaggccgggaaacggccctgcaggagctgattgcggtaggcctgctcgagcgcggccgtcatgagcttggagcggacatgccgcccgttgacaaaaaagatctggctgccccgcgtgccgcgcgtcgcggccgggcgggtcacaaagcccgtgacggagagcttgtcccagctcccgtccaccggggtcatctcctgcgcggtctggcggcccatgacggcatagatcgcgctgaggagctcgccgtcgccgggcgtggagagctgctcctgcccgtcgcgcagcacgcgcacggctacctccggatgagccagcgcaaggcgctgcaccgtgctgagcacggcggaggcctccacggagtcgcgcttcatgaacttcatgcgcgcaggtgtattgtaaaacaggtcacgcacgagcatggtcgtgccgttcggacagcccgcctcgccgcgctccgtcacaacgcccgcctcgagatgcagactcgtgccgaagggcgcgtccgccgtcttcgtcagcacgtcgatgcgcgagacggaggaaatggccgccagcgcctcgccgcggaagccgagcgtgtggatggcctccagatcggccgcctcatggagcttgctcgtggcatggcgcaggaaggccgtctccacgtcctccgccgccatgccgcagccgtcgtccgtcacgcgcaggaacgtcatgcccccgtcgcgcagctcgaccgtgaccttatgggccccggcgtcgatggcgttttcgaccagctcctttgcggcgctggccgggcgctccacgacctcgccagcggcgatcaggtcggcgacatggggagaaagctgttggatctttggcataactacctcacaggaacgcttgcatcagcgagcgcagaaggctcgcgagcacagattggaaattgatgaacatatgcaggaaaatacaggcccagatgttgcccgtcttctgatagacccagcacagcgagaagctcgccgggagatagaggctcaggcacaggatcgtattggccgcagtcatggagccaaggaattggaacacatgcatccccgcaaacaggaacatggacagcgcataggcagccgggagacatctgcgcgccagcggcgcaaacagcacgccgcggaacaggcactcctctgccagcggcgcgagcacgacggtgcagagcgtcatggccagcgggtaaccgccgagcagggagttgacggcctcttgattgtagttctccggcatgatatccaataccgtataggccgtcgtcagcacaaggttcgcgccatagcacatgccaaagccgatcagcacgctcaggagcattttcccctcgaattcccgaagtgactgccaaagcgtgcggcggaagatcaggagcatgacggcaaaattcacggtcatatagagcagattcgcaaaaaagtaattgcgcggctccgtcagcggaaagccgagtgccggaaagtaggtaaggatcgcaaaattcaaaaaaaagagaaaaacaggcagatacagtgcgccgaggatccattcgcgcggctcgggcgcccggatcccgctgcggcggggaaatatccagctcatccggcattctctcctttccgtcagagcattttcttcagctcgaacagggcgttcatggcctcgatcggcgtcatggtctcgatcgcaagcgattcgagcttccgccgcagggcgtcgttctccatgctcgtgatggagatctggtcgtccgccgccacgcgcaccgtgcgcacgggtgcgccgctctcgagcgcccgcagcagctcccgcgcgcgggagacgactttatccggcagaccggccagtcgcgcgacctcgacgccgtaggaatcgtcggcagcgccggggacgatcttgcgcaggaacacgatgtccgcgccgcgcttgcgcacggcaatgttgtagttccgcacgccctcgatctcctgctcgatgtccgtcagctcatgatagtgcgtggcaaagagcgtctttgcgccgatgcgctttttgtcggcggcatattcgagaacggcgcgggcaatggccatgccgtcgaatgtcgacgtgccgcggccgatctcatcgaggatgagcaggctgtgcgatgtcgcgtgcttcaggatctccgcgacctccgtcatctccaccatgaacgtggactggccggaggccagatcgtccgaagccccgatgcgcgtgaagatgcggtccaccacaccgatacgcgccgcgcgcgccgggacgaagcagcccatctgcgccatcagcacaatgagggcgacctgccgcatataggtggatttaccggccatattcgggccggtcagaatggcgacgcggttcgcgccgcagtcgagcgccgtgtcgttcgggacgaacagcgcatccttgagcacctgctccacgacgggatggcggccgtctgtgatatgcagctcgccggagaggtcgatctccgggcggcagtaattctgccgggcggccagcgccgcaaaatctgtcagcacgtccagcgcggccacggcgcgcgccgtgcgctggatgcgggcggactggtcggccagatgctggcgcacctgtgagaacagctcatattccagcgccgtgatgcggtcctttgccgtcaggatcgtgcgctcgagctccttgagctccggggtgatatagcgttcgcccgttgtgagcgtctgcttgcggatgtaggtctccgggacctgggccgtctggccctttgagacttcgatataatagccgaacacgcggttgtagccgacgcgcagggtcttgatgccggtcttctcgcgctcctcggcctcgatgcgggccagcgttcccttgccgcccgagacgatgtcgcgcagctggtccagctcttcgctgtagccgtcgcggatcatgccgccctcgcgcacggaaaacgggggctcgtccacaatggcgttccgaatttcgtcccgcaggtcggaaaggtcgtccaattcgtccagcagcacgccgaacatggaggcatgcagcccgccgatggcggcgcgcagctccggcagcggctcacagccgtttccgagcgaaacaaggtcgcggcagttcgccgcgcctgtgacgatgcgggccgtcacgcgctcatagtccgagacatcctgcagcatgtgcacaagctcgtcgcggccgatgctgtttttcgtcagctcctccacggcgtcgaggcgcgcgttgatgcgcttcgggctgagcagcggcttttccagccagctgcgcagcatgcggctgcccatggccgttttggtatggtccagcacccacaggaggctgccgcgcttttcccccgcgcgcatggtctccgtcagctccagattgcgccgggcactgagatccagctccataaagcggccgctgacatagaattccagctcccgcacatgggaaaggcctgttttctgcagctcacagagcgtccgcagcagtgcgcccgcactgcgccagacctctggccgctccgtgaggccaagctcatcgagcggcctgccgaactgtttttccacaagctgtgccgtctcctgcggatcaaacagctcgtccgcgccgagatcggcgcagcagctcagccgctcctgcagcgtgcgggtcagctcttcgcttttggccgcgtcgccgccgcgcagcacctcggccggggcgaagcgccccaactcggagatgacgcgctccatggcctctgcaccctcggcctgcgtggcatagaacgcgccggtcgaaatatcgcagaagctcaggccgtagcgcccgccctcgccgaagacgcaggcaaaataattgttgcggctctcgtcgagcatggagctttcgatgaccgtgcccggcgtgacgatgcgggtgatatcccgcttgacaaggcccttggccagcgcaggatcctccatctgctcgcagatggcgaccttgtagccgcgcgcaacgagccttgcgatatagctctctgccgagtgatacggcacgccgcacatggggacctgctcggacttctccttgccgcggtcccgcgttgtgagcgtcaggtcaagctcatgggaagcaagcttggcatcgtcggcaaacatttcataaaaatcgcccagacggaaaaacaggatgcagtccgggtgccgttccttgatctccagatactgccgcatcatcggcgtcagttcagccatacttcttctccttctgtctgtgccgtcaggcaagctcgctcgtcaggctccacgtcgtgctgcccgtgatgcgcacatcgcggaactggccgatgagcccgtcgccgccggacaggcgcacaaggcggccgccgtccgtgcgggccgtgagcaggtcgccgtcgcgtccgtcgatgagcacgcggaacgtccggccgatataggcacggtgcttttcctccgaaatgcggttctgcagggcgacgaggcggtcgaagcggcggtttttctcctccttcggcgtgggatcgggcatggaggccgcgggcgtgccgccgcgcggcgagaaaataaacgtaaacagcgcgtcatagcgcacgcgctcgatcaggcgcagcgtgtcctcaaattcctcctccgtctcgccggggaagccgacgatgacatcggacgtgagcacgagctccggcataaggctgcggccgtaatccacgagctcgagatactgcgcgctcgtatagcggcggttcatggcgtggagcacacggtcgtttccggactggaacggcagatggaactgcttgcagatcttcggataggccgcgatggtgtcaaacagcttatggctggcgtccttgggatgggacgtcatgaaacgcaggcggaaatcgcccggcaggctcgcgatctgcgccatgaggtcggcgaaatccacgccgaggccgaggtccttgccgtaggaattgacgttctggccgagcagcgtgatctccttatagccctgcgcgatcagcgcgcggcactcctgcaggatgtcctccggctggcgggagcgctctcggccgcgcacatagggcacgatgcagtacgagcagaaattgttgcagccgtacatgacggagacccacgccttgagcttattctcgcgcacgacgggcaggccctcggcaatggctccggcagaatcctccacggagaacacgcgcttgcctgtcgtcagcacgccgagcagcagctgcggcagctcccacaggtggtgtgtggagaacacgccgtccacatagggataggacttgcgcacgcgctcgaccacggcgggctggcccatcatacagccgcacaggaagatcttctggcgcgggtggcggcggcgggtatgcacgagcgcgccgacgttgccgaacacgcgctgctcggcgtgctcgcggatggcgcaggtattgaagatgacgaggtccgcgccctcggggccgtccgtcagaccgtagccgcagtgctcgagcatgccgcggatctgctcggaatccgcctcgttctgctggcagccgtaggtctccacaaaggccacaggcgtgattccctgcgcctgccagtattcgcgcaccaggccgcagaagccctcctgccgctgcagagcctcgggagagatcacagtcgttttcttttccaaaagaggagttcctcccaattcatgagattcttattcagtatagtattttatcattctttccgccccattgcaagtggggattccccggaagcatcccactttcgtttttatcttgccccattcggaaaagtatgatatgatactctagaggtgatatccatggaagaaaatcagaaggacatgcccgccgtgcaggagacgccggaggcgccgcagtccgaatttgtgcccagcccgaagtggaagcgcgtgctggcgtgggtgctgtttgccatcgtcgtgctcggcatcgccagctggctgctgaatatcgccgtgccggaatggccggagaagctctttggttatactcggggttgatcccggctatgcgacgaccggcttcggcctcatccgggcggagcgcgggacctatgccctgctgcgctacggcacggtcacgaccccggcggggctgccgttcccgcagcggctgaacattctgtttgaggacatgacgcagctgctggaggtcacgaagcccgaggccgtcgccgtggaggagctgttctgggggcacaatatcacgaccggcattggcgtttcgcacggacgcggtgtgatcctgctcgccatcgagcgggcgggcgtgccgctgtttgaatacacacccatgcaggtcaagcaggccgtcgtcggctacggcaaggcggagaagcatcaggtcatggatatgacgcgccgcctgctccggctggaccgcatgccccggccggacgatgcggccgatgccatcgccatcgcgctgtgccatgcgcgctcgtccacgtcgcagctggcacggctcatgggaggaaaaccgtaatgttttattatttcaacggcgaggtcacgcttctcgagagcaatctggccgtcatcgactgcggcggtgtcggctacgcctgccggacgtcgtcctatacgctctcgcgcctgcatgtgggcgagcgcgcgaggctctatacctactgcagcatccgcgaggatgcgttcgatatctacggcttcagcacgcgcgaggagctgcggaattttgaactgctgctcggcgtgaccggcgtcggcgcgaaggccgcgctggccattctgtcgtccaccacgccggaccgctttgcgcttgccatcttctcgcaggatgaaaaggccctgacggccgcgccgggtgtcggcaaaaagctggcccagcgcatcctgctggaactgaaggacaagctcggtggcgccgcaccggcagagggcggcattttgctcccggccggggatgtgcccgccgcctccggcagcgcgctggcgctggcgcaggccgcactggccgagctcggttaccgcccgcaggagatcacggcggcgctgcgcagctttgaccccgagggcatgaagacggaagagatcgtgcggcagtgcctgcgcgccatggtgatgaggtaagaacatgagcatcgatttttcacaggactacgaggccccgctcgtaacaacgagcttcacgcccgcagacgagtccgaattctcgctgcggccgaagcgcctgacggaatataacggtcaggagaaggtcaaggaaaacctgtctgtttacattgaggccgcacgccgccgcaacgagccgctcgaccatgtgctgctctacggtcctcccggcctcggcaagacgacgctcgccggcgttatcgccaacgaaatgggcgtgcatatccgcgtgacgtccggccccgccatcgaaaaggcgggcgatctggccgcgctgctgacgaacctctccgagggcgacattctctttattgatgagatccaccgcctgaacaccgccgtggaggagatcctctaccccgccatggaggactttgccatcgacatcatcgtcggcaaggggccatcggccaactccatccggctcgatctgccgcgtttcacgctcatcggcgccacaacgcgcgccgggcagctctccgccccgctgcgcgaccgcttcggcgtgtcgttccggctggagctgtatacgccggaggagctgtgccgcatcatcacgcgctctgccgccctcatgggcatgcgcatcgacgcagacggcgcaatggagctggcctcccgcagccgcggcacgccgcgcatcgccaaccgcatgctccgccgcgtgcgcgacttcgcccagctgtattacgacggcgtcatcacccgcgaggcggccgaccacgcgctcggcaagcttgaggtcgacaagctcgggctcgacgcgacggatcgccgcatgctcacggccatcatccgctactataacggcggccctgtcggcctggagacgctcgcggcgaccatcggcgaggaggccgtcacgctggaggacgtctacgagccctatctgatgcagatcggcttcctgacacgcacgccccgcgggcgctgtgttacgcagcttgcctacgaccacctccatctgcaaaataacaatgcagagcaattgactttttgagcggaaattttgaggcttttcgtcgaaatcgcacaattgtttttttctaacaaaatattttttcatccactattgacaaagggcggaaagatgcttataataggcactgtccacgggatatagatttccggggatgcgccgcctgcttcggcggcccgtatcaacagaccctgtatcaggaacccagcatttttgatggacgaagcgtcagggcaattttttcaagagaggttaccaacatgtacgaagacaagactttagtttgcaaggaatgcggcgccgaattcgtgttcaccgccggtgagcaggagttctacgcggagagaggcttccagaatgagccccagcgctgcaaggcctgccgtgacgctcgcaagaatgctgcccgcagcccgagagagtacttcactgctgtctgcgccaactgcggcggcgaagctcgtgttcccttcgagccgaagaccgatcgcccggtctactgcagcgagtgcttcgcgaagatgcgcgagaacggctgatcttaccgcaagccacgaccggcgtcccactggggcgccggtttttcacgcttccctgtccgcgagtcgtggacagctcttgtctgcggcaaggtcggttttgcagagcagaaagccggacttgcgtttttccgcgccgtgtggtatgctctgcctgtcaaaattgcaaaaattggattttgcgtcatcattctgcattttttccgccatatcgggcggtgaagcataagagggagtcaagccgattcccttcccggaggaaacagcaatggaccgaaagaaacagattgccgccctgacggacgacgaaggagagcgcctgctgctggcacaggcctgtgaacggctgacaagggcggagcagcgcggcattcccgccgcgaccgtgttcctgacgccgcgggagcaggccctgctgcggcagctcctgccgcagtgccgcttttggggcggcacaccggacgcggagcgagccgtggcctattggctgcctgaatatgaggacgaggacgactaccgggaaaacgggccggtcgcctgcctgcgcgccgcattttttgaggaaaatgccgtcggacaccgcgacatgctcggtgcgctcatgggctgcggcatccgccgcgaggccgtcggcgacctgtgcctgcagccgcgtcaatgcgacctgttcatcacggcggagcttgcaccgtatctcctcgacaacctgacctccgccgggcgggcccacctgacgctcacgcgcatcgccccctcgcaggcagatcgtccgccgcaggccctgcaggagctgcgcgtgacggtctcctcgccccggctggacagcgtgatctccgccgcattccatctgagccgtggcagcgcggccgatgccgtggcggccgggcgggtcaatctcaacgacctgacctgcctgaagcccgaccgcgccgtgcaggaaaacgacaccgtctccgtgcgcgggctcggcaagctgcgcgtgctcgccctcggcgggctgacaaagaagggccgcctcgccctgacactcggcaaatatctataaagaagcactcggcagcgatgctgccgagtgctaattttcgctaattttcgcttatttttcgatcagaagctccgcgacctgaatggtattcgtcgcagcgcccttgcggatctgatcgccgcagcaccagagcgtcaggccgttgtcatcggtcaggtccggacggatgcggccgacatagacaagatcctgatcggacgtgtcgagcggcatgggatactcgtggttgccgaggtcgtcgaccagacggcagcccggcgcagcggcaatggcatggcgtgcctcgcggacggacacgggcttgtcaaagcgcagtgtgacggaaatggagtggctgcgcacgaccggtacacggacgcaggtacacgttacgcgcaggtccggcaggtgcatgatcttgcggccctcgttctgcatcttcatttcctcgctcgtatagccctcgtactgctcgccgccgatctgcgggatgaggttataggcgatctggtgcgagaagaccttcggctgcacgggcttgccggtgcgcagcgcctcgacctcctcggccagctccacggggccgcccgcgcctgcgccggaaacggcctgatacgtcgaggcgaccatggagcggatcgggctgatggcgttgagcgcgttcacggccgtgaccgtgatgatcgtcgagcagttcgcgctggcgatgatgccgtggtgcagcttcacatcctcgggattgacctccgggatgacaagcggcacatcatcgtccatgcggtaggcggacgagttgtccacaaacaccgcgcccgcgcgcacgacctccggcgcgtagagacgggcaatatcgctctcggcagcaccgagcacgatatcgaggccgcggaagttctcctccgacggctcctggatcatgacggggcggccgttccactccacgaccttgcccgcgctgcggctgctggcaaacaggcgcagctccgagatcgggaactgacgctccgcaaggatcttcatcatttcgcggccgaccgcaccggtcgcaccgagaataccgactttatacaatttcatggtaataacccccaggcgcttatttgacaaacgcattatatagtacgcggatcgcatccgcatagtccttgttatcgacacccagaatgatggcctgctcgtccggtccctgcgagatcatgcggatgttgatgccggccttgccgagcgctgcgaagatcttgccggacgtgccgacgcggaaggccatcttgcggccgacgacggcgatgacggcaatgtgatcgttgatctggatgctgtccgggcggatctcgctgcgcagctcgtcgagcaggctgtactggttcggcgtgagcgcctccgtcggcatggcaagtgagatgcagtcaataccgctcggcgtgtgcgccacgggaatgctgttgttctcaaagacctccagaatggcgcgcagcgtgcccacggcgccggaaaggccctttttcgacacggtgacgatggaaaaatcgcactttcccgcaatgccggtcacaaagcgctccgggttcggggcctcgacaaagctctccgtgatgagcgtaccgggatggcccggctcgttcgtattgcggatgttgagcgggatattcttctcgcgcaccgggaagatcgtcatttcatgcagcacctgcgcgccgctgtaggaaagctggcgcagctcgctgtaggtcgcgcgctcgatggagcgcggatgatcgacaatacggggatcggccatgagaatgccggagacatccgtccagttttcgtagacatccgcatccagcgccgccgcggccagcgcgcccgtgatatccgagccgccgcgcgtcagcgtgcggagcttgccgtccggcatcaggccatagaagcccggaatgacgacgcacttgttcttggccagcgcgcgcagcgcggcataggatttctcctgatcgatggtgccgtcatagtggaagaacagccactgcgcggcgtccacgaacgtaaagccgaggtaatcggccataagcagggcggaaaggtactcgccgcgcgagacgagctcatcgcgggaaatgccctgctccatctgactgcgcagacggtcgagcacgccctcgagatcgacccgcaggccaagctcgcggtggatgtcgccgtagcgctcgcgaatcatctgataaatgccgtcgcacgacacaccgtactgcaggtgcgcatagcacagatacagcagatcggtgatcttattgtcccccgcgctgcgcttgcccgccgccgaaacgaccaccacgcgccgcgagggatcagaccggatgatatcccggatcttttgatactgaccggcgtccgccatggacgacccgccgaattttgcaaccttcagcatggctttcccccatccttaacggagcgacgccaggaagccgccggtttccgtcagttttctctctctggcccaggcgtggatctccgagaccgccacgggcgttgttattataccgcagtcgagcattttgtcaatacgcgtttgcagccagcggtccatgccgttgacgcggacataatacggccgcatgatgctgctgttgtccacgcgcgccgggcggagcttgtccgtgtagaagcgcgtcaggccgttgcggatatcgaggcagtcctgcatgacgttgtaggccgttgggaagcgccccgcgccctgcccatagaagctctgcttgccgatgtgcatgcccgtgatggagatcaggttgaaattctccgggacggcagcctcgtgcatgccctgcggcatcatcgcaggctcgagatagcaggccacatcgccgctgtccagcaggcgggcgcttgccatcagcttgacgacgcggtgcatcttccgcgccgcgccgatatcgcaggcacggatgcccgcgatgccgaacgttgtgacctccggctcctgcacgacgcagccaaaagcgacgttcgtggagatgacaagcttgcgccgcgcatccgcgccgttcaggtcctccgttgggtcgacctcggcgtagccgagcgcctgcgcctgacgcagggcatcttcgaatttcagcccggacgtcgtcatggtgtccagaatgtaattcgttgttccgttcatgatcccgctgacgcggagcaccggttccatatcgagcgtgctctccagattcgtcagccagcggatgccgccgccgacggctgcggagcagcgcagcgcgacatgattctccctggcaagctgcaccagctcgccataacgctccgacataagctgcttgttcgccgtgacgacgttcttgcccgcacgcagcgcggcgcacatatattcataggcaggctgacggccgcccatgacctcaatgacggtatcgaccgtcggatcagagacgatccgactgaaatccgatgtgaccgggcagttcagatccggacggggcctgcggctgagcacataggcgatctccatatccgtgcgctcctgcacgaattcgtaaacgccgccgcccactgtgccgcagcccagcagcgcgatgcgcatcggtctgtcctctctccacaacatgaaatcgatctcctccagcagtccggcgttcaaaaaaagaaggcagggcggcctgcagcagctgctgctccggcgcctgccgcacacagccccgccgcacggcgcaggcaagcgtgacgttctccagccgctccgtacgcggcacagtacagtcatgaaacttccggaaaaagctcttgcatttttctgctttgcagtatatcatagcttttgcgaaaacgcaagaatttcattgaaattccgattgagggaggcagtctcatgcacttctggaaatattgcggcgccggaaacgactttgtgatcctcgagaacttcgacggctccatcgcgccggagcgctatgccgcactggccgcggcgctgtgccgggaacatttttccgtcggcgcagacgggctgatggtgctcgagccgcccgcgcagggcggcgactgccgcatgcgcttttataaccgcgacgggtcgactgccgagatgtgcggcaacggcgcgcgctgcctctgccgccactgccacgaccgcggccttgcatcagggccggtgcagcgcatcgagacgcccgccgggcttgtcacgggcaggcgcatcgcagccgaccgctaccgcatccgcctgaaccgcccgagcgtcgttcgcctgcacgttgaggcggagggcgtgcgctgcgcctatctggagctgggcgagcctggcatcccgcacgccgttgtgctgacggagctggaccgtccgcgcgccgagctgcgtgagctggccgcgcgcctgcgcagcagccccgccttcccgcgcggggccaacgtcaacctctgtgccgtgaccggggaaaaccgggtccgcctgctgacgttcgagcgcggcgtcgaggacttcacgctcgcctgcggcaccggaacgggcgcgaccgtcgcggcgctggcccggctcggccttgtcagcggcagcgggacgcaggtgcagacggacggcggcctgctcagcgtcgatctggacggcgaggacatcgatctcaccggcccggccgagctgaccttcaccggcgatcttcccgagcttcccgcctgaaccccatttgacaacgccgcccacacgcggtataataagatcaatcattataaaaggagcgatccaccatgaacgagatcttccgtttccatcacgaggatggcgagcatacgcatccgcacgagcacggccattcccacagccacgagggctgcgacccgcacgactgtgccgcctgcggctcctgtgaccctatgcaggagaccgttgccctgctgcagtatatggtcaaccacaacgccgcccatgccaacgagctggcgcagcttggccggaagctcacggagcttggcaaccgcgaggccggtgagcaggtgcttgccgccgtttccgagtttgaaaagggcaatctgcgcctgtccgccgtgctcgcttctctgaaataaaggagggactgcatatgtgcctgtccactgtctacaaaaacaccgtcacgcccgagaccgtcgccatgaaaaacgtcatgaagatcgagtgccagggcgatatggtcatcctgaccgacctgatggagcgccagatggccatccacggcgagctggtgatggcgaacctcgtcgagggcgttgccgtcgtgcgtgaggccgcctgatcgatcattttcgcgcagaaacattcaaaaatcgcttcggcccatttccgaccgaagcgatttttttgcggcgcgctcctcagggctgaaagatcccgagcggcggagccgcgaacgtgaacagaacgagcgccgcgccgtagagcatgacggccagcagcgaagcgcccgtcagcctgcgcgcaggcccactgcggctgagccgcgcggcaagcaggaagccgcccgccatggtcaggacatacagcgtcaggtcgacggcaagcccctgcacgccgagcgcgcgcaggccgtaatagagcgccagcaggaagaccggctgcagcacgatggccgggaaaaagcctgcccagacggcaatgcgccgcggcccgcgcgccagcacgagcgccgcggcaagcatgggccagtacagcagcttcaggtgctcccagacgctctcgttcaccggtgaaatgagagcgaacagcggattcggcagcgcctgccacaggaaatgcagccccgcgcccgccaggatcgcgccgagcgccgtcaggagccaatgtcgtttcatttcatcccctcccctgccagtctatgccgcgttccttgtgattctgcacaaaaaattgtcctgtttttctacttcgtttttgcgacattcacgttttcttaacagaaatcgccgggtaaatatgatataatgaggatgtcaagacgcgtgcgcctgcgcgcggaaaactgtttcaaagaaggagatgccttttgaatctgctgttctttctgaccccgaaggcgacctgctgctatctctatgccgactacacgctccggcaggccatggagcgcatggagcactccggctactcggccctgccgatcctgacccgtgagggtacttattgcggcacgctgaccgagggcgacctgctctgggcaacgaagaagctctgctgtatggacttccgcgatacggaggagcacagcatcatggagatcgcccaccggcgcgacaatctgccggtctccgtctccacggatatgcaggacctgctcgtaaaggcaacggatcagaactttgtccccgtcgtggacgacaagggggactttatcgggatcgtcacccgccgcgccatcatgcgctattttctggagcagatgcgcgttcccgtcggcgcagccgcggaaaattgaattccataacaagcaagtcctgcacggctacgccgtgcaggacttcctattttattacacctcgaacatgaggtcgccgtaggtcggcaccggccagatgtccttgtcgacgatcagctccagacgatcgatcggatcgcgcaggtcctgcatggcaggcatgatcatatcgtggcagaacaccgccatatcatgcacattgtccatgcggccgagctgctcgaccagtccctcgagatgatgctcggcggaggcggccttcgtcagcagctcgctcgtctggcacagcagcgtctcctgcacgccggtcggcgcggccgggcaggccgtgtggaccttgcagacggagtcggccagccgcgtgcagttgcggacgacggcggggatatagtgcttgcccgccatgtgcagcatggtgcgcgcctcgatggagatgaccttcgtgtaggtctcatacatgatctcactgcgggactccagctccgcgcgggtgaacacgccgaacttgccaaacagctgcacggccttgtccgtcgtcaggctgggcacggaggagaccatgctcggcagattcggcaggccgcggcgcgctgcctcggcgatccaatcggcgctgtagccgttgccgttgaagatgacgcggctgtgcttgcgcaggttctcggcgatgacgcggttggcgtccgccgtaaagtccgtgctgccctccagctcgtcagcagcctcgcagaaggcctcggcgacaatggtattgagcacagtgttcgccgtggcgatgcagtcggacgagccgaccatgcggaattcgaacttgttgccggtgaaggcgaacggcgaggtacggttgcggtccgtggcatccttattgaggacgggcagcgtcgaaacgccggtatcgagctggccgcccgcgatgcagcccgcggccgtgccgttcttcacgatctgctccacaacatcctcgagctgattgccgaggaagatggagacaatggcgggaggggcctcgttcgcgccgaggcggtggtcattgccgacgcaggctgtggacatgcgcaggaggtccgcatggcggtcgacggccttgatgatgcacgagagcaccagcaggaactgcaggttgtcgttcggcgtcttgccggggtcgagcaggttctcgccgaggtcgctcgtgatggaccagttgttatgcttgccggagccgttgacaccagcgaagggcttctcgtgcagcaggcacacaaggccgtgctgcgtggcgacgcgcttcatcgtctccatcatgagctggttctggtcgacggcgacgttgcaggtgcagtagatcggtgcgcactcgtgctgggccggggcgacctcgttgtgctgggtcgtcgcggtgatgcccatcttccagagctccttgttcagatccttcatgaacgcgccgacgcgctcccggatgacgccgaaatactgatcgtccagctcctgccccttgggcgcgggcgcgccgaacagggtgcggccggtatagatgaggtcgcggcgcttgagatacttttcacggtctacaataaagtactcctgctccgcgccgacggacggaatgacgcgctcggcctgcgtgttgccgaacaggtgcacgatgcgcacggcctgctggctcagcgcctgcatggagcgcagcagcggggtcttgttatcgagcgcctcgccggaataggccacaaagaccgtcgggatgcacaggatcgtaccgcaggccatttccttcacgaaggccggggacgtcatgtcccaggccgtatagccgcgggcataatgtgtggagcgcagaccgccggaggggaaggaggacgcatccggctcgcccatgatgagctgcttgcccgtcaggttcaggatctccttgccgttctcgtccggcgcggagagaaacgaatcgtgcttctccgccgtgacgcccgtgagcggctggaaccagtgggtgtagtgcgtggcgcccttctcaatggcccattccatcatggccttggccacgacatccgccgaggccatggagatctgaccgccgtgctcgaccacgctcatgacctccgcatagaccttcttcggcagacgctcctgcatgacggctctgctgaatacattttccccaaaatattcggataccttcattggaattcctccctgtctgattcttgccgcagcctgtagccgctcacaaattaccgtctcagtgtaacgaaatccggccggaattgcaagtgtttttgcagcggcgggcacgatttcagaggcgtgcccaaacgcggcagttatttgccgacaagatttggacattttcccatgaattttatcattttctccaacggatttttcaatacaaactttttcgcatgcaagatcggcggaattttcctgcataaattgcattctgctctccatactaccggcaggagtgtgaagccatgctgatctcttttctccgcaccgtcgtactatatctgctgctcatcgtgaccgtccgcctgatgggcaagcggcagatcggcgagatggagcctgcggaattcgttgtgaccatgctgctggccaatctggccgccattcccatgcaggacagtgccattcccctgctgtccggcctcgtgccgatcctcgtcatcctcgggctggagctcatcctcgccgccgtttcgctgcgttccatccggatgcgccgcctgctgtgcggcaagcccgtcattctcatgcagaacgggaaaattctcgaacggaatctgcagcgcacacgcgtgaacctcgacgagttgaccatgcatctgcgggagaagggcattttcgacctcagcaccgtgaaattcgccattctggagacgaatggccagctctcgaccctgctgtatgccaaagagcagcccgcttcggcgcgcgacgcgggcatccgcgtgcgggagacggagctgcccgtcacgatcatatctgccgggcgcattctggcggaaaatctgcatctggccgggcgggacggcggctggctcgaggcagagctgaagcggcggagcctcacggcggagcaggtgctcctgctgacgatcgatgccgcggggacggtctatcttgtgcggaaggaggacctggcatgaagctgtgctggcttggctgcggtattctggccgcgctgctggcgctgtcgcttctgtgcggcatgctcacgcagtgcagcacacgggacgccgccgccgcactcgagcaggccctcgaggcgctggaccgggacgagacggcacaggccgtggaggccggcacacaagcccggcagcactggcagcgccatcgccgctttctctgcgccgtgctgagccacgacgagctcgacggcattgagcagggctttgcggagctgcgggcctattccgccgtgggcgacgcagcggagctgcgcagccgctgcgaggtccttctgctgcagctgcagcacatcgcgcagctggacgcgccgtatgccgagaactttctcacctgcccggtgcggatttaggcaggcttgtcattccgaggagcgaagcgacgcgggaatctctggcaaacgatttcgagttcgccgaagtccaccgaaacttcggtccggttctgcaaaattgcaccccaagggtgcttcctcgcgctgcgcccccagcaggggccatgcaataacgcgcccgactttttcccatgcaggggttgaccaatatgcatacaaggctgtataataggcacaggacggacccgtgcggtccgacgggaggctaattatgcttacgcaaacactcgatcagcaatatcttgcccacacctataaccgttttccgctggagatcgtcggcggcaagggctcgctcctccgcggcgcggacgggcgggactacatcgacctcggcagcggcatcggcgtgaatattttcggcatggacgacgacgaatggcgcaatgccgttacggcgcagctcggccgcttccagcacgtctccaatctctactactccgaaccggccgcgaagctcgcacagatgctctgcgaacgaaccggcctgaagcgggtctttttctcgaactccggcgcggaatccaacgaatgcgccatcaaggccgcccgcaaatgggcagccgaacacaagggcccggaatactgcaacatcatcaccctgcgcggcagcttccacggccgcacgctcggcacgctggccgcgacggggcaggatgtgttccaccgcgactatcagccgctgcccggcggcttcctctacgcgcagcccggcgaatgcgaggccctcgagcgccttgccgcagagcacccctgcgccgcgatcctctttgaggccgtgcagggcgagggcggcgtgcgccccatcgggcaggaattcgcctcctgcctgcaggaggtctgccgcaagcatgacctgctgctcatggcagacgaggtccagctcggcaacggccgcagcggcagcctctacggctatatgaactacggtctgcagcccgacgtcgtctccacggcaaagggcatcggcggcggtctgcccctcggcgtgaccatgttcggcgagcgcgtggcagacgtcttccaccccggcgaccacggcacgacgttcggcggcaaccccgtctgctgcgcaggcgcagtgaacatcctcagccgcatcgacgacaggctgctcgaaggcgtgcgcgagcgctcggactatctccgccgcgcgctgcaggccgcgcccggcatccgcagcgtcaccggtatgggcctgatgctcggtctggagatcgatatccccgcccgcgaatttgcggagcgcgcactgcgcgaaggcgtgctcgtcacgaccgccaagcagaagatccgtcttctgcccgcgctgaatatccccatggagctgttgaaaactgccgcccaggcactggtgcactgcgcggctgaataaggaggtaccccatgaatctaaacggtaaaagctttctgaccctgctggacttcacccccgacgagatcaccggtctgctcgacctcgccgccgccctgaaggccaaaaagaaggccggcgtcccgcacgacacgctccgcgggaagaacatcgcgctgatctttgagaagacctcgacccgcacgcgctgctcctttgaggtggccgcgcacgacctcggcatgcacgttacttatctcgacccgaccggctcccagatcggcaaaaaggaatccattgccgacacggcccgcgtactcggccgcctgtatgacggcatcgaataccgcggcttcggccagagcatcgtggaggagctggcaaaatacgccggcgtccccgtctggaacggcctgacgaacgaattccaccccacgcagatcctggcggatatgctgacgatccgcgagcacttcggcagcctgaagggccgcaagctcgtgttcctcggcgactgccgctacaatatggcaaactccctgatgatcggctgcgccaagctcggcatgcacttcgtggccagcggcccggagggctacttccccgatcccgcgctcatcgcccgctgcgaggccattgccgccgagaccggcgcaacgctggcctttgagacggacccggcaaaagccgtcgccggtgcggacgtgctctacactgacgtctgggtctccatgggcgagccgatggaagcctgggccgagcgtctggagaagatgctcccctatcaggtcaatcagaagctcatggacgccgccggagaaaaggccctgttcatgcactgcctgcctgcgttccacgacctcaacaccggcatcggccgccagatcggcgagcagttccatcttgaggcgctggaggtgacggacgaggtcttcgagggcccgcgctccatcgtcttcgacgaggccgagaaccgcatgcacaccatcaaggccgtcctcgctgccacgctggctaactaatcctgattcctgattaaaacatttcatcaggaatcccgtgtgctacgcacactcgcatcgtgctgacgcacgctgcgccgtctcatgcagaatctgacgcgccctcggcgctataaaaagcttttaaagctttttatcagattctagtataagcagtctggcgggaaagtctcctcggcttcaatcgaaacgcaaaaaatcctgcagagccaaatcggctctgcaggattttcggttttcagggggtgcttctgctcaggcgcgggcgcggacaagagcgaggcgctcctcctcttcgtcatgacggcgcacggcacggccggcggcatgagcggagagatacagggcagcgaaggaagcgacagcagcgatcatggacagaacgtggtcgttcttcggcagcagccagccgacgacggcggcgatgagcacgaggatcaggttcatgagacccgtgttctcctctttatgataaacctcaatggcagcaatgcctgccagtgcaagcagcacaaggatctttcctacgaattccatttttcatttcccagctttctaattttttggtcggcgtaatagtaccactccatcctgattttgtcaataacttcttgatattttttgaaaaagttttgattctgtagttttcattttctcgctcgtcaaattgacgaagtcgttaagtgactttcatatggcatcctgcacgattttaacaaggccgtttaggcaggaaaacggcggcgtgcagagcagagcagagctgcgcgccgccgaacaggctgtcaagaacatactcagccgaaagtttcggagggaagaaaagtgtgaaaggaaaccgtcagggtgtcctttcgcgttccataacccgccgcagcggcagaattgcaaaataatactgcaaaattctattttgcaattctgaaggcagcttggcgaaaaagtccaaagggacttttttgacaagctgcgcgccgccgaaaagtctgttttccgttatgcctccgcccgctcgtcccagccgcggcagacatccacccacgccgagaagccggaatactgctccagctccggcagcgtcagggcgatggcgctgttcgggctgccgcaggcgggatagaccgtctcgaaccgccgcagggagacgtcgagatagacgttcacgttctccggcacggcaaacgggcacacgccgccgaccgggtggccgatgagcgtcagcacctcgtccggcgtcggcattttcgccttcttggcaaaccgagccttatactttgcattgtcgatgcgcgcgtctccggccatgacgatcaccatcggcgtctcgcagaccagaaacgccagcgtcttggcaatatggcagggctcgcaatgcagggccgcggcggcctccgccaccgttgcgctggagaccgggaactccagcacgcggtcctccataccgaacccggcaaaataggcctttactttctctacagacatggtgttttcactccgtttccgtatgctgcgcgcgcagggcggcgtcatacagctgatttttggcaaggcccgtctccgcagcgacctgccggacggcatccttgcggctcaggccttctgccagaagcgcctgcacacgcataagtgcctcctcctctgaaacggggccgctctcctgctgcttcggcgcgccctcgacgatcagaacatactcgccgcgcggcggctgggtctcataataagcgacggcgccgtcgagcgtcaggcgcaggacctcctcatgcagctttgtgagctcgcggcacagggaaatacgccgttccccgccgaaggccgccgccagatcgcgcagcgtcgcgcacagcttgtgcggggcctcgtagaagatcatcgtgcgctgctctgcgcgcagggaatccaggtgctgggcgcggttcttcttcgtcgtggacaggaagccctcaaacgtgaagcgccccgtcggcaggccggacatgctcagcgccgtgatggcggcgcaggggccggggatggcgctgaccgtcacgcccgcctccgcgcacaggcggaccagatcctcgccggggtcggagatggccggggatccggcgtccgacacgagcgcgcacgtctcgcccgccagaatgcgctcgacgatgcgcgggccgcttgccgccttgttgtgctcataatagctgacgagcggctttttcagctccagatggttcagcagccgcagcgtcacccgcgtgtcctcggccgcaataaaatccgcctgcgcaagcacctcgcggcagcgctcggagatatcggacagattgccgatcggcgtcggcacaagatagagcatcgcgctcatgggcagtctcctttcgcatgacgggcggcgtgcagggcttcgcgctccgttccgtccgtctcatattccagcagctccggcagcagcgtcaggccgggccgcccgccccgccttgcctcgagcagcagcagactgacggggctttcggcattgtggcgcaccggctgcacccgcttcggctccagcccggccgcgcgcagggcgcacagcaggtcgcacaggcgctccgcccggtgcaccagcgcaaaccgcccgccgggcggcagcagccacgcggcagccgcacacagctccgccagcgtcaggcactgctccgtgcgggctacggcgctgtttgcgccgatcctgccgctgcccacgggaaaatagggcggattggcgatcacgcaggaaaaatcccccgccggaaggagcgtgcggatgcgccgcacatcgccctccagaacggtcaggcggccttccagcccgttgatgcggacgttctcctgcgcggcgcggcaggcctccggccgcagctcgacgcccgtgaccgtgcaggacggatcgcgcgcgcagagaagcacaccgagcgtgccgcagcccgcgccgagatcggccacacgcgcccgcggcggcagcgtcaggaagtccgcaagcagcagagagtccgcgccgagcggcacctcgccctccgggatgcggagccgcagcccgttccacagatcgtgttccatggtcgccccccatcatgaattacgaattaccgattaaaaaccggtctgcgcaagactgcacaggccggttccgtaaattacgttacgcagttccgcacgagcttccgtggagcatacggcggaagggctccgccgtatgccggatgtaatcgtgtaggatcttcttactcctcgacaatagcctgaacggggcaagcatctgcacaggtgccgcagccaacgcaggtatcggcatcgatgacgtactggtcctcaccctcagagatcgcattcatcgggcactcgccagcgcaggttccgcacttcaggcagctgtcggtgatcttgtatgccatgggtatctcctcctattacaagtagtatccccattttatcatgtttttgggaaaatgcaatggggaaattcggaaaggcaaacttttttcgacgggtttgaaccgggcacaggcgggctagaatcccaatgttgaggggagggagcgatttggcaaaacgggacctgccgccggagctttcggccgcgctccggctggcatgggcgctggccgcccggctggggcacgcctgcgtcggcacggagcacctgctgctggcactcgccatgcagccccagggggccgacgggcggctgctgcactgggccggtctgaccgggccggagatcgctgcggccgtcctccgcctgcacgggcgcggagcaccgtcggacgttctgccgcaggggctgacacaggccgcacgccgtgccgtttcccgcgcgctgaacgggccggagcgactcctgaccgcactgctgcgggagagcggctgctctgccgtgcgcctgctggagcactgcggtgtctgcccgcagcagctttttacccaactatgcgagggcgagcttgcccggaaggagcgaagcatgcagaacacaagactgctggatcaatttggcatagatatgctcgagcgcgccggaaagcaggagccggtcatcggccggaggcaggagatcgagaccgtcctgcagatcctctcgcggcggcacaagaacaatcccgccctcatcggcgagccgggcgtcggcaagacggccatcgtggagggcgtggcgcagtatctcgccgccgggaccgtgccggagccgctgcgcggcaagcgcctttatgcgctggacatggccagcgtcatcgcaggcacaaagtaccgcggcgaatttgaggagcgcgtgcgcgacattctggccgaggtgcggcgcgtgcagaacgtcatcctgttcgtcgacgagatgcacaccctcgtcggggcaggtgcggcggagggcgccattgatgcggccaacctgctcaagcccgcgctcggccgcggtgagctgcagcttatcggcgcgacgacgctacgcgaataccgcagcagcatcgaaaaggacgccgcgctggagcggcgcttccgcacggtgcaggtgcgcgagccgacgccggaggagacgcgcgagatcctggccgggctgtgccccggtctggaggcgcaccaccatgtctccatcccgcaggaagccgtttccgccgccgtggagttgtcgtgccgttatctgacggataaatttctgcccgacaaggccgtggacctgctcgacgagggcgcggcccatgcgcgcatgcgccagctcggcagccgcacaccggaggaggagcaggccctgcaggccgccgtgcgcgccggaaaatatgagcgggctgccgccctgcgcgaccgtctgcggcggcgcggccagcccggccggacggtctccgtgcaggacatcgccgcagccgtttcgagccgcacgggcattcccgtcgggacgatctcccggacggagcggcagcgcctgcgcacgctggagcagacgctctccgcccgcgtcatcgggcaggaggaggccgtccatgccgcggcagaggccgtgcggcgcggacgcagcggccttgccgagcagaagcgccctgcggcggccatgctgttcctcgggccgacgggtgtcggcaagacggagctgtgcaaggcgctggccgaggccgtctacggcagcgaggacgcgatgatccgcgtggatatgtcggaatatatggaaaaattcacggtctcgcgccttatcggcgcgccgccgggctacatcggccacgacgagggcggcgagctgtccgaacgtgtgcgccgcaggccctacagtcttgtgctgttcgacgagctggaaaaggcgcacccggacgtctgcggactgctgctgcaggtcatggaggacggtttcctgacagattccggcgggcggcgcatcgacttccgcaacacgatgctcgtgatgacctcgaacctcggcgcgcgcaccggcgggggcctcggcttcggcgcgcaggcggaggacggcgctctgcgcagcctgcgggaacatttttcgccggaattcctcgggcgcatcgactgcgtggcgcgctttcagccgcttgatgcagcagcgcttgagcagatcgcgcagcagcagctcacagccctgcagcagcgtgcagagcgcctgcacgtccggctggagctgccggacggccttgcccgcagctttgccctgcgcagccgggacggccggggcggcgcgcgcgagatccgccgccttgtccgccacgagatggaggccccgctggcggccctgctgctcggcgggcgcgtgccggagcgcgtgcgcgtggacctgcgggacgaccgtccgctcttccccgccccc

SEQ ID NO: 11125 - DNA, 4083 bp, Unknown
  gut microbiota DNA sequence
tgttttcggttgcttgcttccttaccgtacatgagcattctggcagcggagaaagcacagcacgcaagatggctgaagctgacagaagaaaaccgcctgtatgacatgatggaggcgcagaccgcccggcagatcgcaatgctgcgggatctgttggctgaattacagaagacggaggatccagacagagccagacacctgcttgggcaggtcatcatcatcgggacctatatcaagcggagaagcaacctgatttttgtcggcgagcagcgcggtgcgatcagtgtgcaggaacttcggctgtgcctcaatgaatcttccgagaatatcagtatctatggcgccgactgcaagacggtcatcaagggagaaggacggcttaccgtcgggcaggcaacgcaggtctacgacctgtttgaggcggtcgtggagacggagctggaatcgctgcgtgcgctgctgatctccatcgaggttggtaagtgggtagagattgctctctgtgtttcaggagcggagccgctctgcgggctgcgcacgcggtttccagatctggaatgggagcaggatgaggacggactgcaatatgtgacgcggaagctggaaagatcgagaggggtataggcgcatggacagaattaaagaaagcttcgacagtctgcccatcgcggcctgcttcttcgataaaaacggcgtggtgcggctcatcaaccgccggatgcttgccattgcaaactggctgcaaaaaggcggtatacagtcgctggcagagatgcagagcgctctgcaggcgccgccggcaagcgtgtgctgtctggatccgcgccttcggatttaccgttttccggacggaacagcgctgcgctttgcacaggagcagatcacaacaaaagcgggcgtccgatatacgcagatcactgccgcagacgttacggagttgatccggaagcagaaccagctgaaagcggaaaatgcgaagctggagaagacaaataagcggcttaagcggctgcttgcgcagatgccggagatcatccgagaggaagagacgctggccatgaagctgcgtgtgcacgatgacattgggcacagtattcttgcggcacgccgcgtgctgctccaacacacggacctgaaggaaattcgtgcaaacgcggcgctgtgggaacggtcaatttcagtgctttatcgctcccaccagataacggcgcgatccgaatcgctggaggcggcgaaaaaacgagcggaagaattgggcgttagagttctgctggcaggagatgagccacaatcgcagcatatgcgcgcactgagcgcactggcgatctgcgaatgtgcggcaaactgtgtccgtcacgcagatggcacagaattgtatgtgcgcttttggcagaagccggactgcatggaggtctccctgaccaacaacggtgcggtgccaaggggaaaaatcacagagggcggaggcctctccatgctgcgtcaacgtatcgaagaagcaggcggcaaaatggagatttggagcatcccgcgctttaagctgatgctcagtctgccggaacaggaggaaacagcatatgagagtgatgatcgttgaagaccagaccatgatccgcagtctgctggaaagctatttccgtgttgaggacggataccggatcacggcgtccatccccggcgcaaagcaggcggttgaggtgtgccggacaagttctgtcgatctgattttgatggatgtgcaaacggagaaccgcgagaatggtctgaccgccgttcgccagatcaaagcgatacagccgaagagcaaaatcattgttgtgacctcgctgatcgactgcgcggttctggacgaggctaagagggccggggccgacagcctgtggtataaggactcgacgcagaagcgtttgatggatgtcgtccggcaaacgctggcgggggaacatatttttccggacgcacctccgacagttgagatcggcatggcaaaaagcacggaatttacaaagacggaactgaaggttctgcggcatctgctgcggggcttgtcttacacgcgcatcgcggcagaaatgggctgcgagatgtcgacggtcaaattccatgtgtcaaatatgctgcaaaaaaccgggctggaaaacaagcttcagcttgcgctggcagtcagcgacgtcaagttgattgccgatcttacggaagaatgatgggatttgattttctgcttgtgcagccacaggcatttattgaaagtagaagccgcgtctgagacgttacacttggcaagcaatgcctgcgtatgcaattaaagtgaaaacagtaattgtgattgacaatgttttggataccatctctgcgctccaaggaaatctcactggtacagtatcaacagtagaaacaggtgtctatacttttgaaaatgaagcattagaggaacttgtcatgagttcttcaagtgcgccattgttgccgggatgctatcccgttttatcagatacaaaaactaccgccagtcaaccagtcaaatcgtcgatatctgtgacgaagagtactactttatcaactcccacgaaatcaagttccttatcagaaagggccgataatgagtgattttacttattctgccgtttaacgattaccatcagcagttcaacgaatactcggctttttaacgattgcaacggcacaggaagccgcaatccccataaaacgcacaaaaccccgcttcagaattgcctgcagcggggttcgcttatgtgctgaaacagccgaaaagcctgatttcaagcggttttcaggcatagaaaaagtccaccgtaattctatcaaaattacggtggacttatgttgagggcgctcggttttggaccggagtgtaatgacagaattacagaaaacgcagcttcaacgcataaatcatggaaccgatacccaagcctgccgtatagcagctgttggtttttctgaatgcaggagtgtaataaatattattgtcagcatcgaagcagaatttttcggcggttagtacgtttgtttcatgctccaaaagactacctccgaggaaacgacgcataaagtcgattcctgcacacatggtagcaataggctttttcctgctgctaaagtgcgcgatgcatgcatctattgtgctagaagccctataattgttcagaagaccaattccgccgggtatgattagtgcatcgtattcctcaaaatcaattccacaaatacttttcatgcgtcctctgccaatgcgtgcggactctaaaagaacatttctgttatctgcaagttgctctgtcaggtggttgactgacgggacggagatatcctcggcaacgggcgtataatcacatccatatctgtcaagcgcagcatatgtcagaataacttcttcaatgcaggaaccatcgccgagaccgcagccggctaataaaaccaagcacttcatacaccgctgtcctcccgtaaattcatatctgttttatcaatttcaagtataacctaccaaaacaaaaaagtccaccgtaattctatcaaaattacggtggacttatgtctatgggctacgaaaaagatattttcggcagttttgcgtatgacttcgaactctcgcaaaaacttatattcggttaatcatatatgcgacttttattttattattcgggaataagaacatccccgccggagattaccacgtcagatgcggaaatggcactgtcaatggtattcgattcgtcaatttcgccttcgtatgttatctgaacattttctcccactcggatagctccgctttctgcataacgggagatgcgcagatcattcagaaggattttgtacgtgattccgtcatcgggattggcgcagagaatggaatcgtctaacagaatatactcatcggttatctccgtaatcttaccgacaatggtattctgatacggctcatactctgcttcggtggaattctcttttgcatatttgataatcttactggctgcatcttctccgatattgaagaggtattggtaattaaaagcgtttgtccacagatagccatctacagtaacatacatggcaacttta

SEQ ID NO: 11126 - DNA, 9674 bp, Unknown
  gut microbiota DNA sequence
tactccatcggcggctttccgcacaatatgccgcagcatgccccagcggcggccggttcaaccccctcacaaattcaaaggagaatattcttatggatatgacgacaaaatcctgccgtgaatttgtcacggtccttgcttccaacgagcctgctcccggcggcggcggcgcggcggcccttgtcgcggcgctcggcacagcgctgggcaatatggtcggctccctgaccgtcggcaagaagaagtatgccgatgtcgaggccgagatcgtcgccctgaaggccaagtgcgatcagctgcagagcgagctgctcgatcaggtccccgccgatgccgagggcttcgtcccgctggccaaggcctatggcatcccgaaggacgatcccaaccgcgcggccgtgcttgaggaagccaccatcaccgcctgcaaggtcccaatgcacatcatggagctgtgctgcgagtccatggacgccattgccgtctttgcggcaaagggcagccgtctggccgtgtccgatgcgggctgcggcgccgtcattgtcaaggccgccctgcaggccgcgtccctgaacgtcttcatcaacacgaagacgctccagaaccgcgaaaaggccgaggaaatgaacgcctattgcctgaagatgctcgatacctgcggcaaaaaggccgacgagatcttcgagaccgtcaagaacggcttcttcaagtaatataatataacgacattcgcgagggcagggcttaccccgcccggcgctgcacctgcgcaataaacggactgccgttaaaatggtgaagaccaaaggtttgtcattgcgaggccccaaaggggccgtggcaatctcgcagtacccggttggatcactggaaactcccggcgaaatcgtaattgcctgcgtgagattgccacgtcgcttcgctcctcgcaatgacaaacttgagagcctcatgtcgcagaaataaggcggtgcatgtcgccggcccttccaaatttcaaacccaaatcttatctcaaaaaggagaaaacatatcatggcaaagcagttactgggcaaagaagttaccgatgcactgaatgcaaagctcatcgagcgcgcaaatgcgctgaaggaaaagggcgtcgtccccacgctcggcatcgtccgcgtgggcgagaaccccagcgatctgtcctatgagaagggcgcaacgaagcgcgccgagctcatcggcatcaacgtgcagaagtttgtcctgccggaggatgcctccaaggaggacctgctcaagctcatcgacgagatcaacgccaacgacgccatccacggcgttctgatgttccgtccgctgccgaagcatctcaaggctgaccagaacgagatctgcaaccgcctcgacccgaagaaggacgtcgactgcatgaccgacctgtcgaacgccggtgtgttcgagggccgcagcgatctgggctttgccccctgcacccccgccgcctgcatggagatcctggactactacggcatcgactgcaagggcaagaacgccgtcgtcatcgggcgcagcctcgtcgtcggcaagcctgctgcgatgatgctcatgggcaagaatgccactgtgaccgtctgccacaccaagaccgtcaacaccgccgagatctgccgcaaggccgatatcctcgtctccgcagcgggcgtgctgaactccctgacgaaggactatgtccgtcccggtcaggtcgtcatcgacgtctccatcaactgggatgagaacaagccgaacgcgcgcggcggtctgggcgccattgcgggcgatgcggtctatgccgaggtcgagccgatcgtcgaggccatcacccccgtccccggtggtgtgggcagcgtgacgacgtccgtcctcatgaagcatgtcatcgaagctgccgagcgcgtctgattttcggacgggaaagttgagagagaatcatgcataagctgaagcagctttcggcgagcagcttcctcaggcttctgttcgccgcatttaccttcgccttcttatgctccgccttcatcgcgccggaccgcgcggagatgttcaccggtctgcgccgcatcatgacggagtcctcgaaggtctcgaccaactattttgataacggcggctacgccggaacgttcctgaatgcgggcctcgtctgcctcgtcctcacggccctctacagcctcccgaaggtcaaggtcaacgccacgtcgtgcctcgcctttctgctgacggccgggttctgcttctggggcgtcaacatcctgaacctctggttcggcttccttggcgtgctgctgtactgcctggtcaagcgcgaaaatcccgcgaaccagatcaacgccatggtcttcacgaccggcatctgcccgctgttcacggacctgatgatccgctatccccatgcggatgtcgtcggcttccgctggcagggcatcctgctggcggtcgccatcggcctgttcatcggcttctgcctgcccgccgggctggtccactcgccgaaaatgcacaagggctatgacctctattccgccgcggtgcccgtcggcctgacggccttcttcgtccgcgccctgctctatcaggcgctcggcggcacgctgcccggcggcgcgagcaccgatctcggcgtctcgagctggaatgtggccaatgtgttctgcttcggcgtgttcggcctgtgcattgtcggcgcgctcgtgctgggctgccgcccgaaggactactggcgtctgctccgcgaccccggctacagcgtcgacttctcgcagaagtacggcaatgccgcgttcctgatgaacgtcggcatctacggcctgttcatcgtgctgtattataatctggtcggcgcgacgttcaacgccgtgacgttcggctgcatcttctgcatgctggcctgctgctgctccggcagccatcccggcaatgtctggcccatcatggtgggctatgttgccgcgtcgttcctcggcaagtggttctgtgtcggcgaggcctatacgcaggccatcaacgcgcaggccatcgtcgtcggcctctgctttgcaaacggcctttcgccgatctccggccgctatggctggccgttcggcatcctcgccggtatgctgcacttcacgctcgtcacgagcgtgcccctgctgcacggcggcttctgcctgtataacggcggcttcacggcggcgttcgtgtgcatgttcttcatcccggtcttcgagcacttcttccgcacgaaggaggagcgcaggctggcgaaggcagagcgcacggcaaattcccaataatgctgacgggccgcccgggataaccccgagcggcctgtatcattggggcgttgtaggggagcggcgtcctcgacgccctgtgccgcactgtcgtctcgtaccagctgtcgataaaaacggcatgcaccgattgcgtctgtgcgtttcacgctccactctgtcactgcccgccggaacatcccgctttctttcccgtctaacggaacagaacatccaaggaggaattttctcatgaaacagctcattcccgcgctgctggctgcgctctgcctgctgctggcgtcctgcggcacgtcccctgccgccacgctccccatggggacggacgaaacgcccgtcgaaagcgaggcgtctgaatccaccggcccgtgggcgccgaccggcgagcagatgcagaaggaaaacgccgtcaccgacctgctgaacgagagcggcgagggctattcctaccgtatcccgcagctgaactgccagacgcaggacgccgagcttatcaacaccgccatttccgacgagcttatgccgctcgtcgatgaggcccacaccgcgcaggcacagggctatgacccgacgtgcgtcgagatcggctgggagagccactggtgcggcgacgtgctcgtgctcctcacccactcgtcctacccgaacgactgcgcctatcatcaggtctactgcttcgaccgcatcaccggcacgcgtctgacgaacgcgcagatcctcgacctgtgcggcgtgacgcaggcggaattcgaggctggtgcggccgatgccgccgagcgctgcttccgctccatctatccggacaccatgggcgacgacgcgctctggcaggagcagctcgaatggacgcgcagcgccgaaaatgtcaatgacgatatgatgatgtaccctgatgagaacggcaagctcatgctcctgtcccccatcggctctctcgccggcgcgagctattatgagcatagctaccccttcgccgggtgaacggaagaaagtttatggagcgtatccgtgctgatacgctccatttttgatccatatggggcagcccttggttctccctctgggagagctgtcaccgaaggtgactgagagggccttgcagccgcttttgcatggcagtatcaagcaaggggagagctgagttcccctctcaggcggctgcgccgccagctctccctaagggagagccaagcagcggttcatactgcgttttaatatccgtactttttccgcttcgccagcaggaagaccgtcgtcacgagcacggccatggtttccgcaaacacgatggagagccagatgccgtccagctccagcacgagcggcagcaggagcacggccgcgatctggaacacgagcgtccgcagaaacgagatgagtgcggacgtcaggccgtcgttcagcgccgtgaagaacgacgagccaagaatggctacgcccgcgagcaggaacgagaaggagtagatccggaacgcgcgcaccgtcatggccagcagcgcctcgtcgtagccgacgaagatctgcccgagcggccgcgccagcgcctcgcccgccgccagcatcgcaatcgagctgccgccgatgagccgcaggctcttgcgcagcaggctgtgcagctccggccggttctgcgcgccgaagtggaagctcaccaccggcgacacgccgacggcgtagccgatgaagcacgcgtggaagatcatgctgacatacatcagcacgccgtaggccgcgatgccgttctgcccgccgtagcgcatgagctgcgcgttatagagcataccgacgagagacatggaaatattgctcatcagctccgacgagccgttgccgcagatgcggccaagcgcgcgcccgtcaaagcggaagcgcgtcagatgcagctcgctgcggttccactttccgaggaaatagaggagcggcagcagcccgccgacgcactgactcagcgacgtggcgacggccgcgcccgcgatgccccagcggaacacgccgacgaacagcgcgtcgagcaccatgttcgtcacgcccgccgccacggtcaccgcgaggccgagcttcggcttgcccgccgtggcaaacaggcactgaaatgcgaactgcagcacataggccgggttcgcgatcaggatgagcctgccgtagcgcacacagttctccagcagctcgccctccgcgccgagcagctccgccacgggccgcagcagcacgatgccgagcacaccgagcgccagaccggacagggccgtcacgcagatgaccatggaaaacagccggtcggcgtgttttctgtcgccctcgcccatcgtcttgccgatgagggcgctgccgccggtgccgaacaggaagccgacgcagccgagaatcatcagatacggcatgatgaagttcacggccgtgaatgcggccttgcccgcaaaattcgagacgaaaaagccgtccgtcacgcagtagatcgacgtaaagatcatcatcacgatggacgggagcgtcacgcgcagcaggcggcggtagccgaagtggccggaaaatgtgctgttcattcctgaccccccagctccggcagcttgcagcggaatgcctgcagatagcgctccatcagcccgagatattgctgcacatcctctgcgggccattcgtcaaagatgctgttttccagccggatcaggcggccggccgtggcatctgccacgcgcagccccgcctccgtcaggcagacgcgcttgctccgcgcgccggacggctccagatataaaatgccgtccgcctcgagcttgcgcagggcggagttgacggtctgcttgctcagaccggtgctctcacagacggcacgcagcgacgcgggcgagccaagctcgcacagggcgtagagaatgcggctcgtgctgtcattctgtccctgtcgctgcgcggcctcgtgataggccgcgtccatttcgctcagcaggcagttgaggcgcttcagcgccggggaacgatattcatgcataatgacctccaatgtccgaaatcataccataatattatagtacgatttcggacaaatgtcaagcccaaaacaaccccccgcacgggatgtcaatggcatcccgtgcgggggagattcccgttccggatcaatagccgggcttacccagcaggtggaacatattcttcttatagaactcgacgccgggctggttgaacgggttcacgcccagcatataggcggagatgccgcacgacagctcgaagaagtagaacagctcgccgagcgtatcggcatcgacctcgtcggtctgcagcacgatgttcggcacgccgccgtcgacatgggcgctgagcgtgccctggaaggcctgctcctcgacaaagtcgagcgtcttgccctcgaggtagttcaggccgtccagattcttccagtcgacctcgatggtcgtgcgtttgcgcggcggggcaaagcggacgatggtctcgaagaggttgcgctggccctgctggatcatctgcccgagggagtgcaggtcggccgtgaattccacggtcgcggggaacaggcccttgccgtccttgccctcgctttcgccgaacagctgctgccaccagcccgcgaagtagcggaagctcggctcatagcagcccagcagctcgatggccttgccgcggcggtacagcaggttgcggatagcggcatactgccacgcggggttttcaaacgagcggatgtccagctccttgcgcgcgcgggccgcgccgagcataacatccatcggggcgatgcccgcaacggccatcggcagcaggccgacggcggtcagcacgctgtagcggccgccgacattcggcgggatgatgaaggactcgtagccctcctccgtggccatctggcgcagcgcgccgtgcttcggatccgtcgtgacgtagatgcgctttttggccttctcggcgccgtacttgcgctcgagcatccagcgcagggcgcgggtggcgatggcaggctccgttgtggtgccggactttgaaatgatgttgatggagaaatccttgccctcgagcagctcgcacagctcctgccacgcgcgggtagacaggttattgcctgcgaagaagacctgcgggtcggaatccttcagattgtggttctggcccttgaccagctcaatggcagcgcgcgggccgaggtacgagcctccgatgccgacgacgacgaacacgtcggaatccgcacggatgcgctccgcggcgcggcggatgcgctgcagctcctccgtctcctcaaacgtgggcagctccagccagccgagaaaatcattgccgggaccgcggccctcggccagcgtcttgtgcgcggcgaagacctcctgctccgtggcgagcagatcaggcagggacaggtcgccccagacattcgaaagatcaacttttaacatggacaccatgctcctttgttcagtatctcccccttatgttatcgcaaaacggccgaaaacgcaagtcacgtcggaaaaaaactgccgcagcagtagaaaaaaatgctgcggcagtgtataatgagagcaacagatctcgcggaaagttgtaggggagcggcatgccgctcccggcaacgcacttgcagccagtacaggctatcgttaaaatggcactggggctccgatttgtcattgcgaggaggccgtaggccgacgtggcgccctgagcgcgaagcgcgaggaagtgcccttggggtgcaatctcgggaaggcacttgcagttcgtacagggcgtcgataaaatgcacggatcaattgcgtctgtagcggcgctcactgcgcagccgttggcggctctgccgccttacggatgcggcgtgccccttgcgggtagtgagcgccttgcaggctggcaatatttgaggtatgtattttatggcgtgaggtccccaggtttgtcattccgaggagcgaagcgacgtgggaatctcgcagaacccggttgaataacagaatactcccggcgaaaacgtaactgccttcccgagattgccacgggcgcaaagcgccctcgcaatgacaattcggtggccagtgccattttaacgacagcctgtttattgcgccaatgcagcgccgggccgggctgtcccctcccctacaacgcatgacattatctctgcaaatacacacaacaagtgaggtagcttatgaaatacggattcggtgtcgacgtcggcggaacgacggtcaagctcggtctgctcagcgaggcgggcgagcttctggaaaagtgggagcttccctcgcgcacggaaaacggcggcgagaacatcctgccggacatcgcgcgtagcgtgcaggactgcatggcccgccgcggactttcgcgggacgactgcctcggcctcggcatcggcgtgcccggcccggtggacgcctccggcatggtcaaccgctgcgtgaacctgaactggggcgtgttcaacctgcatgatgccctcggcatcctgacgggcctgcgcgtgcgcgccgggaacgacgcaaactgcgccgccctcggcgaattctggaagggcggcggctccggctgccggtccgccatcttcgtcacgctgggaacgggcatcggcggcggtgtcatcgtggacggccgcctgctcacgggcgcgcacggcgtcggcggcgagcttggccatatcgagatcagtgcgccggacaaggccccctgcacctgcggcaagcgcggctgcgtcgagcagtatgcctcggcgaacggcatcgtccgcgtgacgaaaaaacgccttgccgaatcggctgagccgtcctgcctgcgtgcgatggagcactttgcctgcaaggacgtgttcgacgccgcccgcagcggcgacgccttcgcggtcgaaacgctcgagcaggtgttcgactatctgggcgaggcactggcggacgcctgctgcgtctgcgacccggagcgcatcatcctcggcggcggcgtgtcccgcgcgggcgactacctgctgcgcggcgtcgagcgccatttccgcctgcacatgttccacgcctgcaaggacacgcagttcgcgctggctacgctcggcaacgacgctgggatgtacggcgcgttccgcctgctggcctgatttttccgcataaaaagagccccctcccgccaaactagcgcgggagggattttttatggaacgaaaagggcgaaagaacgagctggcggacccgcagctgcccgccatccgcagcatcgcggacggccgcgccatgccggcgtgtcaggcccccgtgccggagagactggagaagccggataaataaaattgtaggggaggggcatgcccctcccggcgccgcacgaacgactcgtgccagttgccgttacaatggtgaacgcccccgatttgtcattgcgaggccccaacgg

SEQ ID NO: 11127 - DNA, 1007 bp, Unknown
  gut microbiota DNA sequence
ctcacgccatttcatttgtgccacagccattgccggtctgcaaggcgctcatcgctgcctaaattccgcaaattttatcatagcacgccgcaggatggaatgcaagcctgaaatagggcaggagttctcccttacatgccgcgatatccgtcagcgcaggtagccgctgtcgcgcagcgacacaaagtcgtcatccgcgatcaccagatggtccagcagcagaatgtccacgacgtcgagtgcctgctgcaggcggcgtgtcagctccacatcctcgtgcgacggcagggcaatgcccgccgggtggttgtgcgccagcaccacgccgctggcattcgcgctcagcgcagcgcgcatgagcttgcgcatcggcacgttggccgagttcacgctgccctcgctcaggcaggtgcaggtcagaagccgcccggcggcgtccagcgccagcaggtagacgagctcctcccgcgcgccgtagaaaaacggcagcagaaaattgccgaaatccgtcgtgcccgtcaggcgcgcgccggaaaatggccgggagaggtagtagcgccggtgcagctccgtcacgagccgcagcagcagcgcccgcgatgcatccatcccctccacgctggccagctcctccggcgaggcggagagggccgcgccgagcgagccgaactggccgatgagccgcgcggcgagcgtccggggctcctctgcgcccgtgcccgcgtgcagcagcagggtcagcagctcctcgtccgtgagggcgtccggcgcgcgctgcaaaaagcgccgcagcagattggccgtggatccgtccatgggatcgcctcctgtgtgttgatggaatatggtaggggagcgacatgccgctcccggcgctgcattgacgataggaacaggcttccgataaaaacgtaccaaccgattgcgtctgtagcggcgctcactgcgcagccgttggcggctttgccgccttacggatgcggcgtgccccttgcgggtagtgagcg

SEQ ID NO: 11128 - DNA, 2298 bp, Unknown
  gut microbiota DNA sequence
attgcgtctgtagcggcgctcactgcgcagccgttggcggctttgccgccttacggatgcggcgtgccccttgcgggtagtgagcgccttgcaggccggcaatgattgcggtacaaattcagtggcgtaatgcccccaagtttgtcattgcgaggaggccgacggccgacgtggcgccctgagcgcgaagcgcgaggaagtgcccttggggtgcaatctcgcggtacacagccggataacagggtactctcggcgaaatcgtaactgccttcccgagattgccacgagcgcaaagcgccctcgcaatgacaattctgatagcctcgcgccgccgaatcactgctgcaatacctgcaactgccataggcgctcagggagcgccgctacagacgcaatcggtgcgcaccatttagacggcactctgtgccaactgcaagcaactgccgcgtcggcccgttggcctccccgcaatgacaaatctgagagccctgcattttccactttcccacgatcctgtcttctttcaggaggaactatgaaacacaatctccacgccattcgggaagggaccatgaaggtcgtcttcctgctgacggcctgcatctccatccttgccgtggcgctcatctgcattttcctgtttgccaacggcatccccaccatgcataagatcggcctcggcaaattcctgttcggcatgacctgggcgccgaatcagaacctttacggcatcttccccatgatcatcgccagcatcctcgtcacgggcggcgcgatcctcatcggcgtcccgctgggcctgctgtgcgcgctgtatctggcgcgcttctgcccgaagcgcctctacagcgtgctgaagcccgccgtcgatctgctggccggcatcccgtccatcgtctatggcttcttcggccttgtcgtgctcgtcccggccctgcaggccatgttcggcagcggcaagagcatcgtcacagcctccatcatgctcggcatcatgatcctgccgaccatcatcagcgtctcggaatcgtcgctgcgcgccgtgccggagagctattacgaaggctcgctcgcgctgggcgcaacgcatgagcgcagcgtgttctccgccgtgttccccgctgcgcgctccggcatcctcgcgggcatcatcctaggcgtcggccgcgccatcggcgagaccatggccgtcgtgatgatcgcgggcaaccagcccatcctgcccaagagcctgctcagcggcgtgcgcaccctgacggccaatattgtgctggagatgggctatgccacggacctgcaccgcgaggccctcatcgcctgcggcgtggtgctgttcgtgttcatcctgctcatcaatctgtgcttctccgccgtgaaacgaaaggctgacgcaacatgaaaaaaacggaacgttcgaaaccgagcgccgggcgcacgagccgcgcgtcctaccgccgccatccgatgtcgcttgtccagcgcatcgccgtcacggcctctgccgtgatcaccttcgccattctcgctgcgctgctggcctatatcctcatcatgggcgtgccgaacctgaagccgggcctgtttgcctggcattatacgtcggacaactgctccatgacgcccgctatcatcaatacgctcctcatggtcgtgctgtcgctgctgctgtccgtcccattcggcatcggcgctgccatctacctcgtggagtatgccaagcgcggcaataagctcgtcaaggtcgtccgccttacggcagagaccctctcgggcatcccatccatcgtctacggcctgttcggctacctgatgttcgtcatcgccctgaacatggacaagtccatgctggcaggcgcgctcacgctggccatcatggtcctgccgaccatcctccgcacgacggaggaggccctgaaggccgtgcccgattcgttccgcgagggcagcttcggcctcggcgcgggcaagctgcgcacggtgttccgcatcgtgctgccgtcggccgtgcccggcatcttctccggcatcattctggccatcggccgcatcgtcggcgagacggccgccctcatctttacggccggtacgttcagcggcgtcgcgggcggcgtcatggaatccggccgcacgctggcggtgcacatgtactgcctgctcaacgagggcctgcaccgcagcgaggcctatgccacggccgtcgtgctgctggtcatggtcatcggcatcaacgcgctgtccggcgccgcggcaaagcgaattgcccggcgcacgcagtgagcgcaacaggaaggagttccc

SEQ ID NO: 11129 - DNA, 6700 bp, Unknown
  gut microbiota DNA sequence
aggtcctgaataaaatcatgcattctataagttttgctcttagcttcactcaagaatttctcgttggctattcttcacaatctcagcttttacactgacatctcaaagaacaacttgttttttcatcaaattgtccaaggtgtttgttcatgtttctcgttgtttaatttacaaggtacaccggccattcgcacagcctatttgaaaagtcatccggacttcatcgggctcgcgccctccgttccggagcaacttctacattatagcacgcattgttcagcttgtcaagcacttttttcaatttctttcgaaatcttttgttgtttgacgccctgtctcaagcggctccgctattctatcaaataaccacccgaatgtcaagcatttttttgatttttttgcaaattttttacggacgctacccatagtgctaccaatggcacaataccccaacatatggcggctgcgacagcctgcaccccctccggcaggaccgtgcccgcaagataccccgtgcagccgagcaggaaatttccgatgcctgtgcgccttttccacccgatcgcccgcgccgtcttcgcattggcgaggcacagcacggaaagcaggcagaagccccccgccgtcagcgcggccgacacgaccggctccaaccgctccatcacgccgaagacggacacgctcttggccatggtatagaccgcgaaggcctcctcccctgccacgcggggcgagagcgtgcctgcggcgcacagggccgccgccgcacagaggccgatccccgccgcgagccagccgcccgtcctccgcgccccgccgcgcacatagagcacggccatgggtgacagcgccgccgtcatggcggcaaagggcacacgtcccttctgcggcgcgagccacgccgcgcgcacctgcacggccgaaaagcccagaatgacggcctcgaccgccgtgaggaagaagaacaggatggccccgctgcgcaggacggcctcctccccgcgctctgcggcataggccgccgccagaagcagcaggagccccgtaagcggctcgccgcggctctccggatagatggcgcacagcgcccgcgctgcacctcccagcagcagcgagccgccgaggaggacgagcgcgtgcacggctcttcccgcccggccgaatgccgccgggatgacctccgtcagcccgcccggcgcgcagcgccgcccgcagaggccaagcagcagcgcggagatcgctgcagccgccgtcgcccagacccagccgaggcgcggcagatacagaagcgccgggacggaagctgccgccagcgtcacggcgcagagctgtctatcccgcatggctttcctcccaatcgggcagggccgtgcccggctccgcccgcagcaggccgaccgtcacggggctggcgtgggcctccagcaggtcggacagcccctccgggtcggtcaggcccccgctccggcgcacctgcgccgccgggcgcaggatgccgctttccagcagctcgttcacgaggcggtccgtcttcccgcacagcacgacctgcccggccgtgtcgaagtagacctcgcccggcgcagccatgcgcagcgcggccacggcgtcgtcccacgttgggccgctgccctcgcccgcctccgtgacgatgcgcacgccggcttccgtccgctcggcctgcacggtctgcaccggcaggagcgtgcgcgtctcgtgcgtgcggaacggcaggccgcagcacaggaccagcgccgcagccgcaagaagcgtccatttcatcgcttttccccctgattgcgccggtcgagcggccggagcagcggatctctcagcggttcccgcacgaggcgtggccgcagcagggcgcgcgcgccgccgacgccggaaaacggcgcaagataagagatcccgaacgattctagacctgccagatggacgacgaggcagatggccccgagcgtcaggccgaacagcccggcaaggctcgccgccgcggccagcgccatccgccaaacgcgcagggcgtctgcaaagctgcgccccggtatggcaaagccgcagatgcccgccgccgccacgacgatgagggccgcgggcgagatgagccgcgcctccacggccgccgagccgacgacaaggccgccgatgatggaaaggctctgccccacggactgcggcagcgagacgcttgcctcctgcagcagctcaaaggcggccagcagcccgagcacctccacgatggtcgggaacggcacagcgcgcttgctctctaagatcgactgcagcagctccgtcggcagcatctgcgggtgaaaggccgccatcgcgacatagagccccggcagcagcaggccgagcagcagggcggcatagcgcagcacgcgcaggaacgacgccgagacaaaatccgtgccccggtcctcggccgacgtcatgagatagccgaggtcgaccggtgcgagatagcccagcggcaggccgtcgacgagcaggccggcgcgcccctcgagcagggcctgtgcgaagcggtccgtccgctccgtgtactgcagcagcggaaaggccgtcggccgtgagccggtcagatattcctccacggcagcaggcgtgagcaggccgtcgatgtcgatgtccgccagacgcgcctgcatgcgctgcacgagcgcgggatccgtcagcccgtcgatccataccagcgtgacgttcgtcaggctccgccgccccacgaccgtctcatacagccgcagcgccggcgtgcgcaggtggcggcgcagcaggcccgtgtttgtgcgtaccgtctccgtgaacgcgtccttcgggcccttgaccgtgttctcgacctccggggccgagggcgagcgcttttcgcccgtcttcgtctcgaaggcaatggcccgctgcccgaacagcacgaccgtgaagccgttgacaagcttctccgccgtgctctgcaggtcctcgcacggtaccgcgacggagttatagaccgtccggtgcagggcgcggtcatagagctcgtccatcgtgccgccgaatgcgtcctgcataaggggcttgacgacgtattccgacgcgtcgccgccggatgtgatgccgtcgatggcgtagacatagaccgtcagcgccccgatgcgcacctcgcggcggttccagtcaccacagcagccgaaaatgccgcagatatgttcatccgtcatcgcgcccgtgtaggtcccgtcgggcagacggcgcagcttctgttccatgcgtgttgtccctccccgcagcaagtttccccgccagtgcaggcggttatgcacaggaaagggaaaatttgtggaagaaaacgtgaaacgcggagcgtggaatttttcgcagggccgccgaccgtgcgttgtaggggaggggcatgcccctcccggcgcaatgctgccgatccgtacaggccatcgttaaaatggtatgcacttccgaattgtcattgcgaggaggccaacggccgacgtggcaatctcgggaaggcagttgcgttttcgccgatagctttcccacgatgcggccgggtactgcgagattgccacgtcgcttcgctcctcgcaatgacacgtcaggggagcgcgaggtgcaccagtgccctcctgcggtttaatttccctgtacaaggcgctcactccccgtaaaggggacgccgcatccgtaaggcggcaaagccgccaacggctgcgcagtgagcgccgctacagacgcaatcggtgtgtaccactttatcgatactcaatgcgagctgcaagcgttgcgccgggcgaggcatgcctcgcccctacaacgcacgactggcagccctgcagcactttccactctccattttccacgaaaaaaatcccggacctgtgtccgggaatttttttctcaattttccattcaaatactcaaacctctaatttcgccgtcagggtctcctttgcgccccagcggtccacgacgggctgcaccgtgtccttcaagaagcgcgtcacctgcgacgggcagcagccgatgaaggcccgcgggtcgagcatctgctccagctcctcccggctcagcgggaacagcgggtcggccgcgatgcggtcgagcaggtcgttctgcccgccctcgagctttacacgggcggccgcggcgtgggaatgcacgcgcagagcctcgtgcagctcctgccggtcgcctccgcgcttcacagactccatgaggatgttctccgtggccatgaacggcagcttctccatcacgcggcgggcgatgacgcgctcatagaccacgatgccctccgtgatgttcatatagatgttcaaaatggcgtccgtcgccaaaaatgcctccgccacggaaagacgcttgttcgccgagtcgtcgagcgtgcgctcgaaccactgcgtgcccgccgtgaacgcggggttcaggctgtccgtcatcacatagcgcgccagcgcgcacatgcgctccgagcgcatggggttgcgcttgtacggcatggcggacgagccgatctggtgcttttcaaacggctcctccagctcctcgaacgactgggcgatgcgcaggtcgttcgcgaacttcatcgcgctctgggcaatgccggacagggcggagaggaagtagctgtccaccttgcgggaatacgtctggccggacaccggcacgacgcccgcaaagcccatctcgtccgcgatcaggcgctccatctcctgaattttgccctcgtcgccgccgaacagctcgaggaacgaggcctgcgtgccggtcgtgcccttcgagccgagcagctgcaggcgcgacaggcggaactccagctcgtcgatatccatgagcagctcgttgatccacagcgccgcgcgcttgcccacggtcgtgagctgggcgggctgcagatgggtgtagccgaggcagggcgtgtccttccagcggtcggcaaaggccgagaggttccgcacgacctgcacggccttcttcaccacgagctgcgcggcctcgcgcaggatgatgaggtccgtgttgtcgccgacgtagcaagacgtcgcgccgaggtggatgatgcccgccgccttcgggcactgcaggccgtaggcatagacgtggctcatcacgtcgtggcgcacctcgcgctcgcgggcctcggcctcagcatagttgatgtcgtcgcggtgggcctccagctcggcgatctgctcatccgtgatggcaaggccgagcgtcttctccgcgcgggccagggcgatccacagccgccgccaggtgcggaatttgaagtcctgcgagaaaagatactgcatctccgcgctggcatagcgcgtggagagcggggaaatataacggtccgtctgcatgatgttctcctcaaacgcctaaattctgattccgattcacgatccgggtcgtgacctcgccgctccggcggtcgataaaggccgtgaagagcgacacgcggttttccgcgtgcaggccgtaccacaccgccgcggtgaagtcctcctgactgccgcagatggtcacggcgcgcggctctccgcagaaggacggcagcggcgtgccgtcgccctcgtaggtgtagatgatgtgtcccatcccggcgcgcggcacgtcatagtcgaagacgctgcgctggcagcagcgcgggctgccctccatcgccttgaggatggacagggcatagtgcccgtccggatacagcaggcccgagatgcgcggcgtgaagtccggcgcgtcctgcttgaacgtgctggcgcgcagcgcctcctcccacgggcggccgacggcgaagcagtcgcggatggcgtcggtctggtcgccgttcgagacgacccacgcctctccgatgcgccgcaccgggttatagaggatgcccttgggatccgtcataaccgcagggtcgaaggcctgcgcgcggatgccgtcgtccgtccggacaaacacgcggttgcggctgttggcgctgcggcccatgatgaaataggccagcacgctgcaccggtcgtcgccggagcggccgagcacgatgccgcggcccggatagggattatcccgcagcagacgtgaaatgtcatacattctgattctcctccctgccccgtctgaaaaaaaacggcgcacctgccgcaaacgcaggtgtgcccagacggtcggcaacgaaccgatcctgccgcgcgatcccgaaaaccggatctgtatttttgaacgcgccgctttctctttgtgcctttattttatcacatttgcccgcgttcgtcaaatcccgccgtgacgaaataatcaacgaacgtttcgggttcccccgcggatttttgtgctttttccatagaacgaagatatttataacgttatgtgtagggacagagcgggatggaagtggaaagacgagaatggaaagtggggagctgcacgaggctttctgccgtgcattgtaggggaggggcatgcccctcccgacactgcatcggcgggaagtgcgggccaatgttaaaaaggcaatggcccccaagtttgtcattgcgagggcgctctgcgcccgtggcaatctcgggaaggcactcgcagcccgtacaagccgccgttaaaatggaaaaggccgaaatatggggtgtagcggcgctcactgcgcagccgttggcggctttgccgccttacggatgcggcgtcccctttacggggagtgagcgccttgcagggtggcaatgtttgcggc

SEQ ID NO: 11130 - DNA, 5467 bp, Unknown
  gut microbiota DNA sequence
cgcaggccgacgcggcaatctcagcagtacacagtcggatagtgggaaagcctctgcgaattcgcgggctattacaggagattcccacgtcgcttcgctcctcggaatgacaaatctgatagctttgcgctgccgaattactgctgcaatagctgcgactgcctatggcgctcactccccgtaaaggggatgccgcatccgtaaggcggcagagccgccaacggctgcgcagtgagcgccgctacagacgcaattggtgcataccgttttcacggcggccggtacgaatcggcagcattgcgccgggaggggacagcccggcccctacagcgcattgcgggaagctatgggaaaaactccactttccactctcaattttcgccgtccggcgggaggttatccccgaacaggtatctccagtaatcctggtcgagcacccatgccgaggcgcggaagcgattgctcacgtcctgattgcgctcctcgacctcctcgggcgacagctcgttgccctgcagcatgatcagctcgtccgacggggcataatacatcgcgctttccgtgatccagctatggtcgcgcaggaggacgaacggttccgcgtccgagaacacgtcccggcccatatacagccgcgagtcaaagtccagcccgaacaggttcgacagcgtcggcagaatgtcgagcgtgcagcacaggctgtccacccgctccggcttcatgccctttttataaaggataaaggcgttgcggtagcgctcgaaccgcgtgtcgatctcgtgcccggccagctcgctctgctcctcgtccgtcaggccgtagggatagtggtcacccgtcagggcgatgacggtgttctccgccacgccagcctcgtccagccgctgcagcagcagctccagcgcacggtccagctcgatctggcaggcgagataggcccggacggcgccgctgtagggcaggtccttcacaaggtcctgattctttttcgccatggcgttgccgttgaaattatactccagatggccggataccgtcatgtaatacgcatgaaacggctcgctccccatgtagtctgccgtcgtcttgtcgatcatctcgatgtcggattccggccacgtcgcctcgacgtccagcccgtttccgagcgcgcggtagacatagccgaggttcggatgcgacagattgcggtcataataggtataggtgtggtcgtgataggcataggcgctgtagccgaggcgcttgagctgctgagccatcgtcagcggcatggcgttctccgcgctgtcacggaacgaccacgttcccggcttcgggatcgtgccggtcaaggcggcatactcgccgtccgaggtcgaaacgtcccagtacggcgtgtagaagttcgtgaaattgaagccctccgtctgcagcttatagagcgtcggcgtcagctccgggtcgatggcgaggtacgaaaagctctccgccgtgatgagaatgaggttgcagccctgaaacatgccggtcttttcgttcttgttcgtcggcgtgcgcgaggagaaataggcgttcagctccgaaagcacgtcgtttccccccgtgggcacggcgtcaaaatccagctccagcacgttcgggctggtgtcgaccaccggctccgggaggacggtcggctccgtggcgtccgggagcgtcggctccgtcggggcctccgtcggggcctccatcggtgctttcgtctccgtcgccagctcgatctcgccgccctcaaagccgaacagcagccggtgcacgtccagccggaacgcgggcatcaggccgaggtgggccgtcgtctgcttcatgtcgttcgtgctgtgatagaggtcataggccgaaagcggctgcgtgccgaagaccggcagcagggccatcaggccgaaatgcacggcggcggccagcgccgcaaacgccgggagatacggaaggcgcagccgcgccgccgaaaagcgctttccgagcacggagtggcccacgggcggcaggagcatcaggctcagcggcagccagtttttgcggatggcgtgcagcgtgaccttccagaactgcatgacctgcccgccgtttcccatggaataggcagagtagaagcagtggaagatcgagtaatacacgagctgcgaggcaaagaagatgtagcaaagcccgctgcacaccggcccgagcacgcggttcgcgcgcggcgggaacaggcggcacagcgcaaacagcagcaccgccggaacgagcggatagagcatcagcagcacgagctccggctgccagaactgcggggccgtggccgcatggacgaccagctccataaagcacagctccgcccagaaaaacagcaggagccaccacggcccgaatttacgtttgttcatgtttgttttccctccgggatcaaataaattgtatgggaacttccttgcgctgcgggacttggctctccctttgggagagctggcggcgcagccgcctgagagggaaatcgaccctccccttgcttgctattgccattcaaaggtgcctgcgaggccctctcattcaccttcggtgacagctctcccagagggagagccaagggcgcttcgcgcctcacaatggcgcaaatggaagcctccccggcgaaaggggcgcggaaatccgtcccttacttatgatatttcgtccctgccaggatgctctccgcgcggtagagctgctcgagcgccatgacgcgcatgaggtggtgcgggaacgtcatcctgctgaacgacaggcggaaatccgccatgcgcttgatgcgcgcgtcgatgccgaacgacgagccgatcaggaagcacgccgcgctgcggccgttgagcttttccgcctgcaggcgctcggccagaccctcggacgaaagctccgtcccctccggcgtgagcacgcagaaccacgcgccgcgcggaagctttgcctcgatctgctccgcctcgtgcgcaaggcccgctgcgatctgcgtcccgttcggatcgtccggcaggcggcactccggcagctcgatcagctcgaatttgcagtaggccccgagcctgcggatatactcgtccgccgctgccgcgtaatagcgctccttgagcttgccgaccgtgatgagcgtgatgtggaacatcgcgttgtcctccgtcatttcgattttccgggcagcgccgcgcgattcagcgaaacccttccgctgtgcgggctgcctttgattttgctgatcattatagcaccttcgagccggtttgacaaccttcgaccggtaccttccaaaagaacgttaagaatctccgccattggatgtcctttttatataatgtgtctacttgcataacgaccgcttttgtggtaaaattagaaggaataactatgcaggaaaggagccctctatgtattccaacgcctatgtatggtcacgcgttctttcctatctggagcagcattccccggccattgcgatcgcctcgtattttgacgatgccgaggtcatcgagctgacggaaagcaagctcgtcatctactcgccgtcgccgttccgcaaggacgtgatcgtcaagcgctatatcgatcagatccgcgaggccatgcgcgaccagttccagacggaggtcgaggtcgtcgtcctcgacgagaccgagctgccgcagtactccaaaaacaagaaaaaccgcaatttcgtcgagttcaactcgcagtatacgttcgataaattcgtcgtcggttcttcgaaccagcacgcgttttccgccgcccgcgccgtcgcggataaccccgcggacgcctataaccccctgttcatctacggcgagtccggcctcggcaagacgcacctgctctatgccatcgccaaccagatccagcgcgagcacccggactataacatcgtctacatcaagggcgaccagttcacaaacgagctgatcgacgccgtccgcagcggcaagaacttcgagttccgcgacaaataccgcaatgccgacctcttcctcatggacgatattcagttcatcgcaggcaaggacgccacgcaggaggaatttttccatacgttcaactcgctctacgagaacaagcgccagatcgtcctgacgtccgaccgcgtccccggcgacatggtccgtctggaggaccggctgcgcacccgcttcgagtggggcctcattgtggacgtccagccgcccgattacgagacgcgcttcatcatcacgcgcgaaaaggcgctggagctgggcatcgagctgccgcaggatgtcgtggattacatctctgagaatatcacgaacaacgtccgtcagatcgagggcaccgtcaagaagatcaaggcctaccacgacctgaccggtatgccgctggacatcacgaatgtctcgcgcgccatcaaggatatgtataagggcaaaacgcaggccatccccacgccggacctcatcatcagcgaggtctgccgcttctactccatcgacgagagcaccctgcgcagcaccctgaagaacaagggcacggccgaggcccgccaggtcgccatgtacctcatccgcaagctgacgaacctgtcgctgcccgatatcgccaaggaattcggcaagaaccataccaccgtcctctatgccctgaaaaaggtcgagcaggagctgccgaattcctccaacggcctgcaggataatatccgcgatatcacgtcgaatatcaactcccggctgtaaacgcccggatgcggcaggttcccagacctgtcattgcgcagcttggctctccctttgggagagctggcggcgcagccgcctgagagggaaaatcagccctccccttgattgctatttccattcaaaagtgcctgcaagaccctctcagtcaccttcggtgacagctctcccagtgggagagccaaggacacttcgctcctcgcaatgacacgaaaaggcggcgcttgccattctggcgatggcctgagcttatcggcagcacctttcctgcccttttctgcccaaatttttctgcacaccccctgtgcaatgtgcagaagtttcctgttcacagcttttcgcccgatttttccgcacaagccctgttcagaacgctctcctttttccacagccccatgtgcatggccgcgcgttggtatctctgggcttgcgggacttttgcacataagttttgcctacggactacgaatactaaaaattatcctacctatcttctcagatagagaaagcgagtgttgttatgaagtttacctgtgaaaaagcgctgctggtctctgccctgtccgttgcgagccgcaccgtcgcacagaagagcaccattccctgtctcgagggcgtgcttctccgggcgggcgtcgcgctgcagctcacgggctacaatctggaaacgggcattaccgtccacgtcggcgcccagatccaggaggcaggctcgtgcgtcatgcccgctcgcctgttctttgatatcgtcc

SEQ ID NO: 11131 - DNA, 7882 bp, Unknown
  gut microbiota DNA sequence
agactttcattttgcattccccaaagccacgcgctccagcagcgcatgcagacgaacactgttatcggcctcgcgtctggcaactgccgcggcgcgctcaacgagctgccagcgatatggctcctgcgtcagaacggcctctatggcggcgggaagcgcctgacgggagcaggccagcgcggcgcagccgttccggcgcagataggccatggaggcgacatcctccggtccgtaggccagcaggggcctgccgctggcaaggctctcgatgatcttggtggagacggaatagcggacgcggtcacggttctctttgtcaaaggcctccacatggacaaaggcatcggcgccgtcaaaggctgcctgatatgctttcccggtgacaaagccgtgcatgcggatcgccgggcaggccgccagacgctccagcagctccgggtatttgtgatcagtatagatctccagcgtaaaatcggtcccttcctgccggttcagcgcgtccagcgtctgcccaagctccagcaggggctggccgcggccgcagccgaggttccccatgtaggtcaggcagcggtgcaaagcgtcgcggcccggctccgtatagggatgaacggcaaacggcgggcaggtcatcacgtccgtcacctctgcgccgaagctctcgtggtatcgcgccgcaagctcgggacagatcgtcacggtcagggcggtctcctgcagcagggccgcgattttgcggcgcaggcgcttctgccggagctttgcccaaaaggcattttgcccctgcaggaaatagaaatcgtcgcagatatagctcacgatcgggatatgccgctcgcgcgcaagggtcagcgcaatgtcgtacagcagctcctgcttgccgggtgcgacgaaaagaacgtcgggcctttcgcggtcgagccatgccttcaggctgggatgatcccagcggctgagctgccagatgagatcgcgggccagacgcatgggctcggagcggctgcggggcgaacgataggttcgctcctctttttcactggtgaatttatcgtgacacgccggatcagggctgatctccccgccgacggcatgccggttccagatggagtgcagcgcttcacgatccgtgaagcgataatagctgccgcagcaggccgtatccggtacggcggggtagaggtagagttgacaaagctcctccgggcggaatgcggaaaaaagggacagaaacgtcttgcccatgttgttataggtcgtgaccgggttgtgggagagcagaagtaccttcatcgtgccctcctgtgcttccgcagcgcatggcaggcatagactgcaaaaacggctgcggatttccaaattgacagcttttccaccctgcggtagatcagccagcggtttttggcggcatttcgcttgtcactggagcgggagccctttaccaaacggtaatccgccagcacctccgtgcaggcgatcgcccggtatccggccttcagaagcccgagccagaatacatagtcttcatgatagtattccgtcggaaagcgctgcccggcgaggatcgaacggcgcagcagcaccgtggagcagcttaaaacactttcccgcagcatggcctcgtagtccgtcgactccggaacgagaaaatcggacaggtgtttgccgctctcgtctatcagtgcataggagcagtagagaatatcaccgcgcgatgcaagagcaagctgcttttccagcttgtctgtatgccatacatcgtcgcagtccagcagcgcgatccattcgccctgcgccagagcaaagccgcggttgcgcgtctgcgccgcgcccaggttctttggattgcggaataggcgaatccggggatcggatttttcaaaggcctctgcgatctccgccgttcggtcggcagagccgtcgtcaaggatcagcagctcccagcgcgcatagctctgcgcgagaacggagcgaatggcagcgccgatatagggttctccgttaaaggcaggcatgatgattgaaacgagcggcagcgatgtttctgtggcgtgcaatgggcgttccttctctcagcgtagcttcttttccaaaagcgttttgcatttcttccaatcccggtagccgtctccaagcatatggatatcgctcccgaggtatttgacatagccgttttggatccattccagatatcgtctgcgtttgatcggcttcgtcaggcagacggcattgagctgaagcgggatgccctcccggatcagcctttcgatattttccttcgggtatcggtccgcatgggccagaacgatgcggacgtcctgccgctcacacagggcgaacagcgtatcccacagggaggacggccacgcgtaaaacggcatttccagcagcagctcgttcgtcccctccagacacaggcggggaaggtcgtcaagccgctccatgccgtcgcagatcaggacctcggcccccagcaggatgcgcggaagctccggcctgcgcggcagcgccgcggcgcagcgcgctctgcgctccagaaaggcggcggcgttctcgcggtgcgggtagaagtgcggcgtggcgcagacggtccggatccctgcctcggcggccatggcgagctgccgcagggacgtctccacgccgtcgctgccgtggtcgcagcggggcaggatatgcgcgtggtagtcgagcgtcaggtcgatcatggggtcactttgcgccataggactcactgtaggaatagcggtagccgtacttatcgccgtatttgtacttgctggcgtatttcacggatttcatgttcagaccgttcagcacgacgccgcagagattcccgcccgcgcggcgtacagcggcagtcgcggcattcagctcgtctgcagtcgtattgccggagcgtgccacgagtacgacgccgtcgacaaaggtcgagatgatctgtgcgtcggcgaccgtgttgatcgggggcgtgtcgatgataacgtagtcgtagtagtccgcgcagctctctacaaagctcttcatgcggtcggaggacagcagctcggacgggttcggcgggatcgtaccggtgcagacgatccagaggggcagctccgtaaccttcgccagctcgagctgccagatcttggcgaggtagtcgcacaggcccgtagaaagctcgaccttccagagacggcgttgcgttggcttgcgcatgtcggcatcgatcagcaggacacgcttgccgagcatggcatagctgatggcgatattcgcggcggtcaggctcttgccctcggagggcttcgcactcgtgacggcgaaggtcttgcagggccgcgccttgtccgccgtcatgcagaacatcaggctggtgcgaagcttgacataggcctccttcatggcgaagggggcgtcgttattcagaagcctgcggcgattgactgtgatagcctcagctgctgctttattattactctttttcatttttagcggcaccttcttccgttacggtccagtaagcgtagttgtcatcggcggaattgatgtccgggatctgcccaagcaccgtgacgccggccatagtttcaatatcctccggcagatagatcgtcgtgtcggcgagcgtccgcaggatcacgatgacggcggccaccatcacaccgatgatcacgccgatcgcggtgtcgaagacggtgcgcggggaggccttgtccgtcggtatctccggctggtcaacgatctcgacgccgccggccttcgtgatgcggacgatctcggtcggcgcgaccttggcgaaggcccctgcgacccggcaggcaaaggccgggtccgtcgaggtgatgacgacctcgagcagctgggtatctgtgataacagataccgaaaccatgccgctgaggctcttgcgcgacagcgatacatccgggccaagctcctgcagcacggcgtcgaggatcgaattgctggccaggatcttggaataggtcgtggccagactctcggcggcctgcaggtcaccgttgttgatcgtgccggactgcacactgttgttcgagctgttatacacatagaagctgacgcgggattcataggtcggcgtgatcaggaaggtcgtgaccagaaagacgcaggcacctgcgagaacgccggcaagcagcagccagtagctcttggagagcagcagcttcagaatatccagaagcgtgacctcgaccttcccgctgcctgcctgcggggactgtgtatcgttcatgtatgttcctccgatcctcatcgtgttttctcagcgtgcaccatcgtgggtaaaaatgagaagcgccgtttttacgatacattgcagatcgagccggatcgaccggcgggcaatgtattccatgtcatatacgatcttttcctcgggtgcgagctcgtagccgccgttgacctgcgcgtagccggtcaggcccggcgtgacgaccagccggttggaaaagccgacgatgtacttttcaaactgctcgtaaaagtatttccgctccgggcgcgggccgacaaagctcatctcgcccttcagaatgttccagagctgcggcagctcgtccagccgcgtcttgcgcaggagcgcgccgaagcgtgtgcagcggtcgtcgctgcgctcggcccattttggcccgtccttttccgcatccatgcgcatggagcggaacttgcagatcaaaaaaggcttgccgtctttcccgaggcgctcctgccggtagattggcccgcctggggaatccagcgcgatgatcgcggcgatgatccccatggggatggccagcacgatcagcgcgagcagtgcaaaggtaaaatcaaagcagcgcttgtagaccagatagccccggcgcgtctgtacctgcggaagctcgatgtatattgggagcgattcatcggctgcttccgcgaccggccgggaaagtgttgccgccatgctgcgtcatctccatcgttctctttctctcgttttcagcccctgtgcgcattccgaataacggatcgtgcgatccgttccttgcgaaagaccctgccgcggcgcttccgcagtttcgcagagtatgccactctacgagaatgctgccaagttttttaacgcaaatattataaaacgatgaactcaataaatcaatacaaagccgctctttttggcaattttcaccaaaaagcgaactgattttagacttataacaggtcattccttgtgcagcgccatactccgctgccggagacggagccgggtcgggcacagggaatcgactttcggatccgttaaaatagaagtacccgcaagggaaaacgaatctttgatcggaggaagcaacatgatcaactgcgaatggatccgcaagcagaagaaggaacggccgtccctcgggagcagtcccggcccgaaatgcaagccgaacgtgcggctccgggtaagatgcgccaatacggagcaaccctgcttttctgcgctgtgcgatgcctggctcctgcggaagcgagacgaaattcgggaatcaagctacatcaaataccgggcgatcctggagcggcatatcaagccgcggctgggcagccgcagattgggcggcatctgcaccgcgtcggtcgatgccttcacgcgggaactgcttgaaacggacgggctgtctgtcaagaccgtgcatgacatcctgtcggtcctgcacagtgttctgaaggatacggaggcaaggcggccggctggcgctctggcggtccagatccgttatccgaagggcaagcgccgggagatgcgcgtgctgtccatcgaggagcagaaaaggctcgttgcatatctgctgcaccccacagacagctgcaaattcggcctgctcctggcgctgtataccggcctgcgcatcggcgagctctgcgcgctgcgctggagctgcatcgaccttcgtgagcagaccatccgcattgcggctacgatgcagcggctcggcgggaccggagaaggcacgcggatcgtgattggcgcgcccaagagcgattcttcgctccggacgatcccgcttccggtgcagatcgcggtgctgtgcaggcatatgcagcctgcggacccggaggcctatgtcctgaccggaggcccggcctatatggagccgcggacgctgcaataccggctcaagcgctatactgccgcctgcggcctcgagggcgttcatgcccacacgcttcggcacaccttcgccacgcgggccatcgagtccggcttcgagttgaaatctctgtccgaggtcctcgggcacgctacaacggcgatcaccatggagcgctatgtgcattccaccttagagatgaaacgcacgaatatgaataagctcgccatgccgggactgtgcaatgcattggaataaagtgacatgcattcggctagccttgcagaagtttgccgaaaatcctgcaattttctttcactgagtggcatactctgcgaaattttcctcggaatttcaacaagagatgacacgaaatgcagaatttcttccgcggcagtgccggatttcgacgaaaaaaccgcaatgcaggaccgacaaaaaatcccgctccggggcagtgcacatgcaccgctccggagcgggaaatttatttgctttttacagcgcctcaaaatgatagcgcggcttgccgcggctcttcctgccgtactcgatggcctccgcggggcagcggcagatgcaggccatgcagtgggtgcagctgccgccccagacgggcctgccgttctgcagggaaatattgttggtagggcagcgctttgcacagaggccgcagcctgtgcaggccgggcctgcagtgaaggcacgatccttgacgaagcaggcgtagaagatcgggttcaccgggccgctcatcaggcggtcatagaggttgttccgggtcggcgggaagggaagaccctcccggagggcggcaatggcgcggtcaatgtccggctcggccttcgcgacgatcctgcgcgcttcatctgcctgcgggacgccgaacatggcgatatagttttcaggcatgacgatctgtgccgtgcccatgcaggaaagccccttcacgcggcagagctcacggttatagtgatcggcgctgccgatctcgccgccgcaggtcatgacgaaccacgcctgcttcgcaccccgaagctccgtctgcagcagccagtcgcggacgaggcggggaatgcgccaggcataggtcggcgtgacgataacaaggcgctcgccggtctccacggcggcggtgtcgtgggccttgatgcggtcgttcatgcagagcagcggctcgttcagcgcttccgccatgcgctgcgcagcatatttgctgttgccggtgccggaaaaccagaaaatcatatcaggatcccctcgcagtggtcgatctcgtgctggatgatctccgccgtccagccggtgaaggtcttcagccgtgtctgcagcatttcgttctgccactgcaccttgatggagcggaagcgcttcgtcttccgcgtgccgttcaacgacaggcagccctcctccgcctcatagggctcggactgccggatgatgacgggattgagcatgaccagataggccccgtcgttgtcaaaggcaatgatgcgtttgttcacgccgatcatattcgccgccataccgacgcagccctccttgtgtgcgagcagggtgtccagcaggtcctgcgccgtgccaaggtcttccttcgttgcaggctcggccttctgcgccagaaaggcctcgtccctgcagatctctcgaaccatgatatctcctccttgtgctttcttttattgtaacagtcttgcgagcaatgtgcaagagcatatggttcggaaaagcaggggagggactttcttgccttttcgggtggaatatgttattat

SEQ ID NO: 11132 - DNA, 14981 bp, Unknown
  gut microbiota DNA sequence
gttacaggcgccccgtcggaccacgtcatgccgtcctggatggtgtaggtccaggtagcggcatcctcggtagcataagttgccagaagcggatgatattcgcccttggtgtcctgataaaccagaggcaattcggatacaccgctggcaagcatatcgaagttatactcgccgaacacggcggtttcgatggcagccgtcgtgccgacggtcagcgtatcaatggcgtaggtgggtgccggttccgtggcctccgtggtcggagtctcggtgcttggttgggtggagggtgtctgggtgggttctgccggggtcttgccgcaggctgccagcgacagcaccatcagcaccgccagcaaaagagatcctacttttttcatttcgtgtttttctccttctgatttgtgtgtttcttctcaaatacatagatttgatcacaaagtaaattcaccagtgcttcatcgtggctgatgagcaggatgcttccgtggtgttcctgcatctgacggcgtaccattcccagcacattggcctgggtagaaacatccagcatggaggttgcctcgtccagaatcagcagctttggccggaacagaagacaccgggcgatggccacccgctgggcttccccaccggagatctgatgcggcagatgtgccaggatctgcggctccaatccgactttcacaagcacgtcttccgtcagcgcacgctccttccccttgggagcaaagccgtgatagcggatcagttctttgaagccgctgccgattttctggcgtggatccagcgtcgcatagggctgctgataaaccatctgaatggaaagacccagcttcctgtcatagggcgtattctgtgaaacaagacattgaccgtccagcagaatccgccctccgtccggcgggcagatgccgcagaggaccttggccagcgtggattttccgatcccgctttttccgaatatgccgcagatctgaccgtctggaatatccagcgtgacattttgcaaaacctgttttccgtcaaaagccttatcgatctgttccatggagatcattccttgcagcaccaccattctctgtctccctgcgtcctccggggcatttcggcacggcatcgtccgaaggctgcgggacagcggcgatagaagggacaagtgcccgtctccgtccgcaaagccggcgtttcctgcatcccgttttccaccaaggcacccagcagggcttgggtgtagggatggcgcggggcagccagcaccagtgcggagctgccagtctccagcattttcccgccgcacaggacaaggatccggccgcaggtcgctgccacggaaatgtcatgcgtgataacgagctttgccgcatccgggaacaggtcattcaaaagggacagcgtctgctgcttgctgtcctgatccaggccgttggtaggttcgtcggcgatcaacagcttcgcctgagagcaaagggccagtgcaatggttacccgctgggccatgccgccggacagctggaaggcataccggtccagaatagcctccggctgggtaaatcccacctgcgtcagcttttcacgggcaaacgcttctctcagaggtgccgcaatgcccagctttgcaatgctgtcaaacatctggcggcggatgcttctggacgggtcaagaaattcgtgaccgttctgcgggatatatacgatctcccggcccagcatggaccgcagctttttgcccttcggcaaagccttcccgcaaaataatacttcaccggaaaccagccgcacattgccgggcagcacccccatcacggattgggcaatcagcgtcttgccggacccagtctcgccaatgagagccaggctctccccgcgagaaatatggaaagaaaccccgtggaccagttctttttccgtgcggtccagttttgcggcgatcacgccgccggcatactgtaaaataggtgtttccaagtgttcctccgaaccggtgttgctttgcattcctgccctgcgcaaagacgcagcgctttcttccccaagaaacgctgcgcctttgctttgggttttggcaggaatgcgtgtatgaaccgatgagcatactataacagatgagattcccgggcggaagcctccccgggggatgttttttccattcactaagatagaatctgtgttcgcacttttttcttcgtatattctgtcaaagccttatgctgattgggccgaaaagtatcgcaaaaaagtcaaagtgatacgcattttcgcacggtcgaaaaaatctgctttcccaatgccgttatcgttgcggaccggttccacgtgatccgtcatgcgtcctgggcgatggagcaggtccggaagaacgagcagaacaagctctccagagggctgcgcaggtacttcaaacggtcaaagcaccttctccggaagccgatgaaagctctgagcagcgaggagcaggagcgtctggcgctgatggttgagatcgccccgaggctcgccgacgcctaccggctgaagaacgagttccttgccgtcatgcattcggagtcctcgaccgtcgggaagcagcggctgctcgactggctcgaggccgtgaacgttatggaccttccggaatttcaggcctgcgtcacggcgtaccgcaactggtttcagaagatcctgaactccatggacgtcccctggtccaacggcttcatcgagggctgcaacaacaaaacgaaggctctcaagcgcgtctgcttcgggatgcggaacttccggaacttcagaaatcggatccttttctgcagcggtgtaccgaaaaaaccgcgccggggctaagcaccccgacacggtcttggattaaggtatttttgttccgcgtatttcagcaggatataaggcttctttcatagccggtaaatatgttgttataggcttcttccaccagccaacggcggtcctcatcaagccagatccaccgcttaaattcttcattgatcaggcgctgcttttccatggcggcaagggtatcccgctcgttgtactccgttccgttatcaagcagcttgatctcccgcaagttcagtgtattttccatgatgcgcagtgcattgtatcgttcaagtccgtacttgaacatcgcaattttgctgtttaaggaggccagatacgcaggaaagtccgcagctatgaggatgtaattcagcgtaataatctgtggcgattcttccatccgctcagagaaaaagcggtcacgagggacgaagctcgctgattcctgtgtagagccggaaaaaacgcattttatcgaatgggagcgcgtcggacagggcagacattgtccggcgcgctcctgtttgaaaatcgccatttttcccaagtcaaaagccgaagaaaatccccgaaaaacacccctattgcgtgacagagccgcagaaaggataagcctatgagaacagggctgacccagcaggaaaaaaccaccgaaatctattttgacgagaaagaccccaccatcttcatccgcacccacaacaccgacctcaagaacaggctgaccgccccatacagagaggaacgccgccgggcagcaagcgaagcaacgaaataacgaataaaaggattttagggcttcgttgattgttgcgttggcaaccccaccgcaatggtagtgcccttctccgaacttttctctacccaaacggagccgccgtggagttcggcgatctcccacaccagcgcgagccccaaccctgcgccaccgtactcgcggctgcgggacttgtccacccggaagaagggctggaagatactgcgctgatgctcctccgggatgccgcagccagtatccgacacgcgaagcaggagcttttccggctcctgtgtgacagaaacccgtaccgagccgcccggccggttgtacttgacagcattctccgtcaggttgaagatcagccggtagatcagtgcgtcactgccggtcataatgccgtcgccctccgccgtcagtgtgacgccgcgcttatctgagagcggcgcgagatctgtgaagatctcctcgatcatgggggcaagctggatgcgctcgttccgtgccacctgctgcaaattgctcatctccagcagcgtcctggtcatctgcgtcagtctctccgtttgctcccgcagaagggtgagaaactctgccgtctgcggcagcatggcgggatgctctgcggaaaacagctccagctgcgcctgcatcagtgccagcggtgtgcgcagctcgtgggcagcgttgccggtgaactgccgctgggcggcaaaggcggtgttcagccgctccagcatctggttgaaggagtggctgagctgcttaaactccggaagcacatcttcatcgatcttcatatccgccagattgttcatctgcaccatttccacctgagaagcaaagctgcgcaggggcttgagggcacgtccactgacaaagtaggcaagaatgccgctgagcagcgttaccgcagccgtgatataccagttggtcgcgcgaaagcgcccctgcgccccatcgacgacgatggtcagctcatcgtcgggcgctacgagctgcgggtcaaagcttgctgtgccttcctcattcaggatcaccgtgccgccgccctgtaagccgtccacaatggtgtccatatagtacacaccggagaagcagagcagcagattcatggccacgcaggtgacgccgatgagcagaacggtcatcagcgtgatgcgccattgtaaagagatccgcttcatgcttcagtgcctcccatcagatagccttcaccgatgcggttgcggatgggatcatagcccagtgcagcgcgaagctttttgcgcagtgcggagatgtggacccggatggagttgctgaagctgtccacactgttgtcccaaacatgatccatcagctcctcctgactcaccggccgaccctgatgcaccatcaagtattccagaattcccgtctccttgcgggtcaatgtcatggtttgccccttgacggcggcggtgcgggagcgggtatcaaaggtcaaatctccgcagaccagcagcacatcctgctgggtaaactgccgcagggtcaggctgcggatgcgggcctccaattcagctaagtggaagggctttgccagataatcgttggctcccgcatccagccccgccaccttgtcctccacctcgctgcgggcggagaggatcagcacccgcgtctcacggtcggtctgccgcaggctccgcagcaccgtcataccgtccttcctcggcaggttcaggtcaagaagcaccagatcatagcgctccacgcccagcagctccagggccttctccccatcgtaacagtagtccacgctgtaggccagccgccgcaggctgcggacgatggtctcgcacagggcgcgttcatcttcaatgaccaaaaggtgcataagagccctccttttcattttcacgttgttcttaattatagcaaaaacagataaggtttgcgttaaattttcgttcttaacagagaatttaactctcctgcgctatgatagcggcagaaaaacggaaagggtgatgaaaaatgagccatgcaaaaaagacgacggtacaggttaccctgctggctgctgcaattgccatgctgtgcttcggcgcctggcgtggcgaggcggcgacggtgctaagcaaggccattaaactgtgtctggagtgtgttggcattgggtaaaaagaagtttacgggcgtatcacagtttctggcgcgcttccggggctggatccaggcgggtgcggccttattgaccaatctgcatctgccgaattttcttaagggcgggctgtaccagggcgcggggaagaccgtctgtgtgccgggactcaactgctattcctgtccggcagcctccggcgcctgtcccatcggggcctttcaggcggtggtaggctcgtcgaaattcagcttttcctattatatcacaggaattctgattctgctgggcgttttgctgggacgctttatctgcggctttttgtgtccctttggctggtttcaggagctgctgcacaagattccgtcaagaaagctgtctacaaggaagctcaagcccctgcgatacctgaaatatgctattttgctggtgatggtattcctgctcccggcgttccttgtaaatgatgtgggcatgggggatcccttcttctgcaagtatctctgcccgcagggcgtgctggagggggcaattccgctgtctcttgccaattccggcatccgtgcagcgctgggcagcctgtttacgtggaagctcgccattttgctggtggtgatcgtgctcagcgtgctgttttatcggcccttctgcaagtggatctgcccgctgggcgcgttctatgcgctgctgaataaggtctccctggttcagatgaaggtggatcagagcaagtgtatttcctgcgggaaatgcgcaaaagcctgcaaaatggacgtggacgtaacgaaatccccgaaccataccgagtgcatccgctgcgggatgtgtgtccgagcctgtccgaccaatgccgtgcgcttccgctgcggctttggcacgggaaagcagggtaccgttctcccggagaaaacaaataagcaaatgaatgatattgtaaaggagaaaaaatcatgaacatgaaaacgaccaaaattctgaccgcactgctcctcgttgcgctggtgctcagccttgctgcctgcagcaagccgcaaacgaacggaggcaacatggcaactgaagacaacgcggctaacgcgatcgatgaccttctggcaaaagaggcggccaccgctgaggaagcgacggcgctgcacacccagctgatggatgccgaaactgcgatcctgaatgagaacagcgcgctttgggaaaaggttttcctttccgctgacaagggctctgcgatgatcgaggacggcagcaactacggcgacttcctgctcaaaacgatcgaaagcgcaaaggatgagttcaccgaggacgagctgaagctgctgcagaaggacggcgaaacgatccgcagcattgaagtcaaggtcgccgctctgcaggagaagttccctggctgcggtcagatgccctccggcgacggcacgagcgtgcctgcgggcgacaacatgatgacgcctcccgatgatggcagcctgcagaagttccccgcctttgagggaaaggatctggacgggaacgaggtcaagagcgatacgctgttctccggcaatgccgtcaccgtagtgaatttctggttcaccacctgcaatccctgtgtgggtgagcttgccgaactggacgcactgaacaaggagcttgcggagaagggcggcgcactcatcggtgtcaacaccttcacattggatggcgacgaggcagcaatttccgaagcaaaagacgtattggccaagaagggcgcgacctatcagaatgtgtatttcgcttccgatggcgaggccagcaagttcacaacgaacatcttcgcttaccccaccacctatgtggttgaccgcaacggcaatatcgtgggcgagcccatcgtgggcgccatcacagaaaagaaccaggcggaagcgctgcaaaagctcatcgatcaggcgcttgccgccgataagggctgagagcgggatctcgaacaggaggtctcaatgggcaagacgtcgtgtaagccggcagtcgttctgtttcccgccgcactgacgctggccggcggcgtcggcggctggctgtactaccgctatgtaggctgcgctgcgggcgcctgcgccattacgtccaacccgtagctcgccatcggcttcggtgtcgccttcgggctgctgctcgggatgctcctgcggccgtacggcggagggatgccggaccgctgaaggcgcggagcaaaccgattcctctcgaaaggaggaaacaccatgattcggagaggattgccgcttctgcttgctgcggcgttgctgctgagcggctgcacagccaatcaaaagcctatgccgcagggaaaggaagcacaggatatggaaacagccgggcagtcctcagatacgtccggtgaggagagcatgtatatggataacacggaacatgtcatatatctggcgggcggctgcttctggggcatggaacagctgatgcagtctattcccggcgtcatcgacgcccagagcggctatgccaacggcacctgcgaggcggacgcggactatcggaccgtctgcaagggcggcacgggattccgtgaaaccgtgcgggtggagtacgaccccgaacaggtgagccttgacgcgctgctgctggcgtatttctacgtcatcgaccccacggtggagaaccggcaggggaatgacgtcggaagccagtaccagaccggcgtctactataccaacgacagggcaagggagaccgtagagcgcatcgcggagattgagcgggggcgcagcaagaaattcttcgtggagatcgggccgctgaaaaactactaccccgccgaggaataccatcaggattatctggaaaagaatccgaacggctattgccacatcccgcgggcggagatggaactgttctccaagcttcgcatcgatccgggcgactaccaaaagcccgcagcagagtccattcgggacaaactgacggtggagcagtaccgcgtcacccaggagaacggcacggagcgtccattcagcaatgcgttctgggatcagttcgagaagggcatctatgtggatatcgtcaccggcgaaccgctcttttcctccacggataagtttgagagcggctgcggctggccggctttcacaaagcccattgaagagcctgccgtggtggagcttgaggacaacagcttcggcatgcgccgcacagaggtgcgcagccgcgccggagactcccacctcgggcatgtgttcaccggcgatccggaatctcccaacggcgtgcgctactgcatcaacagcgcgtctctccgcttcgtcccctatgcgaagatggaggccgagggctacggatatctcctgtacctgtttgaggaatgaattcgcaaaatacaatgatataataaacagcgatataataaacagcgtcccaatcattatgatccgggacgctgtcgtttatgctcatgtcggtttattcaaacaggacattcagcttgctgttcagaatcagatcggcataggcaagcgggttcttgtagatcagatcgttccgctctgaccgctggaagcggttgacggcaacttcgttttcaacggctgtgcagtcatatgtttaattgacaggatataagtttgctcatggtcatacctcgtttgaataatttcgccagcaaaagaaaacggcgctatctgatcggaagtccagtcagatagcgctttttatggcgttccttctaattccgctgagatatacttaccgtttttacattttacacatatccgcagagatcgaatgcagcgagcttttagggcggttctctttcaaccgttttccttctgctccgctccccgccaatactgcgcgccccaatgtacaaagtcccactgctcctcgtaggcattgcactcgtagtcaatgtaataaagcactccggcgcgcgggacgaagttggtgggatagtagtcgatattcagtccggccgggtacagcaggcggcacatggcgtgcacctgcgcaagccagccgggctccggccgtcccgctttgaggagctccgcgaccgtcggtccggcgatgtactccttcaggatgcgctcctgcgggatatccgccgccagcagccgcggcatcgggatgccgagcttccgcagcgtttcatagtcgcggagctccgattgcagcttgtcgccgaaggtgtagtattcgcagggctcgtggtggatctgcttcaggacatactgcgaggccccatccgtcacaagataggaatatccgccctttccctttcccaggagccggagcacggcatattccgcgccgtttacggtccatgcgtcaggcatggcagcggagcatgtccggcgtgatcggcacgccgttgagcgccgtccacagggctccgcaggtcccgcagtcccgtccgcagcggccggtccattcgtccatacggcattctcctgattcatacagcttccccgttcgggtggtcccggctttccccgtacttttcctccagttcccgcgtgtgcgcgcggagtagctccagcgcccgcgtctgaatgcacgaaagcaccgtttggtccgtatctgcaaactctcgtccgatccttgcggaggcgaccgcgtgactgtcgtccggtttgctctcgtccgcttccgacaggaacttttgcagcagccccgggtcgccggagaaatgcagctccaccagcttggcccggtattccagctccgccggggtgatctgagggaatcgttttctgtccacggtatgctgcgcctcatgcttcaggagagagacccggaaccgctcgctttccagatcatacgcctgctcgatgcagttgatcgtgccgtcgggcgaggcccagccgcccgtgccgtaccggccgaaggtcagataatccatccagctccggaacacgaagcccttgagaagattgacggtatattccgccgatccgtccggcagctccacctgatagacggccgggaccgtttcgcgccagacataggggccgtaatagccctgcgttttcccgaaaagcgcatgatagccctccgcttcaaacgccgcctgcagccgctccgtcagccgtgcctcgtctgcatccggcaaatccaggcgctttttcagccgcgccagcagtttgtccgcggcctccgcctccggcaggccgcagtaaaaggtatcccggaagtagatctgatacaggcgcaggatatcgttgagcggggccggtatcccgtaggtgcggtattcgcaattctcaaaaatcgcaaggtaggccggtagaacatcccggaattcctcgtgcgcgcgcatatgggcaatggcgcccctgacgtctccgcgcaggaaatactggctgatatgcattgctgttctcctttcccgatttggacccgatccggccgcacgtccgcccggcagaccagaacggtccacagcacgaaggccgcgaaaaagcccagcgcgctccaaagaagccttttgttttgtttttccatgtagatctttcctttgcagcaatgatttttggcatccgccgggaaccattctgcacgatcccggcgaaaaaggaaagaatctgtctgtcacatgggcgacacggatcgtgtcatggccgctttcggagcagcagggccttccctgccagcaggcgcaggcgcgtcttcgccccgcacatcgggcacaggacccaccgttcaccgggctgttccatcgtctcccccactttccggcgttttgccatgaaccatgcgaaaaaagagtcccacatgcttccggagccgctccagacactccgcctcgcgctccggctggcggtcacagacgccgagcagcgtcacgaccggcgcgacatacagcatcgccagcgtgtccggggcctccggacaaatttctccggccgcgatcagggcgcgaaaaattccggcatgatagtccagcacgcgcccgacatagcgccgggagtacagcgccgccaactccggcgagcggaactgctcgatggtcatcatgcggcggaagcggctgatggtctcgttgtgcagggagtaagagaagatctgccgcaccttctcgaacagggcgtcctccgtgatctccgtaaaagcaggaatgtcctgccccacatcctgcacatggatgtcgatccggtcggtatccgcctcatactgcgccgccgttgcctcaatgatcgcgtcgaaaatggcctgcttgcccggaaagtgattgtagagcgaaggagccttaatgccgaccgcctgcgcgatctcgcccacgctgacggaatcatagcccttcgccgcaaacagctccagcgccttgtccagaattttctgccgggtatcctcctgcttcatgggtccgcctcactaactaacgttcgttagctatattataatccgctttttgcccttttcaagaggttttttcggccgtcaggcttttttccgcctcgatgcgtgcgataaaccggtcgatgtgctgccgcagcaggtccgtgacggtctccttctgcgccgcgccgtcatagacgctgtagagcagaaacatcggcccgtaaaactccagtgccagctgcatcgctgcctcgtccgaatccgccagcctgcggaagatcgccgccatatactgcagcggcccgcccgccagatagtcctgatacagctgcgcgagcttcggctcgcggtattgctccagcgtcagcatccggcggaaattcgcggcaaacggctccttcgtccagtggtcgaactgcgcctcgctgtaggcgcggatcttgccgaccggcgtatggagataggcctccgcaaagccgtccggctccgtctccggcatctcatattccgctgcgcgggcatagtccatttcgttcatccgctccacgatccggtccagaatctcctgcttgctgcgatagtgcttatacaaagcgccctttgtgatgccgagctgctttgcgatgtcgctcatagaggtccccagatatccactctgcgcgaacagctccagcgagacctccagaatgcgctctttggtattgcctgccatgtacgctctcctttcgtaaccgttcggatacgttttcattatagtaaccattcggtcacttgtcaagcacgattttgcgaaggctcgccgcaccgctgcattttccctgcccggaatttgcttttttggcagaaaaggtgtataataagaaactggacagttggaaaggaggcggtcgtatgggccccattgccgtatttgattccggtgtcggcggactgagcgtcctgcgggagctggtcgcgcagatgccgagcgagcattttctctacttcggcgactcggccaacgcgccctatggcacgcgcccgaccgcagaaattcgttctctgacgctcgcccatgccgagcgcctgtttgaccggggcgcaaaggcccttgtcgtggcctgcaacacggcgacatccgccgccatcggtgcgctgcgcgcccgctggccggatcgggtcatcatcggcattgagcctgcgctcaagctggccgtttcgcgccatcccggcggctgcatcggcgtactggccacggaggccacgctccgcgaggagaaatttgccgccctgctgcagcgctgcgccgagaactgccatattttgaaatgcccctgcccggagctggtggagttcgtcgagcgcggtgagctgaccggtcccgcactggagcgctgccttgctgcgcggcttgccccggtgcttgccgccgggccggacgcccttgtgctgggctgcacccactttcccttcgccgccggggccatccgccgtgtggtggggccggacgtcgagctgctggacggcagcgcgggcacggcgcgcgagacaaagcgccgcctgctggacgcggggctgctggtgcagcagggcgagggcagcgtgacgatcgaaaacagcctggattcccccgccattctggcgctgtcgcggcagctgctgcacgcgccgatcttccccgggcgggaaagtttcgacaaatagcgacttgttctccaacttttcgtccggtatttttctgcctgttgtcgaatattggaaggaaaagcgaagttttcgactgatttcttcctttcgttgtcggaatatgcagaaatttcaccgtagcgcgcaggccggttctgtggttcaataggaaccggaggtggtcccatgaaacacagaacgctgatcggccgcgccggggtgcgctgcgcggacggacgccgcgcccggctggactattatctgctgcgctcgggcgggcgcttcgggctggaggtccgcatacgccgcgggcaggagcgctgccgcgcctgcctgccggagctttcacacacgccgcgcgaggtgctgcggctcggccgcacgctgcaccgcgggacggtcacgccctgcgccgtgcgggacgtgctggaggagcttctgtcccgctgacgcaaaaaagcaatggacaaatttgacaggatttgataaactaaaagaaacgaaacaaaaggggaaaattgccatgaaatgtccctattgcagctatcccgagagcaaggtcgtcgattcgcgccactcggacgacggcctgagcatccgccgccgccgtgaatgcctgcagtgccagcggcgcttcacgacctacgagaccgtcgagagtctgcccatcgtggtggtgaagaaggacggcagccgccagtcctttgaccgcaacaagatcctcaacggcatgctccgcgcgtgcgaaaagcgcccggtcagtctggccgcgctggagacggccgcgctggacatcgagcagatcctgcagaactccctcgagcgcgaggtcagtaccggccagatcggcgagctggtcatggagcggctcaagccgctcgacgaggtcgcctatgtccgctttgcctcggtttaccgccagttcaaggatatcaacagcttcatgcgcgagctgaacaaaattctcgaggaaaagtgaggcgcagaacttgcttccttatctggaaacatatggaaattccggacgaagccgcgggaaaagttgcattttctgcaaaaaaacgttgacaaaacgcgttctctgcgctatgattacggtaattaaagaaaatccggcggtttgtcctttgacgcgcctctcctgcgcattcgcgccgccgttcgcattctgaagggggaattccagatgaagcagtatcagaaacccaaggtaaattatgagaattttgcgctggcagagcatattgcaacgtgtgattaccagatcgagagcgctgatcctaattcctgcagcataat

SEQ ID NO: 11133 - DNA, 489 bp, Unknown
  gut microbiota DNA sequence
cctgctaaaggcgaaagtttcatctttagcaggtccgcaccatcccgcagaaaggaagtgccctttgaaccagacaaaactcctgttcctgctgatctttatttctctggaggacgacagcagcatcgtcatcccgctgcagccgaccagccccggtgagatcatgtccggcggcgagggcgaaccggtcgaggcggacgttcctgctgaagatgaaaccgtctccccgcaggggactcatgtcaccggaacgcagactgtcacccatgagtatctgaccctgaacggcaaggtagccagagagacaattaaaacgaataattccctgacagccgtgctggatttcgtctatgatgaatccgggaagccgtttgcactgaagtattcgacgaatggaacgagcttccaaacatattattacgttctgaatttgcagggcgacgtggtaaagctgatccactacatccccggctttgagtatgagtctgt

SEQ ID NO: 11134 - DNA, 733 bp, Unknown
  gut microbiota DNA sequence
gaaggccgagggtgcgctgccgccttagaatctggatcaggagcgaaaaaactatggacatccatcttctggaacgtttgaaggacatcgtccgctcggcgggcacgacggtccgttcggcgcaggatgccgccatgggcatccgcgaaaaatcctcgcatgtcgacctcgtcacgctgtatgaccccatggtgcaggaattcctgcgcagccgcctgctgacgctgctgccggaggcgggcttcctcggggaggaggacgcgacgcatgacattgcgggcaagcgccagctgttcatcgtcgaccccatcgacggcacgatgaactttatccgcggcctgcaccacagctccatctccgtcgcactggcggtcgacggcgtcgtgacgcacgccgtggtctacaacccctattacgacgagatgttctccgcccagcgcggcaagggcgcgtggctcaacggccagcgcctgcacgtcacgcagcacgccgtccacgacagcctcgtgctgttcggcagcgccatctattaccgcgagaccatccccgagacgctccgcttcgtcgaggcccttctgccgaactgcctcgatttccgccgcggcggctcggccgcgctggactgctgctatgtggccgcgggccgggcggacctgttttttgagtgcaagctgtgcccgtgggactatgccgcgggcggtctgatcgtcacggaggcgggcggcatcgccac

SEQ ID NO: 11135 - DNA, 1587 bp, Unknown
  gut microbiota DNA sequence
cactttccattttcaaatttccatttgcctcatttcccgcacttaccgaaaggatcacatcatgtctgacatcattgctgccattgcgacggggcgcgcgccctgcgccatcggcattctccgcctgtccgggcccggctgcgccgcgctgacgggccgcgttttcaccccgaagcagccgtttgcggacgcgccggaccgccgtctcgtcctcggcctgctgcacgaccggcaggggcgcgtcattgacgagtgcctcggcgtcgtgtgccgcgcgccgcacagctacaccggcgaggagaccgttgagctgcagtgccatggctcgcccgccatgctggccgccgggctggaggcactgctggccgccggggcgcggcaggcgggacccggcgaattcacgcgccgggccttcctgaacggcaagctcgacctgacgcaggccgaggccgtcgtcgacctcatcgacgccgagacggcagacgccgccgcgaacgccgccgggcagctcggcggggcgctcaagcgcgccatcgggccggtctatgacgggctgacggacctgtgcagccatttccacgccgtgctcgactatccggacgaggacatcgaggacttcggcgcggcggagctgagcggagcactggaccgcgcgggcgtggcactgcgggagctgcttgcgacctatgaaaagggccgccacctgcggcagggcgtgcgcgccgtgctgctcggcaagccgaatgcgggcaaatcgtcgctgctgaaccggctggcgggctatgaccgcgtcatcgtcacggacatcgccggaacaacgcgcgacaccgtcgaggagccggtgcgcgtcggccgcgtgctgctgcgtctgacggacacggccggcatccgcgaggccggggacgccatcgaggccctcggcgtggcccgctcggagcaggccgcgcgcgaagcggagctggccctgttcgtctgcgacggctcgcagcccctgacggacgaggaccgccgcgccatcgaagcggccaaatgcgccccgcgcagtctggccctgtgcaacaaatcagacctgcccgccgccgtctcgccggacgagctgccgttcgacaccgttctgaccgtctcggcccgcacgggcgcagggctggacgccctgccagccctgctcgagggctggttcctcggcgaaaacgcctgtgacggctccctcctgaccaacccgcgccagttcggcgcgctcgaccgcgcctccagcgccatcgaacgggcaaaaacgggcctctgcctcggcgtcacgccggacgccgttctgacggacgtggaggaggccatggccgccctcggcgaggtcacggggcggacggtccgcgaggatatcacaaatcgcatctttgagcgattctgtgtcggaaagtgagcgaatatgaaagaaaagatcgaggaaatttccctctccatggagcgcggccaccggcgcaccctgcgggtgctcggcgtgctgctcgccgttggcctgttcgtcctgctctggaaatggcgcggccctgctgcgctggagccgctcatagacggcggcatgcgccggtg

SEQ ID NO: 11136 - DNA, 32014 bp, Unknown
  gut microbiota DNA sequence
gacacgcgccgttctgggaagcatcgtcatcgcgctcgcagcgcagtgggtgctctatctgctgccgtggccgctgctggccctgctcggccgaaggaggccgttctgctccgtgttctccctgcggccgtgcgtcggctcgaatacggagctgggccgcgctgccatgcttgctgtgcggctgctcccgcccgtgctcgtaggcgcggcgctgtgggccgtgctttcgcgcgtgccgctcgtgtggttctggcccgcggcaatggcctgcttcagctgcctcagcgcggcgctcggcatggcgtatgacgttgtgcgcgtgctgcagatccccggccaggcaacgttctgcgacctaggcattgttattcaggtttaccgggaggtatcgtaatatgctgcaaaccctgttggattcctgcgcagcgctcggtgtgccgctgacggcggcgcaggcggagcagctgtgcgacttcggcgcgcgcctgctcgagcagaaccgcgtcatgaatctgacggccatcacggagccgcaggccgtggcgaagctgcactttgccgactgcctcgcgctgctgcgcatcgtgccgttcgcaaagaaacgcgtcatcgacgtcggctgcggggcgggcttccccggcgtgccgctgaagctgggcgagccgagcctcgacctgacgctgctcgacagcctcggcaagcgcgtgacgtggctggaggcgacactgcgggacatgggcgtcccggcgcagtgcgtctgtgcccgcgcggaggactatgccgccagggcgcgcgagcaatatgacattgccacatcccgcgcggtggcacggctgaacattctggcggagctgtgcctgccgttcgtgaagccgggcggatacttcctcgccatgaaggccgccgccgcggccgaggagctggaggaggcgaagcgcggcatcgcaaggctgggcggccgcgtggaaaaaacggagacctatgacatcgacggcgcgccgcgctgcgtcatcgtcatccgcaaggagcgcccgacgcccccggcctatccccgccgctatgcaaagatcaagcagtcaccgctgtgatttgaaagaaagatgagcgtaaatgagctattttgcaggaaattatgacattgccgtcatcggcgcgggccacgccgggatcgaggccggtcttgcggccgcgcggctggggctgcaggccgtcgtgttcacgatcaatctggacgccgtgggcaacatgccctgcaacccggccatcggcggcacgggcaagggccatctcgtccgcgagctcgacgccctcggcggcgaaatgggccgcgcggcggacgcctgctgcatccagtaccgcatgctcaaccgcggcaagggcccggccgtgcactccctgcgggcgcaggctgaccgccgccgctatcaggagcatatgaagcgcctgctcgagcgcgagtcgaacctctatctcaagcaggctgccgtcacggagatccggacggaggacgggcacgtcagcggcgttgtgacgcagctcggcgcggaataccgcgtgcgcgccgtcatcgtcgcggccgggacgtacctcgacagcaccgtcatcaccgggcagtgcgttctgcactccgggccggacggcctgcgccccgcgccggagctgagccagtgcctgcgcgccctcggcctgcggatgcgtcggttcaagaccggaacgcccccgcgcatcaacgcgcgcagcgtcgatttctcgaaaatggaggtccagcgcggcgacgacgacccggagccgttctcgttttccacccgcgagccgccgaaaaatcaggccgtgtgctggctgacgtggacaaacgagcgcacgcacgccgtcatccgcgagaatctgcaccgcagcccgctgttcgacggctccatcaccggcgtcggcccgcgctactgcccgagcatcgagacgaagatcgtccgctttgccgacaagccgcgccaccagctcttcctcgagccgtgcggcctcgggacgggcgagctgtacctgcagggcctgtccacgagcctgccggaggaggtgcagcttgccatgctgcacaccatcgcagggctggagcacgccgaaatgctgcgcccggcctatgccatcgagtacgactgcatcgacccgacggagctttccgcgacgctcgagtgcaaaaagctgcccggcctctacggcgcgggccagttcaacggcacgtccggctatgaggaggcggccgtgcagggctttgtggcgggcgtaaacgccgcgctgaagctgctcggccgcgagccgctggtgctcaaacgctcggacggctacatcggcaccctcatcgacgacctcgtcacgaagggcacggaggagccgtaccgcatcatgacctcgcgcagcgaataccggctgctgcaccggcaggacaacgccgacgagcggctcacgcccatcggctatcgcatcggcctcattcccgccgaacaggcacaggccgtcgcggagaaatacgaggccgtccggcgcgagcagcgcaggctggagcacaccggcgtgccggccggtccggcgctgaacgccttcctgcagtcgcgtggctcggcggaggtcgtcagctccgcccgcctggcggacctgctgcgccgcccggagctgcactatgcagagcttgcccccttcgacccggagcggccggagcttccggcggccgtgacgcgtcaggtcgagatccgggtgaaatatgcggggtacctgcagcggcaggagcagcagatcgaggccttccgccgcgaggaatcgcgcctgctgccggaggatgcggactatgcctccatcgccggtctgcgcctcgaggcacggcagaagctggccgacatccgcccgcgctccatcgggcaggccgggcgcatctccggcgtttcgcccgcggacattgccgtgctgctgatctggctcagccagcgcaatgaaaattcgaccgatcacgcggaataacgggacgtctcacggtaattccgtgaataagaatattttttcacctttttcctcttagagtatcatattttctgccgtttccgcatgtttgtcgaagaacgtcgacgaaaaagcagacattttcagggaaagtcattgcaaaagcgggccgaatatgttaaattagaagcaccgcttgtacatccatgcggaaatgagagaatctacgaggaggagagttgttacatggaaaaaatgtatcgggtcctgctggcaaacggcagcgaagagttttgtgggaagctcggcgttgccctgaagcagacgaatcggtattccgtggtcggctcggcttgtgacggcgttcgcgccatcagcctgctgaaagagctgaaaccggatctgctggtcgtcgacctcatgctgccgcaggcggacggcctgtccgtgctgaaggcagcggccgggctggatccaaagccaaagcttctggttttggtggagttcgtaacggaatatgtgtcttcaatgtttatgacgctcggcgtgcaatatatcatgctgaaaccatgcagctgccgcgccgtcgtggagcgtctcgacgagatctgcgagagcgccgtttcgcgcaaacccgccatcgcagcaaagcgcaacgccaacatcgagtccatggtcacctcgatcattcacgagatcggcgtccccgcgcacatcaagggctatcagtatctcagggaggcgatcctgattgccgtcaatgacatggatgtcatcaacgccatcaccaaggtgctctatccgcaggtggccaagacgttcgccacgacgccctcgcgcgtcgagcgcgccatccgccacgccatcgaggtcgcgtgggaccgcggcgacctggagacgctgcagcgcttcttcggctacacggtgtcgaacacgaagggcaagccgacgaacagcgagttcatcgccctcatcgccgaccgcctgcagctccagctccgcagccccgaggctgcggccatgtgagccgggggatggagaaaacctcccgaacacaaaagagagcaaaaattttcccgcctgcttgtgcaggcgggatttttttacacagaatcatctcaaattgtgcagaaaaaaatcccgccggagacccggcgggattttgcctgtaaatcctagttccagcagatcagccctccagcttgtaaagctggatcgcctgctgatcgctataggtcgaagccttataatagcggaaacgcatctggttgctggcagagttgaaacgaaggatggaagtattgcttgtgatgacaacgccatccgtttcactgaaggtaacggtattgactgcgttggcagcagtatccgtgaacctcagcgtattcttaccgtcggttccgtaaatatactggccgttgaccttgagcgtgtagccgtccgtggtcttctcgatcgtgacagcgacggcgtccagctcggtgctggaagtgatcttgctgttggcaatcgtggcggaaacgtagccgttgacagcatcattgccgttgaagacataggcgctggtctcgtcggcctcgttgacgatgaggtaggtgccgctccagtcctcgggggccgcagtgaccttcacataggacttcgtctccggctccgtactgccgcccgtgtattccttgctcaggttggcggtgagggtggtcagctcggcatcggtgaggcccagctccttgaagaagtcggtggcctcctgcttgaggtcggcggtcttcagatcctcgacgccaaaggcggtctgcagggtcttgacgatgttggagcggaggatggcatcgtacttggcaggctcggcttctttcgtcacgccgtagtagttgtagtaggtgaccatgtagtcggcgacgacctcatcatacgctgcgcccatgtagcactcgagcagggcggagacgaagcccgcgcggtccttgccctcggtgcagtgcacgaggtacgggccttcgtgggtggtgaagtagcgcaggccggtggcaaggccggtcttgaagtcggcggcggtgaagtcgacgccgagattcaggtagacgacgttctgcttggaatagtaggtggaatcaaagccttcgtagcccttcgcggtggcctcgtcgttggcgaggttcatgaaggtcctgacgcccgcggcctcggcggccttatcggcgtaggtgttgcggccgatctcgtcgttgatggggctggaggagcggtacagggcgttctcgcccatgccggtggtggcgacgttgcggaagttggcgaactcggcgtcggacaggtgcttgtagtcctcgcggttgttcgtgcgcttgagctggtggatgagccactcgtcatagtagccgcccttttcgcccatttcgatggtcacgacggcggggatgttcgtctcggcagcgtagtaccactcataggtcttgtcttcgttggtcttcttcgtggcgatgccgttcttgccggcgaagtcgcccatgttgatggcgagggtcagatggccgtcagagttgcggaggatcgtgctgccctgatcgacatcggagtagttcgtgccataggggacggtgaattccttaccgtccacggtgatcttcagaagatcgccatattcgaatccggccttgtcaagctcggagccggggatcgtcagctcgaggttgccatacttggcgatggactggacatagccgtggatgcgggtctcgttcgtcctcagctcgttcacaaaatagttgacggagccgttgttgacggtggaaatggtgtattcggtcgtgccgtagaagctgtaggagtggccgtctgcgtaggtgttcagcgtggcggagccaagcgtcgttgcaacggcggaggagacggagggagaaacggcctcgtcgttcgtggcccagatgacgagggagtcgccggtatagttctcggcggccttttcgaccagaccgtcggagtacttctcgaggtcggcgaaccattccttgctcagctgctggtgctgtccatacttggtggtgaattcgacgtagcccttttcgttggcctcggccttcatggtgtcccagttctcggcgccgccgaacaggttcttcaggtccgtaagatcctccgccggagcgacgagctcgatggtggagaagctgtacttgccctcggcaagcagctcgagcgtgatgcggccgcccatggagtagccgaacgcaccgatgcgggtcttgtcgacggcgtagttcttgcagacgtagtcgatgacgtccagaacgtcggccttcatgttggtcatggtgttgagctggaagctctccttgctcttgccgcagccggggaggtccagcgtggcaacgacgaagccctgctcggcaagaccgttggagatcttgtcaaagccgtcaaactcgttgtggttgccgccgtggccgtggatcatgacgacaaaggggaagctgccgtcggccttgtagcccttcggggtggtgatgtaggcggggatctcagcgccctcacgcagcgtggaagggaccagcttctcggttgtagcggccggcgcgggtttccccgcgccggtgttgacgtacatgtccatggcaaacagcgcttcgttgctgctgctgacatagtacatgctgaagttggaatactgtgcgtaccactccacgctcttcgggtcgccggaggagccggtggccgttgcgctctggaggtagatgcagccgtccgtggctgccggggcgatcttccagacggggttatcctcctggtcgaagcccatgctgttgtaggtgccgccatcgggcttattgccgatggagagctttttgccgtcggtgcgcttcaggaagaagccgccctcggtcttttcgaccgtccagacgatctcgtcgttatcggtggtcaggatgccgtcgaccggcgtgacatcgacgcccgcgcggttgtaggcgctgccctcggaattcgccgcggacatggccttgctgacggagcggttgacgaagacgacctttgcgccgtcgggcagctcggtgctgagggcatactcattgtccttcagcgcgggcttcgtttcattgacgacggtgatacggccctcgcctgcgaggttcttgtactgctcgccgacattgccgccgagggaatcaacgatgtagtcgatgaggacctggttgtcgatcttgacctcgtcctgcaggagcttgttgtcctggaacatgttgatgccgtcgccgccggacttgagcatgtagttatgggaggcgagggtgtaggtcttggcggggtcgatcggctcgtaggtgttggtggtctggttcaggacctgaacgtcctgcacgcggcgcgcgccttccacggagacgaagaagtccttgtcgtccgtcttgacggtggattccacggcggtgttgatggtgtacttcatgccggagacctgcaggaagccgcccatctcgccgacggcgttatagaccttgttgccgttctcatcgacggactcggaaacatactcggccatcgtgttgcgggaggccatttccagcgcatcgaggatctcctgaccggtggcttccacgacgcaggccatgttgccatagggatggaccttgatgatctgattgtaggtgatgtcgcctgcggggatgtcggcgcggatgccgccgccgttgacgatggcgatgtcagcgcccagcgtgacgcggtaagcatcggcgcacaggtcgccgaggttcgtctcgcggttgcggatggcacgggccgtgccctcggggttctgggtggtgaggtcaacgtccgtgtgggcgacgaccttgttcagcagggcctggaactctgcgacgatcttgtcgacgacttccttcgtcttggcgtccttttcgatctcacggtcgctgatgagctcgctgtggagcttgccgtcggcgctgatggtcagcttgccgaggttgttcagcttcgtgcccgtggaggagagaatgacgtccttgccgtccttgctcttgacgatctcctgcgggatggtgctgtgggaatggccgtcgagcacggcgtccaggccggtggtgttggcgatgacgtccgtggagcgccacggctcggaggactcgtcgataccgaggtgtgcgactgccacgacgtagtcggcgccgtccttcttcgcggcgtcaatggtcttctgcacggagtcgtacaggtcctgaccgttgttgccctcggcgaaggtatagatgtagttgccgtccttgtcctggaagtaggtgggcgtggacttcacgaagctctccggggtgctgatgccgatgacggcgaccttcttgctgccgaaggtctcaatggcatagggcttcacaccggcgatggcggtgccgtccagtctggcaaagttgcaggtcaggtactgatactttgcggccgggacgatggtgtcgagcagctgatccatgccgtagtcaaactcatggttgccgaacgtggcatagtcatagccggcggcattcatgacctcaacgatggcttcgccgtgcgtcagggtggagatggcctcgccctggatggcgtcgcccgcatcgaccagcaggctgtacggggtctggaggttgttgcggtaccaggcgacctgctcatacgtcagcgtgggggctttgctggagccgccggtgatgttcgcgtgaacatcgttggtgtagaggatcacgatgtcgtcggccttcgtgtcattgagcttcatgtagcgctcgatgatggcggcgaactgggcgcgggtggcgttgtccttcggggcgagcttgccgtccttgccgttgatgacgccggtctcgacagcccacttcatggcgccggcggcgtagtcatagatcttatcggcatccggccaattgctcaggtcctgctcggaggcagcctcgccagcgtagcgccagatcatggtgacgagctcttcgcgggtgatgaagcctgcggggtcgaacgtgccgtcgccgcggccgttgacgaccttctgctctgcggcccatgcgatggcatcacgataccatgcatccaccagatcggtgaagggagccttggcggtgggagcgggctgaccggcgatgcgccacagaaccatggcagtttgcgcgcgggtcagattcgactccggttcgaatgtcgttgtcgtggtgccgttcatcagtccgttgtcataaacgtactgaacgttcgaagcaaaccagtcggtgtccttcacatccgtgaacgggccgacgtttgccgcaaacgcaaacggcagcacacctgcgatcatggcaatgaccagcagcatcgccacgaacttcgtgcaaatgtgtttcatgattagagatcctccttctaatttccaaatagggagctttttgtccccatggtatgaatattttaacaagtttccgggagcaatgcaagggcgccgggacgctttctccacttttgcaggccaaaagcaaaatatctcgctttccataatttttttgtgcagaaagcacatgattacctcgattttcctacgatttctgtacataatagtgcacaatcatcgcaaaagtttttgcgttccgcgcggctgctggcggcattccggccgggcggcggccgcgcgtgaggcggccgtaaatgtctttttagatgcgccgtcctgtatacggacggacgcggcgggacgaatgtgcaaattggtgttgcaatccgggtaaaaacttggtaaaatagatatcagggaaggtgtaccggaaggtgccggggccttctcataaccggcgcggccggaagaacaaaggaggatcatccgatggtcaaactgatcatggggctgaagggttccggcaagaccaagcagctcgtcaccgacatcaacgaggccgtaaagaacgaaaccggcagcatggtctgcatcgaaaagggcaccaagctccgttacgatattgatatccgcgttcgcctgatcgactatcaggagtattccatgggtacgctgacgttcctgaagggcttcatcagcggcctgcatgcgggcaatttcgacatcagccacatcttcatcgacagcttctataagctcgtcgaggaggccggcgtcgccgaggtcgaggacttcgtcctgtggtgcgataagtttggcgccgcgaacaacatgtccttcaccgtcgtcgtctccgaggaccccgagaaggccaccgaggccatgaaggcctacctctgatcgccgcagggcctgccgcaggggccgccccctctgcggcagcttgccgcgccataaaaaagtgcttgacaaatccaaaagaatgtggtatcctatataagcacttggggcattgcccctcatttcatatcgcggagtagagcagttggtagctcgtcgggctcataacccggaggtcgcaggttcaagtcctgtctccgcaaccatatccgttaccgttgttgataccatatcaacaacggtaattttttattttctgctgttctgtaggcgttttctgtctgaaaacggaggattttcagaatatttctgcagttgaacagaccgtgatgtcccatttgccgcagccgggtgccccccgatgcacagcttgtgtgaattgcaatcgttataagaatataaacgataaattattattttttatattgacaaaggaaagccgcccacagccgggaacaactccggtcatggacggttttcccttgtccccccgggacatagaggacagaaaggacaaaatagaacagacccggagcagcagattctttttctgccgtcccgggcctgtgattagcagtatatgcttttaatactttgcgaacttataggtttagggcacagacaacatagcgttgtgtatcacctttaataacctaaggctctttcggccgtggatataccttatccaataaggtccatctttttgcgaagtgtgctttgttcgtgagtctatttcttcggttgtttaattactgtagcctgattttcaataagatggtatggtggtttaggaatgttactccagaatatattaatatcgaactggtgtactttcaacttctggtccaaattagaaacacggatcagatcgctcttatattccttggtggatttgctgttcaagagttctgtaatgacttttatattacagctacgcaccaattctccctcgagattagggacttgtggaatagtaaccaccgcggaaatagcagaacatgacttgagcttttcaatgtttttgtcaagtcgagcaacattgtccgtgtcggtatcgaatattaaaaccacaatggttcctttagcaagtgtccttaagtgaagatcggtgatattacattcgattacatttagtttttggacttttcccgggtgaataagacccatgctgtttttaagggtattgacaagcttcttttcatcatcgccttcgactaaatacagcagatttctatttctcattgccgctacctccggaattaaaaatctgcaatatcgtatatgagttccaatgcaggagcactagaaaacatatcgttctcgacggcatttttcaaggaatctgtattacgcttaagtacagatgatgcatcaatgcaagtgattggacacgcaacattatcaacatcctttctcaggaatgaatatgtatgcttaggtaagttcatatcaagaatatcagtattgtgcgttgtgaaaaacagttgatcattgggcttgaggcaatcaatcattagggagagaatagctttttctatatcactgtgaatatatgggaatttttcgtcacaataatagaagccgtgctttccttctttaagtgatgccacaagcagtgcaatctttacgcctgctttggtgccacttgatagtttattactatcaatttttttgccatcctgaagaataacagggttatctggtattcgaacaatgtatgtcttttcgacttcctgagagatatctactgccttaatggaagggtctaatgcttttaatatattctcaagcactaaacggaaccgatcatccttgtctggtaggtcaagaacgcagttattatcctctgggtattcaaaaagccaaccaagcccctccagtttctccaactctcgcaaataatctctttcgggaatatactgcgtttcttcaatcctttttacacaagattcgtagctgtctttggtatgaattctttctttttgaacactaagagaaaagttatcaggggtatatttaccttcggtgcaaggtgtaattttacaattgatccgataaaagcaattgctagaaaacgcaatatctaacgcaaaagacgcttctttgccctgatcggaaataatctccgtaaatttctcatagctttttttgctcaaaaagttgaaaatatacatgagcgcatgacccaatgtagtttttccggatgcattcgcccccataataatgttgacctttttgtatctgaagtttgggcgttcagccaaatgctcatcctcaatacaggatccaacaattttcttgggatatgttaggtttagatgaaagtttctaaaggcatatatattgtccaatcggacatctaaaacaatcacggtatcacctctcttgattatttcttcggatttcacgaagtaatcctcctttcatattatagcgcaacactttcaaaaaatcaacactgttttttagagggataatatacgataccatttttgatatgaataagcactcgaaatagcatagctaattcgtgcacctatagccttatattgcgcctgcaatgcaagagcaaaatagaacaggcccggagcagcagaatctttttctgccgtcccaagcctgtttttactattctcatagccttgttgtgatttccttcccatccgcgaaccgaaacactacccgctcgtcggcgtagacggtgacatggtcaacggtgccgttccagagcttttcgtcgaaggtcagtggcagggcggtcagttctcccaaagaagccgaatccaagaatgaggatgacgactctgacaatcatccgggagctggcggaaacagcggcactatgatcgtggacgccacctgcgcaccgtccaatatccgttatccgcaggatgtttccctgctcaatgaggccagagaaagcgccgagaagcttctggatgtcctccatgatcccgcggacggaaagaagccccgaacttaccgccagcgcgcccggaaagattacctgaaatacgtaagatgccgtaaacataccgcaaaaatgacccgcaaagccattggaaagcagctggcttacctccggcgcgacctggatgccattgatggcaaactgtctcttggaaagtctctgaccacgcgacagatgaagcaaatcagcaacatcccgtttgctgccgtgcataatgagcggttccttatccggcgttatcaagcgagtctgccgcgtggcttttattttccgaacagctcagcggcctgcttcatacgctgcatgatgggcacgttaaaggggcactgcgtttcgcagcggccacagccgatacactcacctgcatgatgctcaagtgcatcgtaatgtccctgtagggtgggtgtaacgccatcgagaagcgccatgtccagatacttgctcagctgcgcaatgttgatgtgctttgcgcaaggcaggcagtgattacagtacatacagcgtccctgcatggagaatttcggctctgcggcaaagaggaaggaataatccagctcctccggcgtcattgtttcatagcgcaggcaatcggcaacctgttccggtgactgcattccaaccagtacgcttgcgacgccgggcctggaaagcgcatagtgcatgcactgctgaaccgtcatggcccggccgaagggtgaggtcttatcagaaagcagcgcgcctgcggccagagatttcatgaccgtgatgccaacaccgtgcatctcgcagtagcggtacaattcttcccggaccgggttgatgccgccaagctcctgcatagaatcgaaaaagcggttgttcagcttgcgtgggcgctccgcattctcattgagcacgtcataggctgggttgacgctgaagagcattaggtcgatcaggccggttttggccgcccgcagcgcctgcacgggattgtggcagcttacgcccagcgcacggattaagcccttttgcttcagctccagtgcatattctaggataggtccggagaaaatttcctcatactcctgcgcgttgtcgatcatatggatcattccgaggtcaatataatccgtctgcatccggcgcagaagatcctcaaaaaacgcctgcacgaccttcacgtccatggtacgaccgtactgtccgtttttccagatagagcgaaaatgtccctggatgtacattttgtcgcgctttcccttgagcgcggtgccaaggtccgagcggatgtctggattggacataaagcaatccagcagattgataccggcatccattgcagcgtccacggtattgcagacctgcttcaagggcttgccttcaagatactcgccgccaagaccgatttctgaaaccttgaagcccgttcttccgagtgtacggtatttcattctttatacctccctgccagccgcgcgcagtagagcgcgtgcctgcgcctgatcaatgggctctgccatgcttccgtttctgcgcagcgtggtaccgacgatgagaatatctgcgatctgcattttttccgcaatgttcttttcggtgacgccgctaccgacggcaacgggaatggagatactgtttttaaccttttccagatcggaagaagcggtttccgtaccggtggagcagccggtgacaatcaccgcatctgccccctgatgctgcgcccactttgcagaggttgcaatgtccacctcaggattgaccatgtaatagtgtttgacctgcacatccgcgaaaatcttgacatgctccgcgctgatctcacggcggtaacgaatgatttttccgctgcaaggagtcatgattccgttgtaattcatgacagtatcgacaaaaatcggtgtgcggatgaaatcgccgccgaccacctttgcaatggaaagcgcctcctcatagttcagcccgctgcagcacaggccgagcggcagcttcaccgcgctgcgcactgcctgggccaccatactgatagccgagaactgcactttagtcatatgtggttccaagcagagatcctcgttttcgatcatgacagcgtcaaagccgacacgctcaagcgctttggcatcgctgaccgcgcgcgcgattacctcgtcgattgtcgccgttgcgccgtaggttccgggcagcggcaggcagtggatcataccgataagcagcttgcgtccgcccgtcagattccattccatttcaatcatccctcctgattgtttcgtaccgcgccagaagctgcgcttcggtgggcaggtttgtgatgcttccctctttttccagcacgaaggaggacagcgtgccgcccagcagggcgcactcatggacgctgcggccatgcacaagtccataaaggaagccacacacatagccgtcgcccgcgcctacagtttccggctctgcgcacagcggacggacggcgcgggcttgcgtctgacagatttgtccgccgtccctatagtacacacggcttccctccgcacccagcgtttcaaccagaatttgtagcttctcattttggaagagatcgcggatctcctttaggccgaattcctcgcataaaaatgccgtctcagtttcatttgcaaagattaccgtgctcagctccagaagctgtgcgagcttctcatgcggtagcgcattgggatccttgcgcatggacagcgctagtggtgtcccgcttgcgcggatagcgtcgatcgcaggctgcgtattcatcgccatgggcgcagtgaggacaacatagcggctgtcacggaagaattccggcttcatctcctgcacgccataaaacgtgctgcctggcagacggtgcgcatactccgtgatgagcgtcatatggtttttttcggcgttctggatcataatggtcgtgccgcgggctttctctggcggatcctgaatgccattttcaggcatgtgatattcgcgcgcaaacgcatgcagaaagtcatgctgtcgatgatcggcataggtcaaaacgggatagaccgcctcgcccagtctggcaagaccggcgcagatgttcagccccatgccgccgttggaatactccgtaaggctgccgccaaagaccggcgtagatttgccgcactcaggcatctggtttacgtgcaggatgctgaccgttgcggccgtgccaacgaccgtaaaatcatagcgcttcatcagaacactccgttcttcagccgctcacagacctcgtcggagctgatggcctttgcaaagtatttggtcatttccgccagatggaaatcgttgatctccttggtattcgtaccaagcatgtcgctgatcatataggtgcggaagcggtaggctgatgcatcggtcgcggttgcgcggcagcagacattggtcttgacgccacacacaagaacgttctccacgccgcgctcacgcaaaatctcggcaaggttcgttccaaaaaaggcgcttgggacaaacttgcggaacatgatgtcacgctccggatcatagggaatgcgctcctccagctccgcaccggccgagccctcgaccaatgaagctttcttaccatcgcggaacatgcgcgtcagctcgggattgacctccttttcatccgccggatgcgcggtatagacgatgacgacaagtgcgccaaggtcacgcattttgttgagcttttccgggaaggtcttcatcatttcgccggtcgtctcgggataatagaatcttccctccggacgtgtgaaatccttttgcatgtcgatgacaagaacagcagttttaggcatagaaattcctcccgtcaggcttccttgaagaagcgcagatgatttttgcgggcattgggcgtctcgacgatcagcagcacgacaatgatcgtgacatagggcataatgccgagcagcgacgaaatggccgcaggaacaaagttgttgatgatggtttgcagcgcacggacaaagccgaagatcagcgcatagacacaggccttctccggatccttacggccgcagttaatggcgctcaggcagataaagccgcggttcgccgtcatgttgatggtatacatgccgagctgctcaaccgaaaggttcagtccggccagtgcgcaggtcgcggcggagatcatcaggcacaggaacttgatgcggttggtcttgatgccgacggatttcgcagcgttgacgctttcgccagtcacgcggacataaatgccaaacttggtcttatacatcacgacagtcagcacaatgaccacaaggaaggtcaggtaggtaatcgccgtgtggttgttaaaaatatcgctcaggatcggaatgctacgaagaaccggcacgtcgatcatcatattcgccgggtcaatgatgctgctggcaaccagattgctgcgcgtcccgtagagtgcctgtaaaaggcaggccggaatgcaggctgccattaggttgatgccgctgccgacgacgctgaggttgcccttgagcttaacggtaaacagatagaacaggcagttgagcagaattgcgattacgaaggcagcgattacgccgacccagatctgtcccgtcatgaaggcaaagagaatgcccgcaaaggcggcaaactctgtgcagccctccatggagatgttgaacacgcctgctcttgcgacaaatacgcctccgatggtgatgagcagatacggcgcagcgttttccacagtcatgttcagaagattcagaaacagcgagaggtaattcatgctcagccctcctttttcaccgcagaccggtggaagatgtggccgaagaagtcagcaatggcttcgcggttattgccgatgagcttgatggccataaacagcaccaacgtgctcttgatgatgttgatgaggtcaagaggaacgccgaggccggtctgcgccgccagagcgccgtagcgcagcgcgccgaagacgatggaaaatagcagaatgccgactggattactgccagccaggatacacacaaagaagccgtcccagccgataccggggttagcagagaaggtgttgacaaagttatagttgacaccgagaatttctgttgcacctgcaataccggccagcgcgccgccgaccacgaagatcacgacgattttccggctgacgtgcataccgacggcgtcggcaaattcccactgcttgccgatgcagtcaatctcatagccgaatttggtctttttcagaatgaaatacaggatcagccagattgccagcgcaataaagatcgccgttgtgcagcggtacttgctgttgagtttggcaaggcgggcggtctgctcgatgaactcagtgtgcgcataggcatcgcccgttccaaggtagctctgggtcagaaagcctgtgacctgcgtggcaatgctgttgagcataacggttgtaacaacctcgttcacgcgcagcttggccttcagcaggccgggaatcagcgcgtagaccgcgccgaaggcggcgccaatcagcaggcacagcgtgacatgcagcgccgtgggaacgcccttgatcatatagcccgcaagagccgcggtgaaggcacccaggaatacctgaccctcaatgcccatattgtacatattcgcacggatggaaagtgccgtagccatgcccgtgatgatgatcggcgtagtatagccgagcgtgttcagcaggccgccgacggagaaaaacgcttttttgatgatatagctgtaaagagtaaagggattacagccgcagatcaaggagaagatgctgccaacgccgaaggcaaacagcagcggcaccagcacgtctccagccgctgcgagaagatttgaggtccagccggtcgtgcgttttgcagggagtctttgtttcatagttctaaacctctcattcttccgaaagctcctcggaggacatgcgcttcacaccggacatataaagtcccagctcattgaagctcacatcatccgagcggaagctgccgacgatttccccgtgatacatcacgagcacacggtcggaaagccccgtgacctcggaaagctccgaggagatgataagtaccgccgtactggcatcacgcattttaaggatctgattgtggatgaattcaattgcgccgatatccacgccgcgcgtcggctggctgaccagcagcaccttcggtctgcggctgaattcacgcgcaatgataaccttctgcgcattgccgccagagagagagccaaccgccggatccttcgtgctcagacgaacgtcgtattcctctaccagacggtcgcggttttccgttatggcacggcgattcatgacgcctttattgcaatagggcttaagtccgtgataaccggcgatgagattggccgagaccggtacgtcaaggcacagcccctgcttgtaacgatcctccggcaccacaccgatgtcgtgcttcctcagttcgtccggccacagccccgtgatattcacgccgcccaactccacggttgagccatggcaaacatccaaaagcccggtcagtgccagcatcagctcggtttggccgttgccctcaacgccagcaataccgacgacctcgttttcatggatgcggaagctgatgtcattaagaatctttttgccctcggagttgactgcactgagatgattaacctgataggcaacctttcctcctacgggctttccacttttcttcacccgcagcaggacggcgcggccgaccatcatctcagccagatcctcgtcggtggtattttcgtcgttcggcacagtgccaataacgtggcctgcacggataaccgtaatgttatcggcgcacattttgacctcattgagcttgtgcgtaatgataataatcgtcttcccggctttcttcaggtcaatcaggcggcgtatgaggtcgtccacctcctgcggaatgagcacggccgtcggttcatccaggatgagcagatcgacatcgcggtagagcattttcaggatctccacacgctgctttgcgccgacggaaatatccgaaactttgtcggtaatattcaaattaaaattaaacttgtccacaagcgcctgaatttcggctttttccttctttttgtcaatcaggacgccgcggaaggtttttttcccgattttatgggtgcacaccgtttctgtgccgagaacgatattctcatagatggacagcgacggcgagagcttgaagtgctggtgcaccatgccgatgcccagctcaatggcatcgcgcggcgaagcgatggctacctttttgccgcggaagaggatctcgccctccgtcggctgcaagatgccatagagcatattcatgagggtggacttaccggcgccgttttcaccgatgatggcgcggatctccccttccttcactgccagatcaatgtgatcgttggcagtaaagtttccaaatttcttcgttaagttcttagtttcaataatggtatccatattcatcaccaaagcatcctattgatggtgcatgccccgctggagctaccttcaacggggcatacacagtcggttatttcttgttcagctctgcataggttacgttgttaccgtcgatctggagccaatcgtccaagcgctggccgtcggactcgatgctcgccatacgagcgtcgaacacggtgatggttccgtcagcaatccacttacggcactggtcgagaatgcccttgagttcttccagcttgtccttatccgtgacgtactgctcgatgacgctcatgtcggtgatgtcaacgccgccgttggaaaggttgaaggtgtccggctcggtctgctcgatgttgccttcgaggtacttgccgatgtagaattccaacagagaggtgttgtcgcggattgcagaggtcaggatgttgcccggctcaacctcgtcctggttggagtcgacgccgatgccgaaggcattgttcagacggcaggcctccaggccaccaaggccggcagtgccgcagcaggtccagatgacgtcgcagcccatgttgttaatcatgttctgcgcgatgctttgcgcgtttgcagtatcggagaagccaacagtgtagtcaatgtagacctttgcatcggggttgtagaacagtgcgccctgacggaagccgtcgccatactgatagaagccgacagactcggcaccgaacagaatgccgatgttgcagccttcgtgctggccgacaccctcaacaagagtgttgccatcagttgcggcaaaggcagcgacgacgcctgcgaggaaggagtgctcgttgagcgtgatgtaggattcaatgacgttcttcggggtttcagtgaaaccatcaaccgcgttgatgcggagctgacggccgacaacgacgaagtaaatgtcggggtagtcgcgtgcaacggtgtacatattgccgctgattccggcttcgaggttgatgatcaggccgtaacccgcttcgcacagctcacgaatcagggtctcgccctgcgtggtgtcggtgcattccacggcgttaacatccagatcgtacttttccttgcaggtcatcaaaccggcataggcagtgtcgttaaagccctggtcgcccaagccgccctgctgcatgatcatagcgatcttcttgttgacgttggccttcatactgggattgtcggagtttgcgggagcgtcgctgctggggttgtctttgtccgtgttgccggcacaggctgcaagagaaacaagcatgaccagtgcaagcagaactgcgagtagctttttcatggatacatcctcctctttatttacatcaacggttaaagttgtattgatgttataataataatatcatcgcgatctctaattttcaattcgcaaaacaaccgaaataatccagaaatttcgtcaattttaacaaaaacctaatggatagttctgataatcccagcatctctcctttgcatgccacaagccatatcgtatagttgtaatgacaaattgtgcgcgtgctgtaggaggtttgggtgcgtccgccggaatcggacgcaccctcgataggaggccaaataaaaatgaaacagaaatatcagtaagccagcttgtaaatttccagtgcggactgctcgtccagcggacggaacgccttggcaaagtaatccttgccaatgatcgcagcctcatgggccatcttgggcagcatgctctcctcaatgccgaagtcgcgcaggtgctgcggcaggttcagagaagcaaagtactcgcgggtcttctcaatggcgagctttgcagcctccatcttgtccatgcctgtcgggtcgatgccgaaggaagcctgcaaatagccaaggtaacgataagcgttgtcctcggtgagcatccatgtcagccatgcgggcataataacggcaagtccttcgccgtgcgtgacatcgtagaaggcggacagctcatgctcaagcttatgcattgaccagccaacggggttgcccttgacggtaagaccattaatcgcccagcagcaggtccacatgatgttcgaacgcgcctcatagttggtcggatcatcataagcgatcttgccatagtggaacagcgtgttgaacattgcctcgccgaactttgtctgcaagtacgcttcgggaacattggaaaaataggactccatcacatggctgatggcatcggcgacgccagctgcggtctgcttcttcggcatggtgaaggtaaattctggattggagaaggacgcgcgcggacgcatatcggggctggaatagccggccttctcattgatgtccatacgggaaatcacagagcttgtggacatttcggagcctgccgcagccaacgtcgggacggcaatgacgggcagaaccttgcctacgggaacctttttactgatgatgtcccaaggctcgccgtcatagttcacggtggcggcaatggacttcgcgcagtcaatggcagaagcgccgccgatgggcagcaggatgtcgcactgctcctcgcggcagatgcggttgccctcaagcacggactcatagcgcgggttcggcgcgacgccgcccatttccgcataggggatgtttgcttccttcagacggctgacaaccgcgtcataagcgccgttgcgcttgatggagccgccgccgtaaacgattagaggcttcgtgccccactgatggatggtgtccaccagatactgaaagcaggacggaccaaaatttacacgggtcggaacatagtaccaaaagtctttcataatgtcacacctcttaaatattctgttttgcgcaggtcagttctgcgctgcctttttatattcgcggatcagctcaacgagtttttccggcgtgtcgtacagtttaataatggagcttccgacaaagaagccctggcctcccgcggccttgacgcgcgctgcgtccgccggagacttaatgcccgcgccgcagtagatcggctcggagactttacgctcgcgcagatagcggatgcaggtttccagctcttcaaagccgggcttgacatactgtccctcgctcgggaacgcctgcatataagtaaagccatcggtgttgatgcagcgctgaatgtcatcctcgttcatcttgtagttcaccgagcgcgccagcttgacaccatgtttccgcagtgccgcaattgcctcggggtcatgcaggtcgccggaaatgacgttgacgatgtggtgcttctcgcagaactcgcccagcttctccgcgccgattgccataatgacctcatgataaagcacaaaaaagaactctgtgctcggatactgctccgtcatgcggccaatgccctcaagatacttcgaatagtcatcggtctgtgccagcgcaacgcggtagagctcctgcaaaaaagcgctgtcgcggtacggatccttcggcggaatgctgacctcgatggcgtcacagccgccctcaatgtaacgtccggccatttcaatgcttttttcaatggtcgggtagccaaaggagagataacaaatggttttgatgctcatgctcatacttcctttcaagaatttgcagcctgctcaaggtctgccagcagcgccagcatcgcaggctcgtcgtcccaaagattcatcaggcaacttccgacaaacgcgcccgaagcgccagcctgttttgcctccaaaaggcttgcgccgcaggtaatgcccgccgttgcgtagatcggtgcgttcacgccgcgcttacgcagataacgaatacgccgatcccagcttatcatgccgtcgcgcggctccatgccgtcgcgcacattgcgcagcatcacagctcgtccggtctgcacggcaaattccacgtccttctccggcaggttgtagtcgatgaaggtcagcgtgtcgataccggccgcgttcatgtcaattcttgccagttcgatcacgccgtcgccggaaatgcggcatgttttaatgttgttctgcttgcaaaactcgatgtaccgtgccgtgccgatggtcagaatcacgtcctcataggacaccatctgcatctcgaaatccggatgcttgcgccggaattccgtcaacgccgtcagaaacggctcatagccgccgtaggtctcccacgcctttgccatacgcttgcggatgaagagcgtttcacggtagggattgcgcgacggcagatcgaactgcaaggcgctcacaccgtgtgcgagataggtctccgccatttgcagtgaagcttcgatgctcggcgtgcccatgctgatgtagtagaccaaatggaactttcccattcttttcctccaaatccggtagtctttccggtgcgaaattgttcaatgatgtagatgtaatgacaacataataataggtttcctgaaaaaacaggcaccccgcccggtattttcattatatcatactctctgcgcattgcaattatctgaattcacaaaataatttgtcgttttttgcgcaatttcaacaagacaaattttccgttttccctacaaggaagtatcaaaaagccgccaacatgtcatatattttcctagttcgccgcgcaagctgcattgtaggggccgccggcagcgcaccgcgtttttcctgtcaatttttccgctttttttctgaaaaagtgttgacttctagacctctggtcaataaaatagatattatgaacaatagatcacccacactatcccaagcaccaagaacgttgagaggcaaaggttgagggacaaaaaatgaaccatatgttttctgaagaacagatctctgcgctggtgcagaacatcccgaaatatgtgtatatcaaaattgcgctcaccaaccgcatcaaatccggcgagctggaggtcggcgcaaagctgtcaacggaaaaagaaatgtgtgacctgtatgggtgcagccgtctgaccgtccgcaaggcccttgaggaattgacacgcgagggttatatctataaaattcagggcaagggcactttcgtcaaggagcgtacgccgcagaagcagaatttctctgtcatcacaagctgttccacgctcatccgctcgcagaacatgacgcccacgaagaaaatcctctttgagggaatcgtcccggctaccgccgatattgcgcagcgccttgggctgcatgagggcgactcggttctggaataccggcgtgtgtattatgcaaacggcacaccggtcatttatggccgcagctacttcaacgcctccgtgcttcctggaatcgagagcttcaatctgcagaatcagtcgatcatcacgctgctgaaagaaaagtatgacctggaaatccactgctccaaccgcgagctgcgtgctgtggtctcggacgagacgacttcccgcctacttggcacgccaaaccgctttccgctgcttcaggtgaccgacctgaaaacgggcgtatggcaggatacgaaaattccggtcgagtattatactttcctgtatgtgacggagcgtatccgttattcgcccgagatttaaggcaacaccgcacaattgcattatgcggtgctgccctaaaaagaagcacgacaattcttccagggaaaaactgaaaaagcgcaaaaaggatgcaaagaagaaaaccatcaccgtcagcactactgacccggactgcggcctgtttgtcaagggtgagcacaagaagcagctggcctatgaagcgcataccgcctgcgatgtccacggtgtcgttcttgcagtagaggttacccccggcaacgtccatgacagtgtaacgtttgacgatgaatacgaccatgtggtcgagcagttcccgaacgtccgtacctttgtagccgacagcgcgtataagacgccccatatctgcaagaaagtttttggcgataacagagctttgtccacagcctataaacgtcccatgaccatgaagaacggccacgaatggtggaaatatgtgtatgacgagcacttcgactgcattatctgcctataaattgcgtgaaaaagacgatattccaaatgaatcatttttaacaggataatatttccgaggaaagaacaatcagtctcgctgccgttttgctcggatttctgtgaaaaaatttgatattttgttgacttatgttggttcgtgtggtattttattgaaagagtcctgattcgatcagccacagcatcattatactattcatggaaaggaccagtctcatgagccatgcggaatatctgaacgattatgaagcaaaacatcaaattctcgaagttggacggcggatgtacgaaaagggctttgtcgcttccaatgacggcaacatcagctgccgcgtaagcgaaacggagctgtggacgaccccgaccggcgtttccaagggatttatgaccgaggaaatgctcgtgaaggtcgatctgaacggcaacctgcttagcggtgagcggaagccctccagcgagattcgtatgcacctgcgcgtctaccgggaaaatccgcaggtgaagagcgttgtccatgcgcatccgcctgttgcgacctccttcgccattgccggcatctcgctttcccgcgccatcctgccggaagcggtggtgcagctcggtgtcgttcctgtcgccaactatgcaacccccggcacacaggaggtccccgattccatcgcgccctattgcaggagtcacaacggcgtcctgcttgccaaccatggcgcgctgacgtggggaaaagatcctgagcaggcttatatgcgcatggagtcactggaatattacgcaacggtttccatgtataccggccatatcatcggccaggcaaacgaactgacgtgtgaacaggtggaccgccttgtcgatacgcgcacacggctcggcatccagtcgggcgggcggccggtgtgccgccatgcagaggccggagagccgcgtccctgcgaatgcggcctttgcaatctgacacccgctgcgctttccgagctgatctgccacctgatcgcaacgcttcctgaggatgtaatccgcctgctccgccattccagctgagtgtgccgacccttgccggaaaaccgatacagaaaccaagcctcccgggacaaccgttccgggaggcttggtttatagaatttgcggctgccctctcgggcgcgtttatgccagctggcggggccccgtgcgttatcgctgtcgctcggcttgctgcagaacacgatcatgggcacaacgcccgcgaccgggatgagcagcagcagcgaaaaggccgcgtcgaactgcgccacgagcgggatggccctcgccgtgcgcttggcgcacactacggtcagggctgacagaccgctgtgcgggcacagtggacgcgcttgccgcccgcctcgggcgaccggtacctgatctgcagcgacggcctgacggatatggtgccgaattttgagctgtacagcacactgctcatggttcgtcggccgaagaatgcgccgcccgcctcatgcggcaggccatgcgagccgtgctcgccttggctgttactgttgcggtcaatgaaagaggcagtgtcgtcaatgccgacatttgcaatctcttcggtcacctgccagccctctgcctcgaggaaaaccgttcagagatcgcgatatcgtaaatcgtaataaggaaataacaccgcgatccgatcgcggtgttatttttataaaccactattccagcagcgaaaagcccagaatcacgacgccgagaatgacgagaataacgcccgtggcgcggttgagtgttttggcgctggcacggttggcgatgcgcgcagccagctgggcaaagccgaacgtaaagatgatgcacaggaaaaacggcagccactgcggcgcgccgccgatggcgaagtgcgaaacggagccggtcagggccgtgaacgtcatgatgaacacgcttgtgccgacggcggtcttgagctcatagcccatgacgcccgtgagcagcaggagcatcatcatgccgccgcccgcaccgataaagccgcagataaagccgacgatcgcgccgcagacaatggacttgatgatacgcgtgcgcttcgggatctgctgcatgtcctccttcgtggtcatcaccgggcggacgatgaacttgatgccgagcagcagtgtcatgatcacggagaaattgcccattgcaacggatggcacgaggctcgagacaaagcttccgactacggtgaacgccagcaccgtgatcatcatgatgaggccgttgcggatgtccagattcctgttgcggccgtaggtataggccgagacggcgcttgccagcacatcggatgccagtgcgatgccgacggccgtgtacggctcgatatgcagaaatgtgacgagcatgggggtgatgacggcagcggcactcattccggcaaagcccgtgccgaggcctgcccccgcacctgcgaacaggcagacgacgatggtcaggaggagctgcatcgaatcaccccttcctcgtcatttcgaccgttctgcggtaggcggccgtgacggcattctgcacggtgtaggaaaatccgccctgctcgagcgccagaacgccctcgatggtcgttccggccgggctgcacacgcgcattttcagcacgtccggcgcttccccaccctgcaggagcatctccgccgcgccgagcatggtctgcgccgccagacggcaggcgtccgggtacgacaggcccgcgcgcacgccgccgagggccagcgcgtcggcaaactggaagcagaacgcaggtccgcagcccgagatggcgcttgcggcgtcgatctgcgcctccggcaggggcagcagcagcccggcctgtgccagaacggcgcggaaggcgttcagctgcgcgtccgtcacgttctgcgcggcatagaggatcgtgcccgcgccgacggcggcgggggtattgggcatgatgcggatgagcggcagtcccccgccgagcatggcgtccagctcccggagcgtcacggccgtcgccatgctgacgacgacgggtgcattccccttccgcgcctgcagcacgggagccagctctcctgccagccccggcaggccctgcggcttcacgccgaggaacagcagctcggccttttccgcagcctccgcgttcgggcagaccgtcccgcccagctcctttgccagcgccgcggccttggcaggggtgcggttggcaagcagcagcgtgtggccgccctttgctgcggcccgcgccagcgcgccgcccatatttccggtcccgatgaatccgactttcatgctcttacctcctgatctgaccgtttccggtgataacgtactgataggtcgtcagctcgttcaggccgatcggcccgcgcgcatggagcttctgcgtggagatgcccatctcgcagccgaggccgaattcgccgccgtccgtgaagcgcgtcgaggcgttgacatagacggccgcgctgtccactcccgccgtgaagcgggcggcgttttcctcactttgcgtgacgatggcctcgctgtggtgcgtggaatgctgcgcaatatggcggatggcgccctccacgtcgtctacgacgccgacggccagcacatagtccagaaattccgtgtcgaactccgggtccggcgcgatgccgaggatggctgcggcttcttcgtcgcagcgcaggcggacggggtgctttgcaccggggccgcacaggcgcttttgcagcatgggcaggagcttcggcgcaatcgcgcggtggacgagcaggacctcagccgcattgcagacggacgggcggctcgtttttgcgttttccatgatatcgagcgccatatcaagatcggcgctctcgtcgacatagacatggcagatgcccgtgccggtctggatgcacggcacggtcgcgtgctcgacgcacgcgcggataaggcctgccccgccgcgcgggatgagcaggtcaacatagcccgtggccgtcatgagcgcggcggccccggcgtgggatgtgtcctccacgaggttcacgaggtccggcgtcaggccggtccgctccagcccgcggcgcagcgcggccgtgatggcggcggcggaacgataggcctcgcgcccggagcgcagcacgcagacattgccggatttcagcgcaagcgcggcggcgtccgacgtgacgttcgggcggctctcatagatgatggcgatgacgcccatcggcacgctgcgcttgcagatgcgaaggccgtccggacggacgaattcgtccagcgtccggccgaccgggtccggcagggcagcaacggcctcgatgccggttgccatgccctcgagccgtgcctcattcagcgcgaggcggtcgagcatgacgtccgagactttgccgcgcgaggcctcgagatcggcggcgttctccgccagaatggccggggcctccgcgcgcagctcctgcgccatggcggcaagggcgcggtttttcgcctcggtgtcgcgcagggccggacaggacgccgcggccttcgcgcgcttcagaatgacctctgtcggggtgaattccatcatgcaagcacctcctgtgccagaaattttgtaccgacgggcttgccgtccatcagatcgtagagcgcagcgggctgcgcgccgttggcaatgaccatgggcacaccggcctccgtagcgatgtgcgcggcgtggagcttcgtctgcatgccgcccgtgccgaatttgctgcccgcgccgcaggccagccgctcgatctccggcgtgagcctctcgacgacggggatgagcttcgctgcgggatcgctgtgcggatcggccgtgaacagaccatcgatgtccgaaaacaggatgagaaggtctgcccggatcgtccgggctacgatggcggccagcgtgtcgttgtcgccaatgcccagctcctgcgtggcgacggtgtcgttttcattgatgatgggcagcgtgccaagctgcagcagccgtgtgagggtgttttggaagttctgcgcgcgctccggcgtctcgatgtcgtccgccgtgatgagcagctgcgccacgacgtggtggtactgcgagtagagcttatcataaatgtacatcagctcgcactggccgacggccgcagccgcctgcttgccgggaatatccttcggccgctcggccagcgacagcttgccgacacccatggcgacggcaccggacgataccagcaccagctcatgtcctgcatttttgagatcgctgcagactttgcacagctcctccacgcggcgaatgttcagattccccgtcgggtgcgtgagcgtggacgtccccagcttgagtacgattcgcatggttcaaggctcctaacttttttgctttagcttgttaacacctgcgtatcatagcacgctgaggccggaattgcaagcgctgccggattttttgatgagcagccgcaaaagaccgcttttttagcagacacaattgga

SEQ ID NO: 11137 - DNA, 4846 bp, Unknown
  gut microbiota DNA sequence
gataggccgaggcgaccgtgaacgagaggccctcggcccgtccggcggccagcatctgcttcagcggctcataggcagccgtggccacaaaatagggccaatcatgcagctgcgtcagctccggcgcataatcctccgccagcggatgcgcgcggctcacgagcagcaggagcggatcatcctttgagggcggatcggccgcctgcgtcgcagggacgggctgcgtttccgccgttgtctcccccgccgtttcgtccgccgctgcggaccccggctgcggctcgtccgccccgcagcgcagcaggagcagcaccagcaggaccgccgcgccgaggagcgcaaagcggccccgcagtggtttgcggcgctgccgcttcctttttgtggttttccttcgtgttctctgtggtgtatgattcatgagatcaaccgcctttcgtgttcattctagcgaattcccgcatcgaatttgcagcaaaatcggcggtgcggaaaaattccgggcgggatgccccgcccggaagaaggatcagtcggattacacaagggcggccgtgatgatggccatcttgtagacctcgtcggcgttgcagccgcgggagaggtcgttgatcggggcgttcaggccgagcaggatggggccgtaggcctcatagccgccgagacgctgggcgatcttatagccgatgttgccggcctcgatgcacgggaagatgaaggtattggcatagcccgcgaccttggagccggggaacttcagctggccgacgaccggggaaacggccgcgtcaaactgcatctcgccgtcaatggcaagatccggcgcaagctccttggcctttgccgtggcatcgcgggacagctgaaccgtgccgcccttgccggagcccttcgtggagaagctcagcatggcaaccttcgggtcgatgccgaacgtctgcgcgcagcgcgcggtctcgacggcgacctcggcgagcttgtcggcagcggagacaacaactttgccttccttgtcgagcgtgtcttcataggagatgttgatggcgcagtcgcccatggccagcttctcttcgccgcggacgaggatgaagcaggaggacaccagatgcgcgcccggcttcgtcttgacgagctgcagggcgggacgaacggtgtcagccgtggaataggtcgcgccgcccagcagagcgtccgcatagcccatcttcacgagcatcgtgccgaaatagttgcccttggacagcgcctcgcggcactgctcggccgtcatcttgcccttgcgcaggacgaccatcttctcgaccatctcgtccatgccgggataggtcgcggggtcgatgatctccaggccctcgatgtcgaagccgcccttgacggctgctgctttgacctcttcgggcgcgccgatgaggatcggggtgaggaagccgcccttcttcaggcggtcggcagcctcgaggatacgggcatccggcccttcggtaaagacgatcttacggggattcgccttgagaatttcaatcaaacggtcaaacatgaatcgttcctccagtatgatcgggccagcgcccgtttttcagcttgtcgaaaaaaccctttgggctttcccgccaagctgatttcaaaattgcaaaattattatttgtatttttattttgcaattttgccgctgcggcgggttattgaatgcgaaaggacaccctgacggtttcctttccctcttttcttccctccgaaactttcggctgagcaggtttttcggcagtctgttcgtcccttattatacaaccatgccgtccggaaaatcaagcgaaacgtcctgttccgaccggatttccagccattttttcaaaaacgggtggaagaagcggatggaaacggcgcaaagctgttgtcccggcccgccggactccgccccgccgtactgcgggtcgccgaggatcgggcagccaagccacgcgcagtgcacgcgcagctggtgcgtccggccggtcagcggctgcagctcgagcagggagatgccgtgctccgtccgcagggtccggtaggccgagcgggcaggctgaccgtctgcgcgcacgcagcgcagcaggctctccggagacaggcgcgcgatgggcacgtcgatcatgccctccggcggctgcggcacgccgcgcacggcggcatgataggtcttgtgcttctccgctgcaatgagcagagcgtgggcgtgggcgttctttgccagcagcaccacgccgaacgtgtcgcggtcgagcctgctgaccgggtggacggcgcaggcctgcccggtcctgtcataatagccgagcaggcggttggccagcgtgccggtctggcgggaaaacgacggatgcacgagcatcccctgcggcttgtcgaccgcgagcagggcctcatcctcatagaggatggaaagcggcccgtcctccgcggggtaatccggccgcggctcgtcgaggcacacgcgcacgacgtcgccggggcggacgggccggtccgtgtgggcaggctcgccgttgacggtgtaggcatcgcagtatttcagccgccgcacgagcgtggacgaaagctgcagctcccgccgcaggatcgacagcaggtgcgtctcccgctccgccgtgcagcgaagctccatgctcagtagcgcgcgctctgcgcgacgtccagcacgaacagcacgacgccgccgcagcgcgtcgggatctccagcggcgcggtggaaagcgggatcggcggcatgttcggcgagagcaccggcgcttcatagcgcatttccgtgcgctcgccgtgcttcttcaggatggccagcgcctcgtccaggcgggcgctctccaacccgatcatcagcgtgacgctgcgctttttcaggaaaccgccgcttgagttgagcaccgtggcatagaagccgtgctcgttgagcgaatggacggcgtcgtgatagtcgtcgccctgcaggatggccagaatcatcttatcgtactgttgcatcatggaaacctccttttcgatgcggggctattgcagcccaagctggtaaaacgcgactgcgcttgccgcagccacattcaaagaatccaccccatgggacatggggatgcggaccgtgtaatcgcaggcgtcgattgttgcctgcgcaaggccgtcgccctccgtgccgaggacgatggcaaggcgctcctccgccagcaggcgcgggtcgttcaggggaacggaatcgtcgcgcagcgccatggccaccgtgcggaagccctgcgcgcgcagccagcccattgagggctccggccagccgtccgggagatacgtccacgggatctggaacaccgttcccatgctcacgcggacggcgcggcggtagaggggatcgctcccggcctccgtcagcaggacggcgtccatattgagcgcggcggcggagcggaagatcgcgccgaggttcgtcgggttcatcacgttttcgagcacgacgacccgccgggcatcccggcacagggccgcggcctccggcagagccgggcggcgcatggcgcacagcatgccgcgcgtgagatggaagcccgtcagctgcgtgagcacggcgtcctccgccgtgaaaacgggcacgtccgcaccgagccgggccagaatttcccgtgcggcggcggaaacgtggctgccgtccatcagggcggacacgggcacacagcccgcgtcgagcgcgcgcccgatgacgagggggctctccgcgatgaacagggcctgcgacgggtcctgccggctgcggagctgcacctcggacaggcgggcgtagacatccagctccggggcggaaaattcggtgatctcgatcagattcggcatgccggtattctctccatttttgggataccatattatagcacactgcgcgcagcgatgcaagaagcgggcggggcgcggagcaaatagaaaacagaaagcggaacgttatcgttaggccgccgggcgagcgttgtaggggagcggcatgccgctcccggcggcgcacctacagcccgtactggccgccgttaaaatggcaagcaccttttgtcattgcgaggagcgaagcgacgtggcgccctgagcgcgaagcgcgaggaagtgcccttggggtgcaatctcgcagcacccgactgaattgtgggaaagcgatcggcgaaatcgtgagtgccttcccgagattgccacgtcggccgttggcctcctcgcaatgacacgtcagggcggtgcagtggtgcaccagagcacttctgcggttgaatgtcccctactgggcgctcagggaacactgctacagatcccgtcggaggccatcgccgttttgacggtggcctgtgcgaatcggcagtataacgccgggaggggcatgcccctcccctacaacatatactgacatttttcctgttttcacttcgtttttcccgctcccatttgtgcattccgccgaatcgcggccgaaacgaaaatttcctattgctttatcacactaatgtgctattatattagcgtattaaatttctgcacggcctgccgacatggaggaattcattatgaaccgttttgccagatttgccgcttccgcgcttgcgctctccctcgtccccgccatgctgatgggctgcgggaaaaaggaagcctccaccggctccgatctcgattacatcaagcagaagggcacgttcgtcgtcggcatcaccgacttcgccccgatggactatcaggacgccgacggcagctggatcggctttgacgccgacctcgcaaaggcctttgccgagtctctcggcgtggaggtccagttccagaccatcgagtgggacaacaaggtcatggagctggacgg

SEQ ID NO: 11138 - DNA, 14423 bp, Unknown
  gut microbiota DNA sequence
atatcgtagacgtatatgctgcggtcgacctgatacacggtatactgcccccaactgacatgtgggtccgccgtccatacaaaattctccgtcacatccacgatcgttttctcttcgcctgttctgagatttttggaatacaggcggaagttgtaaccttccgacccatcccgcttcaccggcgttccatccggccggtccgcataccagtcctgaaaaacagcgacatcgccccagacaccgtgcatatacgggagataaccgtcctcgtcggccatatactccacgagctcgcctgtttccagatcaaggctacacttactgtattcctccttgactgactccgtctgcccgtccttcatcgcataggtttcttttgacaccgtgaggtaagcctttccgaatgaaaggccatagaagccgcaccggcattcctcattctcattttccggttcccagcttgcgaggatctgaagaggacctccggagaccggccgcgtgacaaacgccgaagcggtatcgtcgttgtaatagatcatggcatagaaattgccccgatactctgcaaacccggagatcaccccgccgaaattcgccgtgcaggaggcgtcattgtgcttgcagcccgcctgatagcagggaaaataggccgttttcgtcgtcgggtcataggcctggatcgtttttgcattgaacactgcgcatgtccaaaagccgccggtcgagggagacggaacatatatgatgttcgcccgaacattttcctcaggaagagggtaagttttgatttctacaggctcttccgcgccgctggcggaacccgactgcacggtctgcgaagacgatggaaccgaggtaacatccttctgagcggaatagcagcccgtaaaggaagccaacagcactgccatgcagaccgtaaaggcaaaaaagcgtttcttcatatgttccgcctcccattcaactagactataccagaatgtgtaacaaagctactgctattttttgaacccaagcgtagcagaggttgtaacccccgaatagccattaaaggtcgcattcccacccatgtagttaactccggttgccacatcgaatgcactactatatttgttgattatgttggaaacgattgcagtattatctataatcttgtattttttaacaaatattcattgaagtttgtcagcggaacgctgcgtcataattacttcggtaatagtcctccttgctgatgtaacactgctcgaaatctccactcgaattgcgcttcaaaccagcgaaataaccgttgcattcataattcgcgccaaatgccactacattcccgccgcgagtgtccagctcaatgactgatccatctgcaatgtcgaccgcccatgcacggcaggtatcctccgttccgccaataaccatcacatgtccatcctgaatcatgtaattataaaaatcccagcccggatcatgggtaaacagcttcttggatgtctgcgtctccatgtcatagacgtacacactccggtcaatctgatacacgacgtactgtccccagctcatgtgtggatccgccgtccatacgaaattttccgactcgtctacgatcgttttttcttctcctgttttgagatttttggaataaacgcgatatttgtaatattgcaggccgtactgatacgacgttgtgccctccggctgctgcatgatccattcttcaaactcgggcgcgccctccactgttttcaccgtctggtaaacagcgatatcctcccaaacgccatacatatatggaaggataccgtcagtatcggtcataagttccaccatttcccccgtttccagatcaaaactccacctgctgtactcctgaccgacacatgcctgctggccatcctccgtcatcgtataggtttcttttgccactatgagataagcctttccaaaagaaagtccatacaggctgcaccggcattcctcgttttcattttccggttcccaacttgcaaggattcgaagcgggccgccggagacaggacgcgtaacaaatgccgatgcagtatcatcgttatagtagatcatagcatagaaattgccccgatactctgccagcgaggaaatatctccgaaataagccgaacaggaggcatcattgtgcttgcagcccgcctgatagcagggataataggtcgttctcgtcaccggatcgtaggcttgaattgtttttgacgtgaagactgcccatgtccagaaaccaccggttgagggagacggaacatatatggaatccgcccgtacattttcctctggaagcacataagtcctgatctctacggattcctctgttccgctgccggaacccgactgcacggtctgtgatgacgatggaaccgaggtaacatccttctgagcggaatagcaccccgtaaaggaagtcaacagcactgccatgcaaacccaaaatgccaaaaagcgttttttcatatgttccgcctcccattcagcattcaagattaactgaatgttccatcatagttgctccggtaaaagtcttctttgctgatgtaatactcttcaaccttgccagtctgattggcaagtaatccaacaatgtagtcattgcactcatattccggagtaattgtaattgcatttccaccgcgggtgtccagttcgaccactgattcatcagcaatgtcaattgcccaagcacggcaagtgtcgcccgttccgcagatggcaatcacatggccatccagaatcatataattataatttttccaatcttgatcataagtaaaaagctcttttacggcctgtgtttccatgtcgtagacatagacgctgcgcccgacctgatacacgatgtactgtccccagctcttatgcgggtctgctgtccatacgaaattttccgacatatccactattgttttttcatcgcctgttttaagatttctcgaataaaggcggtaattataatactgtcgaccatacagatcccacggggttccctctggctgctgcgcgacccagtcttcaaacgcaggcgctccttttacagtttccagtgtctgatagacaacactgtcttcccagacaccatacatgtatggaagggtgccgtcgacatctcgcataagttccatcattttccctgtttttagatcaaaactacagtcgctgtactcctcaccgacgagttcctgctgaccgtcctccgtcaacgtataagtttcttttgacactgtgagataggctttcccgaaagaaaggccgtagaagccgcaccgatatacttcattatcattctcaggctcccaactcgcaaggatttgaagcgggccgccggagaccggccgcgtgacaaaggccgaagcagtatcgtcgttgtaatagatcatggcatagaaattgccgcgatactctgccaacccggatatctcaccaaaataagccgagcaaaatgcatcgctatgctcgcaacctgtctgataacacggaatataggttgattttgtcaccgggtcgtaggcctgaatataattctgtatgaacaatgtccacatccaaaagccgcctgttgtgggagacggaacatatctggtacccgcctgaacattttcctccggaatgtcataagtcctgatctctacggaattttctgtggcgctgccggaatctgactgcacggtctgcgaggacgctggagccgatgggccattcttctgagcggaatagcagcccgtaaagaaagccagcagcactgccatgcaaaccgaaaaggcaaaaaagcgtctcttcatatgttccgcctcccattcaactagactataccagatgggagccaacagcgaacgatttcttctctgccgctcccgcctctattcgaccattggaatcaccgttgcctttcgtacagaattcccactgcagaggtctccgcagaattttcatctcttgatacattttgtagcctgagtatatcacttctgaattttcagtgcaagaggtcttggcgaaattatccacaaatttttgtagattttgttggaaacgtttacgttattgtcttaaatcttgtatattttaacgaatattcattgcagcctgtcagcggaacgctccgtcataattgcttcggtaaaagtcttctttgctgatatgacacagctcgtaatttccgggcgaattgctcagcaaaccggcgaaatacccgtcgcactcataatgcgcagagaacggcatcgcgttctcgccgcgggtatccagctcgatcacggagccgtccgcaaggtcgaccgcccaggcattacaggcgtcctccgttccgcacaggacgatcgcatggccgtccagaagcagatagttgtagaatttccgttcctgctcgtgggtgaagagctttttggtctcctgcgtctccatgtcgtagacataaacgctgcgaccgacctgatacacggcatattttccccagctcctatgcgggtccgccgaccagacaaaaggctccgacccgtccacgatcgtcgtttccaccccggttctcaggtcccgcgaaaggatgcgatagcggatatagagccgctcgtactcgtcccacgaggcctcttccggctgctgcgcggcccagtccgcaaagtccggcgcgccctccgccgtttcctgcacctgaaaaacggcgcagtcgccccagacgccgtacaggtcataattttcggcatgttcgaggatcgtcgcctcctctcccgtctgcagatcaacggagacaaggcggttttcctgctcgtcccgcgtcagctggccgtcttccggcagataggcggctctggtcacggtgagataggccttcccaaaggaaatgcagcgcagcgtgcagcggtattcctcgccctcgttctccggctcccagcttgcaaggacccggagcgccccgccggagagcggccgcgagacgagtgacgctgcggactcgccgtcctgctggacaagcgcatagaggctgtcccgatattccgccagcgcgctcaggttgccgaagcaggcgctgcaggtgctgtcattgtgccggcagccgctttgataacacggaacataggctgtgcgggtcacaggatcgtaggcctcaatatagggatggagcatcatatcccactgccagaacccgccggtcgacggcgaatcggccatgttgatggagaccagaagattttcctccgggaccgggtaagtcgtgatggcggtctccgccgcgggcggctgagttggctgcgcgctctccggcggcgtgctcccctgccggacgctttcagccgcaggcgcggcatagcagccggtcagaagcagaacgccagacaggagcagagccagccgttttccgatcgatgtgttcatctgttttccctcccttttttgcagcctgagtataccatttccgccccggcagaacaagggagatacccgtaaggatttcttaagatttgtttaatttgaataaaaatatacagaattatttttcacatttattcactattttgctgaggggtacaaaaaagcggaagccgggcggcttccgctttaggagacagtattactcagtcaacgaggcgctcgagccaggtgatgtaggaatcggaattcagcatgatgggatagtccagcacgatgcagtcgttcacgccctgttccttcgcaaaggcggccaggtcgaggctgggcttgccgtcgcggttgaattcgcgcggatcgatggcgatgatcttgctgtagtggctcgtgagccacggcgtgaaggcgttgccgtaggactccttgaggatcatgcacaccgggccgtcgacatttgtcttgatgacggtgatgggatggtcgccgccgaggaatgtcaggtatttgttcgacgtgtcgtccaccttgcaaagcgtgccgccgaaatattccatagagaactccgcatccgggtaccacttcgtgtccagatcgacgaacgggcgccagaactgcacggtgtccgggttgtccgcaagggcctgactctggggataggccttgatggcgctgtagagcgagccgaggaagccggtgtattcgccgctttcaaacttgctcagcggctcggccttgaggcccgcgctctcgcagaaggctgtgtaggcataataggcgccgagggccgtccagtggtggtccgaacggaagtagaggtattcgtccttgtgtgcctcaagcttgctgtaggcatcgaccgcgatcgccgtgctcttgagctccttcaggcggtcatagcacgccgcgatcatgtccgtctgcagcatgtgctggttctccgccggggcgtagaacgcggccgcattcggcacggcgatggagaacgtgcgcacgctgctgccaagcttcgcagcaatgtcgttcaccgcatcggcataggagcggatggtgtccttgtcgccataggggacctccatggcgcggtcgcccacgacgagcacggagccgagctcctctgcagcagcgtcgggatcctgcgtctgggtgggctgagtcggctccgtcggctcggcggagtcggtggccgtcccgctcgtcccgctgggctgggtcgaggacgagggcgtcttatcgtccgtcgacggcagggcttcgccgtggttggccgcgccgccgttcatattgatgacgagctgcgcgccgtccttcgagccgccgctgaagtaatagaagccgttgagcgagcggttcgcattcatcagcttttcgcggttcgggaacgtatcggcaaaatagtcgcggtaatccgaggcgtagctgccgtcgagcatggcggagaacgtcagcttcgggcgggtcttcagcttgcgccgctcggattcggaataggtcgcatccttgtccagcagggcatacaggccgatgcagagcatgccggccagcagcaggcaggacaggatggtgtagattcgtttcatgcagagcacctccgggggtcagaattgcgcatacatggacggcgaactcgtcgaaccgacaagggacaccgtgcacagccacagcagcaggatgaggaacaggaagacgctggcaaggtaaataccctttttcaccgtcacggcgccgcggcggtcggaacgccccatgccgaacaggccgctccagataaagccgaaccagcgcggaagcacggacgaaccgatgaggcaggtcaggagcagcggcagcgagtttttgagctgcagcgaaacacctgagccagcaaagctcgttccgccgccgaacatggcggcaaatgccgagccgatgccggagagcgacgtattcatgaacagcacccagccgatgagcacaaagaacatcgtcacgaggttgcgcacgataaacgggagcgtttccagcttcggggcgatctgcttttcgatggacagcagcacgaagaaatacaggccccacagcacaaagttccagcttgcgccgtgccacagacctgtcagtgcccagacagccagcagattgaggatctgacgagccttgccgcggcggttgccgccgagcgggatatagacatagtcgcggaagaagctgccgagcgacatatgccagcggcgccagaactccgtgatggacgtggagatgtacggcaagtcaaagttctcgcagtagcggaagccaaagatgcggccaaggccaatggccatatcggaatagccggagaaatcgaaatagatctggaacatgaacatcagcgcagcgagccatgcgccgacgaacgtgccgtttccgccgccggtgctcagcgacgcaacgaccttgcccgcataatcggcaagcaggaccttcttggcaaggccaatgataaagcgctgcgcgccctcgaaggccgcgcgcggcgtggtgcggcggtccatgagctgccgggcaacctgctcatagcgcacaatggggccctgcatcatcttcgggaacatagagaggtagagcagcagattgaagaacgaacgctccgccttgaccttaccgcgatagacatccgccacataggagataacctggaaggcatagaacgacaggccgaggggcagggcgctcgtcggcgaccggaaggcaaagccaatggaattcaggccgttcgtaatgccgcgcagcgcggcaagcatcacgccgccgtccgcgacggtgatgccgaagatgccgaggaagaagtccagatatttgaacaggcccagcaccgccagattgacgacgaccggcaggaagagcgtattgcgcttccccggacggatccgccgggccatggcgaagtttgcataggaaaggccaacgagcagcagcacatagaccggctgccccatggcatagaacagcaggctggccgccagcaggacgatattcttcagccgcagaccgggcaccagaaaatagaccagcagcgtcagcggcaggaacagatagagaaaatacaggcttgaaaattccataggcagtccacctctttcgacagttttttctctctcattctatcagaattccggcggattgcaagcactaatttacataattacgtttttcccgcaggacgcctgctcccttcgacgacctgtctccagagcagcagcagggccgtgagattcggcagggccatgcacgcattgaggatatctgccagttcccacgccgccttcacggacaaaagcggcgcggcgcacagcgcggcaagatagcaccaccggtacaggcgctgcgcccgctgcgagccgcccgtcagatagcgcaggcactgctcgccataaaaattccaaccgatgatcgtggagaatgcaaagaagaccaggcaggccagcagcaggaacgacgacagccccgcaggccatggcagcgccgtgcgccacgcctgctccgtgatggcaaagcccgcgagccccggcgcacaccacgcacctgtcacgaccaagcacaggccggtcaaggagcagatgacgatggtgtcgaggaacgtccccgtcatggtcacaagaccctgccggaccggatcctcgttgctggagcaggccgctgcgatcggcgtggagccgaggccagcctcattcgtaaaaacgccgcggccgatccccatgcgcaggatgcgccgcattgtcagcccgcccgctgcgccggcggcagcgcgcggagaaaatgctgagaccgcgatcagacgcagcgccgccgggatctgcgcccggcagcgcacaaggatgagcacggagcagaggacatacacggcggacatcagcggaacgacgagcgagcacacacgcgagatgcggtccgctccgccgagcagcaccatggcggagaacaggaccgtcagaccgcccgcgatgacagccgcccaggtcacggcgttcccgccggccgtcatggcgacgctgcgcttcagcgggtcgaaaaagccctcgaccgccgtcgtgatgctgttgacctgcgccactgtgcccacgccgagcaggccgaccgccgccccgacgaccgcgaacgtcacggcgagccagcgccagcccagcccctgctcgatgtagcagaatggcccgccgagccatttcccgccctgccgcctgcggtagcgcaccgcaagatagccctcggcatactgcgtcgccatgccgaacagcgccgcgaccatcatccacagcagagcgcccggcccgcccgcggccagcgccgtggccacgccgacgatattgcccgtgccgatcgtggcggcaagggccgtgcacagcgcggcatagggcgagatgccgtccgcgctctccccgccgcggaagatcgcgcgcagtgcctgcccgagccgccgcagcggcaggccgcgcaggcggagcatgtaccagatacccgtccccagaaacagtgccatcatcggccagccccacacagcctcgcccacgcgcgccagaagtgaattctgcatagtacctccccgattctgaacaatccgtgaattttggccgcgcagtttgccttttccccgggcggccggtataataatatgatgtattctatgggaagggtatcataatttatgctggaactccaagcgatcacaaaggattaccgcagcggcacagagtgcgtgcacgcgctccgcggcgtgagcctgcgctttcgcgacaatgaatttgtctccattctcggtccgtccggctgcggcaagacgacgctgctgaacatcatcggcggtctggaccgctatacggcaggcgacctgctcatcaacggtgtctccacaaagcagtaccgcgaccgggactgggacgcctaccgcaaccacaccatcggctttgtttttcagagctacaatctcatcccgcaccagagtgtgctggcaaacgtcgagctggccctgacgctctccggcgtttcccgcaaggagcgccgtgcccgcgccattgccgtgctggagaaggtcggcctcggcgatcagctgcacaagcggccaaaccagatgtccggcggccagatgcagcgcgtcgccatcgcccgcgccctcatcaacgacccggacattctgctggcggacgagccgaccggcgcgctggactccgagacgagcgtgcaggtcatggaaattctcaaggaggtcgcgcgcgaccgcctcgtcatcatggtcacgcacaatccggagctggccgagcgctattccacccgcatcatccgtctgctggacggcagtgtcgtggatgacacgcagccctgcacggcagacgaaccgcaggccccgcgcccggcccgcacgggcaggacgtccatgtcgttcctgacggcgctgtcgctgagccttcacaacctgatgacgaagaaagcccgcacgatcctcattgccttcgcgggctccatcggcatcatcggcatcgcgctcattctgtcgctctcgagcggcgtgcagtcgctcatcgaccgcatggagcgcgagacgctctcgtcctatcccctgacgatccagaaaaacaccgtggacttttcgtccatgatgaacatgcaggccgatgttgagcagagcatcgacgggcaggaccccgaccggctttattccgtcagcgtcatgggcagcatgatggactccatgatccagggctccaagacgaacaacctggccgacttcaaggcatggctcgactccggcgagagcggcatggaggagctgacgacggacatcacctatacctactccacgcccctgacgatctaccgcacggacaacggcctgcagaaggtcaatcccagcacgctgttctccgacctcggcgtcatacccgccgatacctccggcacactgcttggccagagcatgcagatggacgtctggacgcagctcacgggcaacgaagacctgctgaaggcgcagtatgacgtcatcgcgggccgcctgccggagcagtacaacgaggtcgtgctccttgtgaacgaggacaaccgcatcacggactacacgctctatacgctcggcctgctcgatgcgcaggccctgcaggacgccgtggaggccgcggcccgcggtgaggatgtcagcatcgacaccgaggtgcacagctattcctatgacgacattctgtcgctgcgcttccgtctgctgacaaacacggactgcttcgtccggcaggacggacagtgggtggataagtcggacgacgaagcctatcttctgaacgtgctgaacagctcagacgaaatcgccgttgtcggcattctccgcccggccgagggcgcaacgaccggcagcggccagagcggcgtgatcggctaccgcgccgacctgatgacacatctgctggacaaggtcaccagcgcggagattgtccgcgagcagcaggcggcccccacagtggacgtcttcaccggtcttccctttgagcaggaggagctgaaggacgcctacaccatggaggagctgcaggcctatgccgcgcagctgcccgcagaggcacagcaggagctcatgggctatgtcagctccatgcaggccgccgggatggacgacggcacgatcgccacgcagctcatgcgcgccgcgctctcgcagtccgacggcgcgacctacaccggcaacctcaagcgcctcggcgtctccgacccggacgatccagaggccatcaacctcttcccgaaggatttcgaggcaaaggaccggatcgccgaccgcatcgcggaatacaacaaatctctgcccgaggacgcgcagctggcctacacggactatatcggcctgatgatctcgtccatcacgacgatcatcaacgccatcagctacattctcattgcctttgtcgccgtttcgctcgtcgtctcgtcgatcatgatcggcatcatcacctatatctccgtgctggagcggacgcgcgagatcggcgttctgcgctccatcggcgcttcccgccgcgacatctcccgcgtcttcaacgccgagacgctgaccatcggctttgcggcaggcgccatcggcatcggcatcacactgctgctcatcctgccgctcaatgcgatcatccgccatctgagcggtctgagcggcgtggccgccctcccggccggggctgctgttatcctcgtggcgatcagtatgctgctgacattcctcgcaggcctcatcccgtcgcgtatcgccgcgaaaaaggaccccgtcatcgctctgcggagcgaatgatcaatatacgcaaggcaggctgcgcggcataaaaaccacgcagcctgctttattttcacttttgggcatattttgagacacggctggatttaccgcgtgatcagtgcagcataccagtgatccgccagacggcagacagcttcgccgtaaccgattttcccctcgtctgcatcgtccgcccgccagtacacaatggtcgggtcccatgaatactcactttcatctttgagatggaatcgaactgcctcctgcgagaaggagatggattcaatatcaacgttttccatcaacgcaagcgccgcttcagcgatatgccgcagctccgtatccgacatttcgcgctgcaaatggatgtgaagcccgtcagcttccataagcttgcagccggaatcgccgcactccgtttcctgcccttccgcatctggcttgtggatatagccgctgttttcaccaactgccgagaccgcaacattttcaaaagtgctcttgtgcctttggaatgccctgccgatctcctcattactatgataggtcgtctcggaacaggcggtgcacagttggaggagtatcaacagcagggcaagaacgagcttcttcataaaattttttcctttcgcaacgcagtcactgtgctgcacaggagccgctttctttcatccagctcccgctgtgaaagcgtgggcagttcctccacgatgccatccgggtatccgatcagatggatatccgccgtccagctcaggaaaatccgccacatttcttcgcacaatcccggcgtggagcgtgtgtgcagctccagcccattgtcaaaaatcacatgcagcagatacgcctcgtcataggaaagcctttccagccggaatgcgtctccggatgccagcagagccgccgctttttgatcgaactcgcacgcgccatacggcatatcatcgttgatctcagccgaggatgtatacgccacgccgttcagcaggatcgacacgcccgtatcgatatggatctgatactccggctcatcctccgcacgcgagagcagcgtgattgagatcatcgcacccgctctgccgaggaaacccagtgtgcgccctatgccgttttgcagcagctccactccggtcatttcagggctccgtcctccgcaaagcagtcatagtccagcctgccataacgcgcctgcacatacggcaggatcttgtcggcattgcgcacatcggtcaggcggatgacaaaccggtctcccctgatccagccgggcacaaactgcggatagaacagctttgacccggcgaaggcatcctcgcgcaggacctttgcgcccttccgcgtaatgacgagcacctgctcctttccctgcgtgcgctgcggatgcctgctacgcatcacatcgccgatctcgtcccactgcgtcgtgcggtagcgaatgccgaggaacttgtgctcgatgccctgatctgtcaggacatagtacttcccgagcgcccagacgttcagcagcgccatgcattcgcacagcgcgaacacgatgtaggccggcaccggatagacgaaaaggcccttccgcgggaaaagcaccagagcgccagtgaacacggcaagcgtcacgaccgccgggatcatgtccgaaaacttcgatacgcgcatcatttgcctccttttgtccatttgattctgtgtttcattataagggaggcacgggatgattgtcaagatgttctccgcgctccccggggcagtcggcgcttttccggaagctgccgcggct

SEQ ID NO: 11139 - DNA, 436 bp, Unknown
  gut microbiota DNA sequence
tgaagtcgccgtccagcattatgaataagatgcagaagcgcggactttctctggattttccgaccatgcaggcaaatatcatggatattgccggtgtgcgggtgatctgctctttcgaggaggatgtgttctttttggcaaagtgcttaaaagatcagtctgacattgaaatcatcacggagaaagattatatttcacaccctaagccaaatggctatcgcagtctgcacctgacgatccggctgccggtattctttgcggaaaaagagatccatgtgccagtggagatacaactccgtacaatcgctatggacttctgggcaagccttgagcataccatccgctataagaaaatctgccgataaatgctgaaatcgaaactgaactgaaagagtgcgccgattccagcagagaatgggacagcaaaatggaacat

SEQ ID NO: 11140 - DNA, 14281 bp, Unknown
  gut microbiota DNA sequence
gctgaccgtcgtctttgacacggtagttctgtgccgtgtgctgcatccagctcttgagctgggcgccggtcatcttgatcatgtagagcgtgttgttgtcgtactgatacagggagtagcagtcgcgcaggctgatgtcgccggaggttgcgccgtcggccagcagggagctgacgctccagccgcgctttgcgaccggcgtcgtcatggagatgacgtgctccttcgtcgggtcgatgttgttgtcggtgcaggcggcccagatctgtgccttgtggacgagatcataggaatcgctctgcgtgaggtagtagttggagatggtgtcccaggtgccggagaccgtgccgatcttcttgttgacgaaggcatcggagcgctcgaagagcggagtgatgagggtcttcaggccgtcgtagttcgcatcgccggacttgaaatccgggctggtgacgcggatgtccttgccgttctcgtccttgccgagggcagagttcagaggatgcatggtggactcggctgcggtaacggtgaccttgccgtcggcgcccttcgtgagggtgaggacggtctcaccgagggtggagccaccgccgttcatgacgaggacgttctcgccgttcttgttctgcagggtaacggcgtttctctgatggttgtggccggtcagcagcatgtcaacgccggtggtatgcgttgcaaagtagccgccttggttctcctgattgtagatgtcaggattgccctcgccgctgtgcatggcgacgatgatgtagtcgcacttctcctgcatttccttgccgtagtagttttcccactcatagacataggacttttcggtgttgtcgggatggccgaacgtgcagccctcatagtggctggcgacgtcccagttcgcgttgttcatgttctcgaagcccagcagaccgatggtgaaggtcgtgccgtcctcgaacttgtaggtgaaggtcttgtacggggagaacacggattcgttcgtctccgtctccacgacgttcgagcagatgacgtcgacgggctgaccggcgacggccttgtccgtggaggtcagcagattgtagtagttccactgaatctgcggcgcatagttgaactcgtggttgcccagcacaaaggcatcatagccaatgtagcgcagcgcagtcgccatggggctgttttcgccgccctcctggagaatgttgtagctgctcagcgcgcttccctgcagaatgtcgccaacatcgataagaatgctgtcgtccacggcggcgcggcgctctgcgacgagcttcgccgcctgcaggaagttgttgctcagggcactgttcgtgtaggagttccagtcgtatgcacggccgtgcatatcggtggtcgtcaggatgctgacggtgatcgaatcggacttcgcctcgaagacgtcatccgcgaccggggcattcgtgtggccttcggctgcgtaggacgcgtagaccgaggtcagcttggtctctgccgcgcctgctgggatgactgccacggaaagaacgaggcagaccacgagcagaagcgagagaagacgctttgcaatgtgtttcatttcaagactcctttgtttgtagttgcagctgcgctgcacgttttggaaatcgtgacaaaaatccaccattcatcacaggttccgtcggcaatattctaacactttgtaaagaaattgtaaaggaagcggggagacctgagggaaaaattgggagaactgacaagaaagtcttgttacgggaagctgattttctctttgtgaaaaacagcaaaaactgcgcaaagcgccgctgtcgcaacgttttcctgcattttttgcagcaaagggagccacagcgtgtccggcgggattttgacagaaaaaacaggaaaattctggacaatatgctgcatatgcaatataaaaaacgggctgtcctgctaaggacagcacgaaaaacgcttttcggcattttgaccatatgtatgagactctacatggaatcgctgcgaaaacgggcacgattcagcccagcgcgacgtccagaatcatcatcacactgaagccgacggcgaaaaagatcgtgccgatgttcgaatgcttgccctcggacatctcggggatcagctcctccacgacgacatagagcatcgcgcctgccgcaaagctcagaagatagggcagggcgggggcgacgaagcgcgcggccagaacggtcagcactgcgccgaccggctcgacgatgcccgagagcacgccgcctgcaaaggcgcgcatgcggctctggccctcagcgcgcagcggcagggagatgatggctccctccgggaaattctggatggcgatgccgagcgagagcgccagcgctccggcggcggagatccgggccgttccggtcaggtatccggcgtagacgacgccgacggccatgccctccggaatgttgtgcagcgtcacggcgaggatcatcatggtcgtccgctgcagctgcgtgcgcgggccctcggcctgaccggcgttgcggtgcaggtgggggatgacgcggtcgagcagcagcaggaaggccacaccgatccagaagccgacggcggcgggcaggaacgaaagacggccgagcgcggcagactgctcgatggccgggatgagcaggctccagacggaggccgcgaccatcacaccggcggcaaagccggtcagggcgcgctgcagccggtcgccgagcgctttgcgaaggaagaacacgcaggccgcgccgagcgtggtgccgagaaacgggatgaggatcccatagaatgttgtcataggcgcctcctattgtggttagtatatactaaccacatggtagcataaatcgccgcgtgatgcaagccggatatttcaaaaaagtgcccgccgcatccgcggcgggctggctcgaatcagatcgtgccggtgatctgcagggtggcagagccggggcggactgtccaaacgccggtctcggggtcctgcacggccgaagcggccgggacagtgatcgcggcgggcacggtccggaacagaccggtcgccgggtcgtaggtgtagttggatgcaagccaggcatcgctgttgtaggtcacggcgatattgcgcaggatcgggtcgaagcggtccgtgacggtaatgcccgcggctgcgtcggccgcagcgccgccgtagttttcgatcgtgaacgtgtaggtgagcgtgccgctgtcgctgacctgcacgggctcgagcgccttggtgatgcgcaggtccggctctgtggctgccgggagcgtctccacggccgtgacagcctcggtcaggctgccgccggtgacggtcacggtgttctcgatcgtgccctctgccgagggatcggcaaaggcattgacgcgggtcgtatagaccagcgtgattacgccgcctgcgggaacgctgattccgtcgatgcggatgccgtttgccagtaccgtgacggccggggccgtctgcagcacgccgttcatgaaatagcggagcgtccctgcctgatacgtcagcggcgtgagctgcaccgtgccgcccgtggcaggaaagttcgtcgtgccgagcgtgtcggtcacggtcagcccggtcagcgccgccgcaccggtgctgcgcagctggacgacataggtcacaaggttgccggtgcggtagctctctgcggctgccgttttcgaggcggtcaggacctgcacgagctcgcccgtgacgatgttggagttgacggtgccgccgttgtaggtcagcgtggcctgattcgtaaaggttgccatagtatttctcctttccggagaccacatcgccctccttcgacagcatatgccgaaggagggcgggatggaaccggcttcagcgctgcagccagcctgcgggcagctccgcgagcggggccggaaacgagacgcgcgcgccgatctcggcaaagcgctctgccagcggcgcggggatgcggccgtcggggtccgggctgaggttcagcatgaaattggcgtggctggcgaagcactggcgcatgaggccgagcgcccagtcggcgctctttggctctttttcgtcgtcgcggtagaaccacgtccgcgtcagcttctggcacagtgcgccgggaccggcaaagccgggcgtcagctcctgcccggcgccgttttcgaagaagacgacgtccgtgccggagatgccctccgtgcagccgatgttcatgagcaggcagttcggctgcagacgcttgacgagggcatcgacttcctcgaacggcagctcgcggtaggacgggccgccccacggggcgttccagccgtctataataagataaggtatctcgccgtagttcgtcagcagctccgtgatctgcccgagcacgagctcgcgctgcgcagggggaaaggagcgccgcccgatcccggccgtcaggtcgagcacggagaagtacaggcctgcctgcagaccggctgcgcggaaggcccgcaggaattccgcgacgatgtccgtccggaccgtggcctgcgcgacgctgtggttcccaaattcggacggccagagtgcgaagccctcgtggtgctttgccgtcaggacggcaaagcggcagcctgcgcttttggcgatctgcgcccagcgatcgcagtccggcgcgcggggcgcccagtcagattcggggaagggataacggcgcggctccccgccgttttccagatcgaattcccagtcgatgatgtcgggatttgcatggaactgcacggcggcactgttccagtggataaacgtgccaagccggaggttgatgaagtcgcgctgaagcgcacagagatggtccattcgcgggcccgcctttccgattttctatgggatgattatacgggcaaagcaggcgttcgtcaagcctctgcgcggcgctgcgcgaaacggcgctgcagaatgtgcatgtcgtggaaatagatggggacaaggaagcagtcggccagcagccatgcggcggggtttgcaaggcagatggcggtgtagccgatccagcgcacgacggcaaagccgacaaagcagcgggcgatcgtctcaaacacccctgcaaacacggcctgctgcgtgaagccgacgccctgaatgaggaatcggagcacgttgacaagcgtcagcaggaaatagcagctggcgttccacaccagaaactgctgcgccagcagaccgatctggtcccggacggcggcgctctccgcagagtcgaggaacagcagcgacagcttgccgccgaagagggcaagaacgccgaggccgagggcggaataggcgaacatcagcagcacgcaggcgcgcacgccgcggtgaatgcggtcgagcttcattgcgccatagttctgcccgccgtagacggccatggtcgtgcctgcggcgtcgaacgggcaggtgaagagctggctgaccttgtttgctgcggtgacggctgcgatggagaccgcgccgaggccattcacggccgtctgcacgacgatggtgccgatggcggtgacggaatactgcaggcccatcggcacgccgatggcaaacagccgcgtgatatgtgtgcggctcggccgcagctcaccggggcgaaaacgcagaacgggatagcgctttcccatgatggccagacacagcaggccggagatggcctgcgagatcacggtcgcccatgccgggccctccacgcccatgccgagcacggcgacggccagcaggtcgagcgcaacgttcagcagggaggagagaacgagaaaatagatcggggtccgggagtctccgagcgagcggatgacgccggagacgagattataaaggatgatggcggggataccgaggaaaatgacgaagatgtagtcgtaggcataccggaaaatattgtccggcgtgttcatccagcgcagcacgggcgtgcacagcagtgccgtggccacggtgagcaccacggcgaacgcagccgagagccagatgctgtttgccacaaagcggcgcagctccgcctcgtcgccctcgccgaatttctgcgccacggggatgacgaagccgttgcagatgccgatgcagaagccgagcaccagaaaattgacggagctcgtcgagccgacgcccgcaagcgcgtccatgccgagaaaacggccgacgacgagtgtgtctaccatattatatagttgttggaacagcaggccgccaagcagcggcagcagaaagccgatgaccagccgcgtgggggagccggtcgtcaggttccgggatgcggtttttgccataagagtccctccggagtccatagaaatctcaatttcaaaaaacgtctgcattgtattctctgaccgaaaaaaatacaatccgcaaccttctgattttttcgcgcaattcggggtcggaatccgtcagaatgtacaaaaacaggatttttccctgaaaaatggacgaatgggcggaaaaatcgggcaaaaaaagcccggctttcgggaagccggacgaaaaaatcaggggatattccaaagaaatgcattgacgcggaagaaaaaatgtggtaaaatcaatacccaatgctgtgaagtgcggcgcaggccaacctccacctcatggtcagattataccacagaccgcgccgcacggcaagggactaaaatgaaaaaacagcaactgacccacgcgtgtcattgctgagacagcgcacgaaacgacgacagaaaggcgtgatcaagcaaatgcaagtcaaggacgtgaactatggcaagaccgttcgcaagagctatgccaagtatcaggagatcctgcagatgcccaacctgctgaagatccagaaggactcctacgactggttcctgcgggagggcctgcatgaggtcttccgcgatgtggccgccatcagcgactacaccggcaacctcgagctgtccttcctggactactccctcgatgagaagcccaagtacaccattgaagagtgcaaggaacgcgatgccacctatgcgaagccgatcaaggtccgcgtgcgcctgctcaacaagcagtccggcgagatcaaggatcaggagatcttcatgggcgattttccgctcatgaccaacggcggcacgttcgtcatcaacggtgcagagcgcgtcatcgtctcccagatcgtccgcagccccggcatgtacttcggcgataccgtggataaggccgaccagcacatctataccgcaacggtcatcccgtaccgcggcgcatggctggaatatgagaccgacctgcaggacgtgttctacgtccgtatcgataagaaccgcaagctccccatcacctgcctcatccgtgctctcggcgtggagaccgacgcgcagattttggagctgttcggcgaggatccccgcatcgtcgccacgctggagcgcgacccgtgcaagacccgcgaggacagcctcctcgagatctaccgccgtctgcgcccgggcgagccgcccacggtcgacaacgccgcggcctatctcgacgcgctgttcttcgatccgcgccgctacgacgtctcccgtgtcggccgctacaagttcaataagaagatggacatctggacccgcctgagcggtcaggagctggccgagccggtcgctgacccgctgacgggcgagatccttgccatgccgggcactgtcctgacccgtgcacaggcgcaggccctgtcggcccgcggcgtgtgcgacgccgtcatccgcgtcggcgacaaggaccacaaggtcttctcgaactacatggtcgacatgaagaacttcgtggacttcgatccggagcagtacggcatccacgagaaggtctgccgcaaggtcctgttcgagatgctcgagcagctcaagggtgcggctcccgaggcctgggaggatgccattgaggagcgccgcgatgagctcattccgaagcacatcacgcgcgacgatatcctcgccaccatcaactatctcaactgcgtcgtcatcggcgcgggcacgacggacgacatcgaccacctcggcaaccgccgtctgcgctgcgtgggcgagctgctgcagaatcagttccgcgtcggcttcacccgcctcgagcgcgtcatccgcgagcgcatgaccgtgcaggatctcgataccgttacgccgcagagcctcatcaacatccgcccggtcacggcggtcatcaaggaattcttcggctcctcgccgctgtcccagttcatggatcagaataacccgctggcagagctgacgcacaagcgccgcctgtctgccctcggccccggcggcctgagccgtgagcgcgcttccttcgatgtccgagacgtccactacagccactacggccgtatgtgcccgatcgagacgccggaaggtccgaacatcggcctgatcaactatctggcgagttacgcccagatcaatgaatacggcttcgtcgaagcgccgtaccgcaaggtcgagcgcatctatgacgaaaacggcaaatatgtcggctcccgcgtgacggatgaggtggaatacatgtccgccgacgtcgaggacgactaccatatcgcgcaggcaaaggagccggtcgacgagaacggcatgctcctcaatgagcgcatcacctgccgccaccgcgacgagatcatcgccgtcgatcgcgaggtcatcgactatatcgacgtctcgccgaagatgatgacctccatcgcaacggccttcatccccttcctgcagaacgacgacgcgaaccgtgcccttatgggcgcgaacatgcagcgtcaggccgtgccgctgatggtcacggaggccccgatcgtcgccaccggcgtcgagcagaagtgcgccgtggactctgaggtctgcatcaaggccgagggcgacggcgtcgttacccgcgtctccgccgacggcgtgagcgtccgctatgacgacggcagcgtccgcgactacaccctgacgaagttcgcccgctccaaccaaggcacctgcgtcaaccagcgcccgatcgtcacggtcggcgagcgcgtgacgacggagcaggtcctggccgacggccccgcctgctcgcagggcgaaatcgcactgggcaagaacgtgcttgtcggcttcgtcacctgggaaggctataactacgaggacgccatcctgctcaatgagcgcctggtgcgcgaggacgtctttacgtccattcatattgaagaatacgagaccgagtcccgcgacacgaagctcgggccggaagagatcacccgcgatatcccgaacgtcggcgaggacaccctcaaggacctcgacgagaacggcgtcatccgcatcggtgcagaggtcaagtccggcgattatctcgtcggcaaggtcaccccgaagggcgagaccgagctgacggctgaggagcgcctgctgcgcgccattttcggcgaaaaggcccgcgaggtccgcgatacctccctgaaggtcccgcacggcgagtccggcatcatcgtggacgtcaaggtcttcacccgccagaacggcgacgagatggcccccggcgtcaataagatcgtccgcgtctatatcgcacagaagcgtaaaatttccgtcggcgataagatggccggccgccacggcaacaagggcgtcgtttcccgcatcctcccggaggaggatatgccgttcctgccggacggcacgccgctggatatcgctctgaatccgctgggcgttccgtcccgtatgaacatcggacaggtcctggaggtccaccttggctacgccgcccacgccctcggctggaaggtcgcaacgccgatcttcgacggcgcgaacgagaaggacatccgcgagactctgaagctggccggcctccgcgaggacggcaagacggtcctgtacgacggccgcaccggcgagccgttcgataaccttgtcacggtcggctatccgtattacctcaagctccatcatctggtcgatgataagatccatgcccgctccaccggcccgtacagcatggtcacgcagcagccgcttggcggcaaggcgcagttcggcggccagcgcttcggcgaaatggaagtctgggccctcgaggcctacggtgcagcccacacgctgcaggagatcctgaccgtgaagtccgacgacgtgaccggccgtgtcaagacgtacgaagccatcgtcaagggccacaacgtgccgaagcccggcgttccggagtccttcaaggtccttgtcaaggagctgcaggccctgtgcctcgacgttcgcgtgctcgacgatcagggtgaggagatcgagctgcgggaggatgacgatgatgatgagatcgtctacaccgactccggccgcgagaatctggtcaccgatgagaacgaggtgctctcctccggctacggcatcgatgccgacagcgaggcgaagcagggcctcgacgctctggaaaagatcatcggcatcgacgatgacgaggaagaggaagaccccgagccggagtgcccgtatgacatctccgatgcgcccgaggacgaagaataaggaggaggcagacgatgagcaataaaaccttcagcgcgatcaaaatcggcattgcttctccggaaatgatccgcgactggtcttacggcgaggtcaaaaagccggagaccatcaactaccgcaccctgaagcccgagcgcgacggcctgtactgcgagcgcatcttcggaccgacgaaggactgggagtgccactgcggcaagtataagaagatccgcttcaagggcaagatctgcgatcgctgcggcgtcgaggtcacccggagcaaggtgcgccgcgagcgcatgggccacatcgagctggccgcgccgtgcagccacatctggtatttcaagggcatcccctcccgcatgggcctgctgctggacatcagcccgcgcattctggagaaggtcctgtattttgccaactatatcgtcacggatcccggcgacacgcccctgagcaagtgccagatcctgacggaaaaagaataccgcgacatgcgcgaaaagtatgagaacgatttcgaggccggtatgggcgccgagtccgtgcagaagctgctggccgagatcgatctcgaggccctgtgcagccagctccgcagcgagctcgtcaacgccagcggccagaagaagctgcgcatcatcaagcggctcgaggtcgccgaggccttccgcgcttccggcaacaagcccgagtggatgatcatgaatgtcctgccggtcatcccgccggacatccgcccgatggtccagctcgacggcggtcgtttcgcaacgtccgacctcaatgacctctaccgccgcgttatcaaccgcaacaaccgcctcaagcgcctcatccagctcaatgcgccggatatcattatccgcaacgaaaagcgcatgctgcaggaggccgtggacgccctcatcgacaacggccgccgcggccgcgctgtcaccggtgcgaacaaccgtgcgctgaagtccctgtccgacatgctcaagggcaagcagggccgcttccgccagaacctgctgggcaagcgcgtcgactattccggccgttctgttatcgtcgtcggcccggagctgaagctctatcagtgcggcgtgccgaaggaaatggccattgagctgttccgcccgtttgtcatgaagaagctcgtcgaggacggtgttgccaacaacatcaagagcgccaagaagaagatcgacaagggcgagcccgaggtctgggatgccctcgaggacatcatcaaggaccgccccgtcatgctcaaccgtgcgccgacgctgcaccgcctcggcattcaggcctttgagccggtgctggtcgagggccgcgccctgaagctgcacccgctgtgctgcaccgccttcaacgccgacttcgacggcgaccagatggcaatccacgtcccgctgtcggcagaggcccaggctgaggcccgtgtgctgatgctctccgcaaacaacctgctgcgtccgcaggacggcaaacctgtcaccgtgccgacgcaggatatgatcctcggtacctactacctgacctatgtccgtcttggcaaggaggagaagggtgcggagcaggtctttgtgaccgatgcgggtgacttcgaccttcccgtgaaccagctcgtcgacggcgaccttgtggaagccgcggtcgagaaggccgagaatgagaagaagcgcgccccgtcctatctgccgctgcatgcctattccagcgtcgatgaggccatcacggcctatgccgatggctgcatcggcctgcatgcgcccatccgcgtgcgctacggcaaggagatcgacggcgtgatgcagtaccgcatcatcacggcgacggtcggccgcctgatcttcaacgagccgatcccgcaggacctcggcttcgtggaccgcagcgatcccgcgcatctgttcgaccttgaggtcagcttcctcgttggcaagaagaaactcggcgtcatcatcgacaagtgcatccgccgtcacggcttcaccatcgccaccgagatgctcgatcgcgtcaaagccctcggctacaagtactccacgaagggcgccatcaccgtctccatcgccgatatggccattccggagaagaagtacgcactcatcgaagaggccgagaagcagacggtcaagatcgaccgccagtacaagcgcggcttcctcacgaacgacgagcgctatcgcctcgttgtccaccagtgggagcagacgatcaaggacgtcaccggcgctctgcaggagaaccttgaccgcttcaacccgatctatatgatggccgactccggcgcccgcggcagcatgaaccagatccgtcagctcgccggtatgcgcggcttgatggcagatacgaacggccgcacgatcgagattccgattaaggcaaacttccgtgaaggcctttccgctctggaatacttcatctcctcccgaggcgcccgtaagggcctgaccgacactgcgctgcgtaccgccgactccggctacctgacgcgccgtctggtcgacgtctcgcaggaggtcatcatccgcatccccgactgcggcacgacgcatggcatccacctggccgaggtcgtggaaaagggccaggtcatcgagtccttcggctcccgcatccatggccgcttcccggtgcatgatatcgtcgatccggagacgggcgaggtgctcatcccgaacaaccgcatgatgcatgaggacgatgccaagatgctcgaggcacacggcattcactctgtctatgcccgtaccgtgctcggctgccgcgcccgcagcggcgtctgcgccaagtgctacggcatgaaccttgcaacgtccgagcttgtgaacctcggcgaggcggtcggcatcatcgccgcccagtccatcggcgagccgggcacgcagctgaccatgcgtaccttccacaccggcggcgttgccggcgacgatatcacgcagggccttccgcgagtcgaagagctcttcgaggccagaaagccgaagaagatggcggccattgccgagatcgacggcgtcgtcgagatcgacgagagccaccgcagcgcgctgcgcgacatcacgatcaccgcggacgacggcgaggtcaagctctatcaggtcccgtattccgtcggcctgaaggtcgagcagggaaagcgtgtgcgcaagggcgagcccatcaccgacggcgcgctcaacccgcatgatgtgctgcgcatttccggtgtcgaggccgtgcaggaatatctgacgcagggcgttctggccgtgtaccgccagcagggtgttgacattaacgacaagcacatcgaggtcatcatccgccagatgatgcgcaaggtgcgcgtcgaggatcccggcgataccacgctcctgagcggcaccgtcgtggatgtctacgagttcgaggacgccaatgccgttgtgcaggcacgcatcgacgccggtgagacggacctccgtctggccacggattccctcatcctcatgggtatcacgaaggcttcccttgccacggagtccttcctctccgctgcctccttccaggagacgacgaaggtcctgaccgaagccgccatcaagggcaaggtagaccatctggtcggcctgaaggagaacgtcatcatcggcaagctcatccctgccggttccggcctcgatatctaccgcgatttcgagccgaccaactggccggagtcctctgtgacccagagcatgatcgataacgagcagaagtaaataaaattcccgcgccattgtggcttcggcctccgccggaccgcgtggtgcagctgaaaagccaatcagcccgtgcagtggatcgctgcacgggctttttgcac

SEQ ID NO: 11141 - DNA, 1557 bp, Unknown
  gut microbiota DNA sequence
cccttgaccgtccggctctgcaagagctgacggaggccgtccttgccggaaaggtggatgtagtgctggtaaacagccttgaccgtttggggcgggactggggcatgacagagcagtacatcgacctgctgaccgagcataaggtcaagctgctgtgcctgcgggaacgggtgagcagcgacatctctggcgtttcaccattctctacataaaaaagcagagtgtccattacaggatactcagatcctataaggacactctgcatggtcggagtgtcgggattcgaacccgaggcctcttggtcccgaaccaagcgcgataccaaacttcgccacaccccgaaagcatgaatattatacgcacattttccccatttgtcaagacccaaagtataatttccgggaaacttcatataattttctgggaagggggcgtggccatgctgcggcgtatgcgaagaaacgttcggatctgcctgcttctggtctgcgccgcgctggcgctcaagctgttcctgccggaagctgggcagcgcatcggggcatggatctccggcgagccgggcaatgagatcagccgcgccgtttccggcctgctcggcacgctgtcgggcggcggcagcctcggagaggccgtggaggtgttctgtgaaaaccttgaagcttccgctccggattgagccggggctcgtcgcgctgctgtgcgcgtggttctatttcgaccccgccgggaccttcctccccttcgtctgcgcggccgcgctgcatgaggccgggcatctggccatgctgctctggctgcggcagccggtacatagtctctgcctcggcctgcagggcgcggtgctgcggacggggccgctgcgctaccgggacgagctgctcgccgccgcggccgggccggcgatgaatctggccctgctgctggccttctcgcgcacgctgccgcgctttgcgctggtcaatttctgcctgctggcctataacctgctccccttctacccgctcgacggcggacggctgctgcgcgccgtgctgcggacgctgctgccgctgcgtgcagcggtctgggccgagcgcggcgtctgcctcctctgcggcgcgctcctgctggcatgcgccggatatctgacgctctgctggcacgccgggccttggcctctgctggtgtgcctgctgcttgggctgcgctgctgccggaacgaggaaatttgacagatttatcttgacaaatagcgcacggcatggtagaataatcgagcttaatgattcggagagatgtccgagcggtttaaggagctggtcttgaaaaccagtgacgcagcaatgcgccgtgggttcgaatcccactctctccgccaaattcttctctctgcattcgacctggagtgatacccaagaggccgaaggggctcccctgctaagggagtaggcgtgtaaaaagcgcgcgagagttcaaatctctctcactccgccaagaaaaaagcacttgctgctgcaagtgcttttttcaatggaattcagcatttcagtgtgttaaatagcactttatgttatg

SEQ ID NO: 11142 - DNA, 63799 bp, Unknown
  gut microbiota DNA sequence
cgcgccagcgtttctttcacattttgcgtcagcaaagtatttcacctctccttaccgatcctgccaaatcgcccggtaggattttttcattttatccattcttcaatatagggaggcgcgatccatggagatctggcagcttgacccggcggtctatgccgggcggaaattcacggcccgctaccggacaaaaggctattatgacatctgcgccgcagaggacggcttccggctccgctacgtcccgctcggagcgccgatggtgaagtcctttgacgacgaattcttcggtgaatggctcgaggagccggtggcattcggcgccttcgagggcgaacggctgctcggctatgtggaaggtgcgccggaaggctggaacaaccggtaccgcatcagcaacatctgcatttttgaggagaacgcacgcggcaagggactcggcacgctcctgatgcaggccatccagagagcagcagaggccgcaggcgcacggatgatcgttctggagacgcagacctgcaacgaaaacgcgatcgcgttttacaagcggaacggcttctcgatcatcgggttcgacctgtattcctactccaacgacgacccggagcgccatgaggtccgcattgaaatgggaaagaagctgaaataggagccgaaagatgaacgaagcggaaattcttgactatctgaccacgcagggcatcgactatgaatatcagcgtcatcccgccgtgctgaccatggacgaagccgaacggcttgccctcccccacccggaatgcgaggcacggaatctgtttgtgcgcgagagccggacgcaccggtatttcctgctgacggcgcatgcgcgcgtggacctgaaagcattctcgcgccagcaggggctgcgctccctgtcctttgcctcggcggacgagctgcgcgagatcctgtggctggagacgggagccgtcacgccgctggccctgctgaacgcgcccgatgtcacgctctatctggacgaggctctgctgggcagccgcatcgcggtccacccgaacaccaacaccgccacggtgtggctgcagacggccgatcttgtcagcctgcttcgcacacaatgcgtgcctgtggtggccgtccccttcccctgtctggcctgatacatcccctatacttagggaacctctgaataaatcggctgcggcgcccagcgggtctttcgccccaacttatcggtttgaaaatcttgaaatacacaaagtattcctgcaatttccaaacctcaatttggaacaaaatccctcgctgaccgctcttgcaatttaatcagaggttccttaggaaacgccggagcgcagcaagctgcgccccggcgttttttgcgtattgttgacttagaaaatgccctgctccatcatggcattggcgaccttctggaagcccgcgatgttcgcaccggcgaccaggttgtagcccaggccatactcctcagcggcctcagcggagaccttgtggatgttgaccatcatcttatggagctgtgcatcgacctcttccgccgtccagacgagacgctcggagttctggctcatttccagagcagagacgccgacgccgcctgcgttgacagccttggacggagcaacgaccatgttcttctggctcatcagatagtacagggcgtcgttcgtcgtgggcatgttggcgacttcgatgtaatacttcacgccgttggcgacgatcttctgggcagactccatgttgacgtcgttctgcatggcagacggcatgatcacatcggccttgacgccccacggcttctcgccggggaagaacgggacaccgaacttgtcggcatagtcctgcacgcggttgcggccggaggcgcgcatctcgagcaggtagttgaccttctcctcgctggaggagacgccttcttcatcatagatgtagccgtcaggaccggacagagtaacgaccttcgcgcccagatgcagggccttcttgcagatgccccacgtcacgttgccgaagccggcgcaggcgatggtcttgccctggatctcttcgccctcgtgcttgaggacttcctgcagataatacatggcgccgtagccggtggcctccggacgggtcaggctgccgccgtagctgaagcccttgccggtgaggacaccgttctcgaacgtgcccttcaggcggcgatactggccgaacaggtagccgatctcgcggccgccaacgcccatatcaccggcgggaacgtcgatgtccggcccgatgtagcggtacagagccgtcatatagctctggcagaagcgcatgatctccgcgtcggacttgccggccgggtcaaagtcagagccgcccttgccgccgccgatgggcaggccggtcagggagttcttgaagatctgctcaaagccgaggaacttgatgatgccgggataaacgttcttctggaagcgcaggccgcccttgtacggaccgatcgcgccgttgaactggcagcgatagccgatgttggtgtgatatgcgccattgtcgtccatccagaccacgcggaaggtaaacatacgctccggctcgacaatgcggcccagcagatcagccttctcatactcgggatgcttatcgatcacaggggaaagcgaggagagcacttcctcaacggtctgaacaaattcgggctcattgccgtgcttctggcgaacggattcgatgacgcgctcaacataggcattcatgtgcattcatactcccttaattattgaaatttaacgggcttcctgcccgggggtcacagattatcgatgatggagacgatctccatgccgatgcgcttctgcgcttccttcgtggcagcgccgatgtgcggcgtgcaggagacgttcggatggttcagcagagcctcgttcttcgcaggctcctccgcatagacatccaggcccgcgccgcggatcttaccggaattcaggccttccagcagagcttcctcgtcgacattgttgccgcgggacgtgttgacaaagataacgccgtccttcatcttggcgatgttctcgcgattgatgagaggcttgccgtcgatggcgggcgtgtgcagcgagatgaagtcggactgcgccagcagttcgtccatcgtgacatagtgcatggtctcgcactcgataccctccacatggaagatatcataggcaacgacattcatgccgaggccctgcgccatgcggcccagcgcctgaccgatgcggccgtagccgatgacgccgagagtcttgccgcccagctcgacgcccttgccataggccttcttctcccacttgccctcgcgcatggtgtgaccggcgatggacacaaagcgtgcacaggagagcatatgggccagcgccagctccgcaacggagttggaggaggcacgcggggtattcttcacggcgatgccgtttgcctcggcataggccacgtcgatgttgtcgacgccgacgccgccgcggatgatgagcttcaggcgggagcccttcgcagcatcgatgtgattggcgcgcaccttggtggcagagcggacgaccacgacgtcaaagtcgcggatggcctcgcccagctcctcgggcgcgtagaactgctcgaccacttcgtggcccttcgcgcgcagggtctccagcgcggtcttatccattccatcagtaacgagaatacgcatggcaggttctcctttcaaagcggccgatcagtgctcggcttcaaatttcttcaggcactccacgagggcttccacgccttccttcggcatggcattgtaggtggaagcgcgcaggcctccgaccgacttgtggcccttgaggttctcaaatccggctgccttggtataggcgacgacttcggcatcgaggtccttatcaccggtgacgaacgggatgttcatcaggctgcggaactccggatcaacggcgccgcggaacatcttggaggaatcgaggaagtcatacatgaccttcgccttctcctcattgatgcgctgcatggcagtcagcccgccgaggctcttgaggtacttgaagaccttgccgcagacatagatggcccagcagttcggcgtgttatacatggagcccgcatccgcatgggtcttgtacatcatgtagatcggcgtcttgggatcgaggtcctcgcggatcagatcctcgcggatgatggcgatgaccataccggcggggccgacgttcttctggacaccggcatagatcatgccgtagtccgaaacattgcacggcttggacaggaacatagaggactggtcagagaccaggggcttgcccttcgtgtccggcagcttctgccacgtcgtgccgtggatagtctcgttctcgcagatatagacataatccgtatcctcttcgaccggcagatcggagcagtcgggaatgtaagcatagttgcgatccttggaggaagcggcgacattgacctcgccgtatttcttcgcctcggcaatggccttcttggaccatgcgccggtttcgatatagatcgccttgccattcttcatcagattcatcgggatcatggcaaactgcagcgttgcgccgccctgaatgaagagaaccttatagttatcggggatccccatcagatcacgcagatcctgctcagcctcgtcgatgatggtctggaaaaccttcgaacggtgcgacatctccataacgcccataccggcgccgcggtagttcagcagctcgtcgcggatctcttccaacaccggaacaggcatggtcgcgggaccggcggagaaattataagtacggttgtacatcgtagtacctcctgtcattgctcgggcgtgcccggctgtcctaagtatacgccatgcaatgaaaataatcaaccataattatcaaaaatttatgttcggaataccaatttttttcaggttttcaccaaaatcagcagtttatacaatgtgtcttgtgaaaaactgtgcacaacgacgtagcgttaatcgccgaaacgcggacatagaaaaaccgctgcaggatgtcttgcattctgcagcggtagaccggtattctcttacaccagctcgatgatggccatctcggcagcgtcgccgcggcgaacaccgatgcgggtcactctcgtgtagccgccattgcggtcggcatacttcggagcgagttccttgaagaccttgtgcgcgacatcttccttcgtgatgaaggccagagcctgacggtaggcggcgaggtcgcccttcttaccaagggtgatcatcttctccgcgaccggctggacttccttcgcacggcagaaggtcgtctcgagcttgccgttctccagcagatcggtcgtcagctggcggagcatcgccttgcgctgatcgctcgttctgccgagcttacgggttccaaacattcgtatttcctccttttaaaaggtaaagacagcggatcggtcgggccgattccttagctatttgtggtaggcgtttcctccgtcgcgagcgacaggcccatcatggccagcttgttctgcacctcgtcgagcgacttcttgcccatgttgcggaccttcatcatctcttccggcgttctggagatcagatcgcggacggtgttgatgttggcacgcttcaggcagttgaagctgcggacggacagatcaagctcttcgatggtgagcttcagagcggtcggctcggtggaaacatccttttcacgaacgatcgactggctggcgaccgtctcggagagatcggtaaacagggccagatgctccgtcaggatcttggcggcgatggacacggcgtccttagccgtcgtggtggaatccgtccagacctccagcgtcagcttgtcgaaatcggtcatgttgccgacacgcgtattctcgaccgtataattgaccttatacaccggggaatacagcgagtcgaccgggatcacaccaatgggcgtctgcggcgtcttgttccggtcagccggaacatagccgcggccgcggctcatggtgatctccatgttcagcatggcatcgggtccgagcgagcagatgtgcagatccttattcaggatctccacatcgtcgtcggtcttgatgtcgccggccgtgacttcgcactcgccggaggcatcaatataaaccgtcttcacgccgtcacagttcatcttaaagatgatgcgcttgatgttcaggacgatctcagtgacatcctccttcacaccggggatagtggaaaactcatgctggacgcccgcgatcttgatggaggtcgcagcggtaccaggcagagaggaaagcagaatccttctcagtgagttgcccagagtcgtaccgtagccccgctcgagcggttccacgataaaaatgccatgggcgggatcttccggagagtcgatgcactcaatacgcggcttgtcaatttctaccatataacagataccctccttatgaatctgcaaaacacaggttttgcggcgtaatccagcttaccaataaacgagggtgcagcgttacttggagtacagctcgacgatgagatgctcggcgatttcgaagtcgatatcatctctggccggaagcgcaaggaccttgccggacagcgtgttcttgtcgcggtcaagccacttcggggcggcgacgaaagcgtcgtcttccttcagcttcttgaagcggttgttggagcagctcttctcgctgacagcgatgacgtcgcccgtcttcacgaggtaggacgggatgttgacgcgcttgccgttgacggtgtagtggccatggttcacgagctgacgggcctcgcggcgggtcgcggcaaagccaaggcgatagatcacgttgtcgagacggcgctcgataaggctcagaaggacctcaccggtgttgccctcagcgcgggcagccttctcataatacatccggaactgcttctccaggatgccgtaaacaaacttgaccttctgcttctcggtgagctgcagagcatattcggacttcttagctcttctctgaccgccgggattcttattggaagtcttggaataacccatgacggcaggagaaacgccaagcgttctgcaacgcttcagaacgggctgagtatttttcgccattctatgatttcctccttaacgaattagacgcgacgtctcttgggcggacggcagccattgtggggaatgggggtgacgtccttgatcatgacaacttccagacccgcggactgcagtgcgcggatggcagcctcacgaccttggcccgggcccttgacgtagacctcgacggtcttcaggccatgctccatggctgccttggcggcagtctcggcgcacatctgtgcggcatagggcgtggacttacgggagccacggaagccgagtccgccggaggaggcccaggaaagggcgttgccctgcagatcggtgatggtcaccatggtgttgttgaaggaggaacgaatatgaacggcgcccttctcaacatttttgcgctcgcggcggcgcttgacaactttctttgcagtagccttagccattattcagttccctccttacttcttcttattcgcaatggtcttcttcgggcccttgcgggtgcgcgcgttggtcttggtgcgctgacctctgaccggcaggcctcttctgtggcgcatgccgcggtagcagccaatttccgtcaggcgcttgatgttcagagcaacttcacggcggaggtcgccctcgatggtgtagttcttatcgatgacatcacgcagcgcagcctcctgatcctcggtgagatccttcacacgggtgtcagggttcacattggccagcttcagaatgtcgttcgcgctttttctgccaataccgaaaatataagtcagagcgatctcgactctcttttcgcggggcaggtcaataccagcaatacgtgccatatactctcgagcacctcctattaaccttgtctctgcttatgcttgggattttcgcaaattaccatgacgcgacccttgcgcttgataatcttacatttttcgcacatgggcttcacggacggtctaaccttcatactgtttaacctccatatgagaacaatgtctcttgtttacttgcttctccaggtgatccgaccctgagtcagatcatacggagacatctgaacagttaccttgtcaccgggcaagatcttgatatagttcattctgagcttgccggaaatgtgtgccagaatcgtatgcccgccgccaatattgactttgaacattgcattcggcagtgcatcagtcacgatgccctcaagttcgattacgtcgtcttttgccaagtttctgaaccctccttggttgaaacgttgaattcccggccgagtacggccagttcccttcgtaattcgctgttgagcagtttgtcgcctgcgatgagcttcgctgcgacggtcgaatctggccgaaggactttgcggacatgtttggccttcttccgcttggggttttccagctttctctccttcccgttgaccagggaaacgtacacaccgtctgtgtcaaccacaaagaacagcattccctgatcacgaccggcaagggagagcaccacatccgatttggatagttccatgcttagagtccctcggcgacggtgagaatttccggctcgccgtcggtaatgagcacagtattttcgtagtgggccgacaggcttccgtcagcggtgacggtcgtccagccgtccttcagcacccgcacttcgaaggtaccggcgttgatcatcggctcgatggcgatcaccataccgcggatcagtctggggcctctgccgggcttgccgtagttcgggacctcaggctcctcgtgcagatgctcaccgacaccgtggccgacgaagtcacggacgactccgcagccgaacgattcggcataggtctgcacggcatgcccgatatccgagatccggcatccctggcgcgcgaatttcacgccctcgaaaaagctctgcttcgtgacatcaataagcctctgcgcttcgggagagatcttcccgcaggcataggttgcggcgcagtccccatggaatccctgccatttggctccgacatcgacggagacaatgtcaccctcctgcagcacgcggccgtccggaatgccgtgaatgacggtattgttcacggaaatacagacgctcgcggggtagccggagtagtgcaagaaggacggtgttgcaccttgtgacacgatgaaatcgtggacagctttgtcgatcgcctttgtggtcacgccgggtcttaccatttcccctgccagagcacgggctgccgcggtaattttacaggccctgcgcatcactgcgatctcacgttcattttttatagggatcattttgatacacccaatgccgccagaatatcacgagtagcatcctcgatgggctgatttccctcgataagccggagcttgccgagcttttcatagaagcccttgagcgcctcggtctccttgtggtagacagccagtcggctgcgcaccgtttccggcacgtcatccggccgcgtgaccagctcggagccgcacgcattacagatgccctcaattttgggcggattcgccgtgacatggtagctggagccgcagctgccgcagacgcggcggccggtcatccgctgctcgatcacagcgtcgtcaatttcaatggagatcacacagtcgatctcaatgccggcattcacaagggcctcggcctgcgggatcgtgcggggcataccgtcgaggatatacccgtttgcacaatccggctcggccaggcggtcccggacgatgccgatgatgacctcgtccggaaccagattgccctggtccatgaatgccttcgctttgagaccggtctccgtgcgattccggattgcttctcggaggatgttcccggtggaaatggtcgggatcccgagccgcttggacaggatctctgcctgcgtgcccttccccgcgccgggagctcccagcaggatcagtctcatgtccagcctcctgttatttctcgaggaagccggagtagttgcgcatcagcatctgcgcctcgatggctgcgacggtctccagagcaacactgaccacgatgatgatggacgtgccgccaaaggagaatctcgtgttgctcatgatcgtgccgagaaggaccggcaggaccgcgatgatgccgagatagatcgcgccgaagagggtaaccttgttgatgaccttgcggatgaagtcagcggtcggacggcccggacggaagccgggaatgaagccgccgttcttcttcaggttgttggccacctcaacagggttgtactgaatggtcgcatagaagtagctgaagcccacgatcaggatcagatagatgaccgtatagatcacactggtgctcgtgaacatatgcttgtaagcccagttgctcgtccagccgccgaatgcgcagatcgtggcgggcaggctcgcgatggactgtgcgaagatgataggcataacgccggacatgttgaccttgatgggcaggtgcgtgttctggccaccatagaccttacggccgacaacgcgcttggcgtactggaccgggatgcggcgctcagcctgggaaacgaaaacgatgaagacgatgatcgcgagcatggcgacgatcagcagcagagcccagtaccagaagccgccgaagttggacttcaggttgttgaagatcggcaggatgatgccggacgggatgcgggcgatgatgttggcgaacaggatcatagagatgccgttgccgatgccgtgctcggagatctgatcacccagccacatgaccagcgtggagccggccgtgaaggtcaggatgatgacgagagcagtcaggaagccggtgctcgtaaggagcatgttgctgtactggctgttgtagttgctgagcatgatataataggcaaagcccatcaggacgcccaggccgaccgtggtataacgcgtgatcttcgtgatcatcttcttgccctcttcgccgccctctttgctcaggcgctcgagagcgggaatggcgatggtaagaagctgaatgatgatggatgcgttgatatacggctggatcgacagtgcgaagatggtggcctgcgagaaggcagagccggacatcatatcgaacaggccgaagatggtgttgctcagctgctggctgaacatcagggacatctgctgcacgttgacaccgggaacgggaatgacgttgccgatgcggtacagaaggatgatcacgagcgtgaagaggagctttctgcgcagctcagggatcttccaggcattgcggatggtagtaagcacttacaccacctcagcctttccacctgcctcttcgattttcgttttggcagatccggaaaacgctgctgctttcacagtgagcttcttagtgagattgccattggagaggaccttcaggccgtacttgcagtcacggatgatgcccttctccgtcagggcagcggcgtcgaccactgcaccgtcctcaaagacgttgagctggccgaggttcacggccgtcagcggctttgcaaagatgttattgaaaccacgcttcgggatgcgtcttgccagaggcatctggccgccttcgaagccgacacggatcttaccgccggaacgggccttctgacccttgtgaccgcgaccagccgtcttgccgttgccggtgccggtgccgcgacccttgcgcttgccaacctgggtagaacccgcgatgggagcaagttcatgtaactccattcttgtctcctccttattctacttcggtgacctcgagaagatagccgatcttggcgatcttgccgcgggtctgttcgttatcgggctggatggtctcctggccgatcttgcgcaggccgagggactcagccgtcgcaatgtgcttctggatacgaccgctgatgctcttgaccagcttgatctttaactgtgccatgtccgtatcctccttaaccaacgatttcttcgacgctcttgccgcggatgcgagcgacctcttccggtccacgcaggctcagcaggccctgcatcgttgccttgacaacgttctgcgggttgttggagcgcaggcacttggcgcgaatgttgctgataccggcagcttccataacagcacggacagcgccgccggccagaacgccggtaccgacaggagccggcttcagcaggaccttaccggcgccaaagatgccgatgacttcgtgggggatcgtggtctccgcgagaacgaccttctgcaggttcttcttcgcgttggcaatgcccttcaggatcgcctcggaaacctcggccgccttgcccaggccatagcccacggtgcccttgccgtcgccgacgacgacgagagcggagaacttcataacgcggccgcccttgaccgtcttggaaacacggttcaggtagacgacgcgctcaatcatctcgggagcattgtccttttcggacgctctgttataagccatttctcgttcctcctcttagaatttgaggccgccctcgcgcgcgccttcggcgagtgccgctacacgaccgtggtagacatagccgccgcggtcaaaaacgacttcctcgatctccttggccttcgcacgctcggcgaggagcaggccgaccttcttggcagcttcgcagttgccggtcgcaccctcaaactccttctccacggtagaagcggaaaccagagtggctccattgacatcatcaatgatctgcgcatagatgttggcgttgcttctgaaaacattcaggcggggtctgcacggtgtgccggagatcttgccgcgaacgcgaacatggcgcttcaggcgcatggccttcttatcggtcttcttaatcatttacgcacacctcctgttatttcttaccgccggtcttgccttccttatggcgaagaacctcggtcgtatacttgatgcccttgcccttgtaaggctcaggcggtctcttgccgcggacctcagcagcgaactggccgaccttctgcttgtcgatgccgctgatgacgatcttgttctgggcaggaacgtcgatggtgatgccgtcgatctcatcgacaacaacaggatgggagtagccaaggttcatgatgagctgcttgccctgcttctgtgcacggtagccgacaccattgacctcaagctccttcgtgtaacccttctcgacgccgacgatcatgttgtgcagcagcgtgcgggtcaggccatgcaggctcttgtgctcgtgctcctcatccgggcgggagacggtcagaacagcgccctcctgcttgatgatcatatcatgatggaatttgctggtcagagtacccttcgggcccttgacggtgacgagattgccgtccgcgatggtcacttcaacgcctgccggtacagtgataggcattttgccgattctggacataatgttacctccttaccagacgaacgcaaggacttcgccgccgatatgtgctgcgcgagcagccttatcggtcatgacgcccttggaagtggaaatgatggcgatgccaaggcccttgagaaccttcggcagctccgcagcgccggcgtagatacgcaggcccggcttggagacacggcgaagaccggaaatgaccttctccttgttgcccaggtacttcagggtgatgtggatcacgccctgcttgccgtcctcctcaacggagtatgccttgatatagccctcgtcgagcaggatcttggcaatgtccttcttgaggttggaagcggggacatccacagtttcgtgctttgcagagttcgcattccggattcgggtgagcatatctgcaacgggatcggtgatttgcatgtgattgacctcctttagaagttacgggctgaacccgttaagacgtcagagtatcagaggaatgtgagccgcaagcggctccatgttcccctgacttctgatgcctgttttccatttgaatcacgcaaagatgcgtattcgcgcacacgcgcgggaatgaaaagttaccagcttgccttcttgacgccggggatctcgcccttgtaggcgagctcgcggaagcagatacggcaaacgccgtagtcgcggaggtaggcatggggtctgccgcagatcttgcagcggttgtagcggcgggtggagaacttgtttccagcctgctgcttcaggatcattgcttttctagccattgtgttcttcctcccaattaagcgtggaacggagcgccgaccatggtcagcagttccttggcttcctcgtcggtcgtcgcggtggtgcagatgcagatgtccatgccgcggatcttgtcgaccttgtcatactcgatttcggggaagatgagctgctccttcaggcccatggcatagttgccgcggccgtcgaaagcattggggttgatgccgcggaagtcgcggacacggggcagagccacgttgaacaggcggtcaaggaattcccacatcttgtcgccgcgcagcgtgaccttcacgccgacggtctcgccctcacggaccttgaagtttgcgacggacttgcgagccttcgtcgtgatgggcttctggccggtgatggtggcgatatccttgcagatagcctcgatctccttcgcgttgttcttgctctcgccgcagccgacgttcacaatgaccttcgcgatctgggggatctgcatgacgctcttatactggaacttcttcatgagagcgggagcgatttcttcggtatacttcactttcagtctagccataatctcgtccctcctccttagatttccttgccgcacttcttgcagacgcggaccttcttgtcgccgtcgagcttgaagccgacgcgaacgcccttcttgcaggtgctgcagtagagctggaccttatccgcacgaatggggatctcacgcttgatgatgccgctggtctcgttctgcttgcgggccttgacatggcaggtagccacgttgacgccctcgacgagcagcttgttctccttgggcatggcggtgagcaccttgcccttcttgcccttggacttgccggaaaggacaatgacggtatcgttcttcttaatgttcattgactggtccccccattaaatgacttccggggccagggagaggatcttcatgtattccttgtcacgaagctctctggcgaccggcccaaaaatacgggtgccgcggggattcttgtcgtccttgatcaggacggcagcgttctcgtcgaaacggacataggtgccgtcggcgcggcgaacgcccttgcaggtacgcacgatgacagcgcgaacgacttcgcccttcttcacggtgccgcccggggtagccttacggacggaagcgacgatgacgtcgccgatgttgccgaacttacgcttggagccgccaagcacacggatgcacttgatctcctttgcgccggtgttgtcggcaaccttcagataagattcctgctggatcataagttgtcgacctccttactcagccttcttgatgatttcaacgagacgccatctcttgtccttggacagggggcggcactccatcaccttcacggtatcgccgacgccgcactcgttgttctcgtcgtgcgccttcagcttgtaggttctcttcacgatcttcttatacagcttgtgctgtacgctgtcctcaattgcaaccacgatggtcttgtccatcttatcggagacgacctgaccaactctggttttgcggaaagctcttgtagtttcactcataattgcttacctcctcagattgcggtctctttctcacgaataatagtcttgatgcgggcaatgtctttcttgacagcagcgattttgacggggttatcgagctggttggtcgcgtgctgcatccgcaggaagaacagatccttcttcagatcggcagccttcgcctccagatcagcgacggacatcgctctcagttcttttgccttcatcattattcaccaccattctcagatactgcatcttcacgggcgatgatcttggtcttgatgggcagcttgtgctgtgccagacggagagcctcgcgggcatcttcctcggacacgccgccgatctcgaacatgaccttctgcgccttgacgactgcaacccagtattccggagcgcccttaccggagcccatacggacgccgagcgccttcttggaaacaggcttgtcggggaaaatcttgatccagacctggccgctacgcttggtgtaacgggtcatggcgatacgggccgcctcgatctggttgccggtgatccagccgggctccatggcctggatgccgaactcaccgtaggaaaccttattgccgcgggaggcagcgcccttcatacggccgcgctgaaccttgcggaactttgttctcttgggcattaacatcagcggttgcctccttccctgcgatcatcgcggcggcgatccccatagggtctgccggaaccgcggcggtcaccgcctcggcgatcatcgcggcgacggtcattgttgcggcgctcacggcgcggagcctcgggagcggtctgacggagcgtggagttcaggacttcgcccttgtagatccagaccttgcagccgatcttgccgtaagtggtgttggcctcagcgaagccgtagtcgatgtcagcgcgcagagtctgcagggggatggtgccctcatgataggactcgctgcgggcgatctcggcgccgcccagacggccgccgcaggcgcacttgatgccctttgcgcccagacgggtcgcacgctgcatcgcctgcttcatggcgcggcggaaggaaatgcgcttctcgagctgcgcggcgatgttctcagccacgagctgggcgttgaggtccgggctgcggatctcgacgatgttcagagaaacggccttgccgagcttctgctcgagctccagacggagcttttcgatctcctggccgcccttgccgataacgacgcccggacgggagcagtgcaggttgatcttaacgcgggcattgctgcgctcgatctcgatcttcgcaatgccggcggaatagagtctcttcttgagatccttacggatgttgtagtcctcaacgagaaggtcgccgaccttgtcgttacgggcataccaacgagagtcccagtccttgatcacgccaacgcgcaatccgtggggattaactttctgtcccatagtaacctccttaagccttctcgctcacaccgatggtgatatgcgtggttctcttgagaatgcggctgtatctgcctctggcagtggctctgccgcgcttgaggatcgggccggggttcgcgacagcagtggtaacgaccagcttgtcgacgtccatgccgttgttattctcagcattggcgatcgcactcttgaggagcttgagcatcggctcggaagcagccttgggcgtctgcatcagatagacgcaggcagtcttggcatccttgccgcggatgatgtcgcacaggatcgagaccttgcgcggggaaatacgcaggtatttcagatgagctttcgcttccatgttttctcctccttacttagaattggaggtcttggagccggaatgaccgcggaacgttctcgtgggaacgaactcgcccagcttatgaccaaccatgtcttctgtcacatagacgggaacgtgcttgcggccgtcatggacagcaatcgtatgaccgacgaaggaggggaagatggtagaggatctcgaccaggtcttcagaactttcttctcaccggttttgttaagctcttccacgcgcttgtagagttcaggagcaacaaacgggcctttcttaatacttctgctcatgtttcatttcctccttacttaccgttgcggcgcttgatgatgaacttgttggtcgggttcttcgccttgcgggtcttcaggcccatagcaggcttgccccacggagtgacggggccgggacggccaacaggtgcgcggccttcgccgccgccgtgcgggtgatcgttcgggttcatgacggagccgcggacggtcgggcggatgcccatgtgacgcttgcggccggccttgccgatgtgcacgttgccgtggtcgatgttgccgacctggccgatgcacgccgtgcagttcatgcggacgtagcggacctcaccggagggcaggcgaacctgagcgagctcgccttccttcgccagcagctgtgcagcgacgccggcggagcggacaagctgagcgccgtagccgggctgcagctcgatgttgtggatgatggtgccgacggggatgttggcaagcggcaggcagttgcccggcttgatatccgcagcggcggaggcgaggatggtgtcgccggccttcaggccgaccggtgcgagcacatagcgcagctcgccgtcctcgtacttgaccagcgcgatgaacgcgctgcggttcggatcgtactccaggcgctgcacgacagcgggcatatccagcttatcgcgacggaagtcgatcacgcggtacttgcgcttgttgccgccgccgcgatggcggacggtgattctgccgtagctgttgcgaccggaattcttcttcagggtctcaagcaggctacgctcgggctttgccttcttatcgacgccgtcgaaagcggacacggtcatgccgcggcgggccggggtataaggcttatacgttttaatcgccattttgcgttacactcctttatgagatggattagaccataccctcgaagaactcgatggtcttggaatcggcggtcagcttgacgacagccttcttgtagctggcggtgcggccggcaggatatctgccctggcgcttcagcttgccatccatgcggatggtggtgaccttctcgaccttcacgccgaagatctcggaaacagccttcttgatctcggtcttgttggcgctctccgcgaccaggaagacatacttcttcagttcagtggcttccatggactgctcggtgatgaccgggcgaatgatgatatcgtatgcggtcttcatgcgaacacctcctcaatcttcgcaagcgcagccttgtcgagcacgagcttcttcgcattgaggatgtcgtacacattgacgaggttggcaaaggtggtctggacgccgggcaggttgcgggcggagaggacgacgttctcgttggcctccgcggtcacgaccagagccttgcagtcggcgttgactgcgctcaggaaaccggcgaacttcttggtcttgatctcgtccatcttgatctcgtcgatgacgacgatgtcagcggactgagccttggcgctcagaacggacttcagagccagacggcggaccttcttgttgagcgtgtagctgtaatcgcggggcttcggggcaaagacgatgccgccgtgcgtccactgcggggcgcgggtgctgccctggcgggcgtggccggtgcccttctgcttccagggcttcttgccgccgccggagacctcagcgcgggtcagtgcggactgcgtgccctgacggcagttggccagatgattcttgacgacgtcgtggacgacggactcgttgggctcgatgccgaacacggcctcggaaagctcaacctcgccgacctgcttgccgttcatgtcgtaaacattggtcttaagcatggtgatttagctcctttccttagcctctcgcggaagccttctgcgggttacgagcggaagccttctgcgggttcttgctgacgccagcctcgccgtgcgtctccttgatcttcttgacagtgctcttgacatacacaaggccgcccttcgggccgggaatcgcgccgcggatgacgagcatgttcaggtccgcgtcgaccttgacgacgtcgaggttctgcacggtgacctgctcaacgcccatctggcctgcgccgatcttacccttgaagatacgggaaggatcggaggaggagcccatggaacctgcatgacggtggaccgggccgccgccgtgggtcgtcggggtgcgctgtgcgttccatctcttgatgacgccctgatagccgtggcccttggagatgccggtcacgtcgacgtgatcgccagcagcaaaggtgtcgaccttgatctcggcgccgacctcgagctcagcagcattgtcaagcttgaattccttcaggtgctttctggcagagatgccagccttcttgagatgacccagctccggcttgctgagcttcttctcggcgacctcgccgtaagccagctgcacggaaacatagccgtcattctcgatcgtcttcttctgagcgacgacgcacgggcctgcttcgatgaccgtaacagggatcacatggccgttctcatcgaagatctgggtcatgcccactttcttgccgatgattgctttctgcatgttgtttactcctttttaggttattggttggaagacttgaccattgggcagccattggtctgccaacatgacccgggaccgcctcgggcggtcggggctcgctgtatcccggagcgggattacagctttatctcaatctcaacgccggccggaaggtcgaggccctgcagagcttcgatgcacttcgcattcggattgaggatatcgatcagtctcttatgggttctgcgctcgaactgctcacgggaatccttatacttgtgaacagcgcgaaggatggtgacgacttccttcttcgtgggaagggggatcgggccggagacggtcgcgccgttgcgctttgccgactcgacgatcttctccgcagtggagtcgatgagctgatgatcataggccttcaggcgaattctgatcatttcgtttgccatgttgttgtttcctccttgaaacgtactcagttctctggtttgctgggtacggtcgaagcgcttttgctgtacgcttaaccgtgcgtatcactccgcagccatgaaaaaaggccgacgttcgccggccgtgcctcatgtgcggcgatatacgccacgcacacaaagtgcctcagccgcccgatgaccggacatactccgcggaagttaccgccatcggcgcaatctcccgcatcatcgcagtgcgtgcgcagagcatccctcaacgcgcgcccttatatagtaatccacgcagccgtgaatgtcaagccttttttcggtttttttcataatttttttcagattattttgtgaaaaacggagattttcaggatttccctgcaagaggccgaaacaggcggccgcagagacctgcagccgccccgatttctgttgatctactcgacgatgccgataccgtatgccggaagcccaagcagtgcaccgccatttccgttcagagagaggttataccagacgccgtcatagcaggccgtctccatggcgaaccaatactgttccccgtcgaagcttacggacgcaaacaccgtgcacagctcatccgcgccgcactctttccgaagtccctcgcggtttttggtatttgcctcgctcgcgtaacgttcctggaaatccgcatccggatactcctcggcgcacataatttcctcgacgtgcatgtttgaccggatgtcatcgtccgcaaactcgcgggtgaagttttccagatcattcgctgaatcgaagtgcacagcgtcaattccatcctgcatgtcataggggggtgtccgccaaagcgatcaggcgatactgcgtatagagcgctcccgctgcatcacggaaacgaacggcgagattcacctgctccgcaccgaaccagtccgggctgtaggaattcggcagatacatactgcgtcgctcggcataggtcttccaatcgaaatgcgcagtaaaggtctcaatggcaaagctggagatcgctttctctgcatctccgttgagcagcccgtcgagataggcctgcatagccgcctccggagagtcgaagccgctgccctccaatttggtctccgcgccgcccttccggcacagcgcaaatacgccggctgcgatcgcacagcacaacacaccggcaagcagaccgaagaagaattttccccatccgccggaaggtttccgtgccatctgttcggccggctggtctggtgtcagaatctgcacaaccggctgaaccggttgcggctccggggccggcgccccacagctgcggcagaaacgtgcttccggctccaatttacagccgcatgatctgcaatacatgatctgtcccctctcttagccgtgtcttacagctccgcgatcgcctcgacctcgacgaggacgcccttcgggagcgtgcgcacggcgacgcagctgcgtgcgggcttctccgtgaaatagcgggcatagacctcgttgaacgcagcgaagtcgtccatcgtctgcaggaagcagagcgtcttgaccgtccgctggaacgacgttccggccgcctcgagaactgcgccgagattctgcatgacctgctcggtctgcgccgtaatgtcctcccccgccacggcgcccgtcgcgggatcaatggggatctggccggacgtgaacagcaggccgcctgccttcattgcctgagaatacgggccgatggccgcaggtgccttttccgtgtagactttttccatgatgattcctcctgttgattcgttgtgggtcgcgccgcctcaggcctcccgctccatccggctgcggatgtaatccgggacgtcctgctgcgggatgtgcagaacatgggcaaactcgtcgttcaggagcttttccgcgtcgcgcagggtctgctcgtcggcaatgcgcagatgcttgccgtttttctgcagctcgcggcggcggacatagagcatccggatcaggtgcaggacccgcctgcggtcaccgccggacaggatctgggcaaacacctgcttgcgctcgttcgggtcatcgatccaagagatgctttcgcccgctgcggactgaagcaggctctcgatctccggctcggacagaacgggccgcatccggctgcacagcagctcgttgtccgtcgggacatagatcgtcgcgcgcgtgcgatacaccgggcgcagaacgtagtatttgctgcgctttcccccgatccgcagcgtttcgatcgcctcgatcgtgcagatcccctctgttccgtacagtacggtctgaccaggctccagcatttcgctcactccttcctgttttctgccattctatggatatcataccacattttgcgcaaaaatgtcagggggcatttgcgaattttctttgtttttcacataaaagcgccgcccggaaggccgggcggcgcagggaacactattatatattgtattccggctcagatcgcgccgtgctcgacgagcagcttctcaacatccgtgccgcgtaccttcttcagcagctccttcagagccagcttttcgactacgccaaggtccatgtccgtgatcttgcggccgtcgcgcagggcaacactggcgttcacgagatcgcgcacgtcataggtgctgccccaaacctccggcacaccgcggtcgatgtcgagcagactgtagacggcctccataccggtgcggatggaatactccgtcgtgaagatcgtatcgcgggccgtctcggcaaactgaccgaggaaggcgaagttcacggctccgtccggaacgacgttcgggcggtcgcccttttcacgcggcatgaaaaacgcggtgatatacggcatcataacagggacggtctttgcgctatgctctgcgagatccgcgatctcagcgaccggcacgccaaggtgatacagccactccatgcagatctccttgccggtgcattcgcgcatggtcttcttaacgaagtcgcccggcttgtcggagaacagcccgtagacccagatgacgagctggtccttcggctgattgcggaactgcggctggcgattgatcgtccagctgagaagccagccggaatcgcgggctgtgacgatgccgcccgtaacgaccttgccggagaacgggtcgcgcttgcagatcttttcgatatacggcacgatcctgcggtcgagtgtcgtaacggtcgcgctcatccagttcgactgctccggatcgctgcagaacttatccggatggccaaacgacggatcctgcgctgcgatcttgcgccacatatcccagccgccgccctcgcggatggtcttgttgaaggccgcgggctcattctggctgccgtaggcggagttctcgacgcagccgccgttcgtgatgaaaacaaggtcgttgtccgtcaggtcgatggcatcctccctgccctcgcgctgcagaacgatgcggcgtgccgccttgcggccgttccggatgtcaaactccacattgacgaccttcgtgttgtattggaagtccacaccgtgctcctgcagataatgcaccatcggcaggatcatggactcgtactgattgtagcgcgtgaagcgcagagccgtaaaatcgggcaggccgccgacatgatggatgaagcgcttaagatacagcttcatctccagcgcggagtgccagttttcaaaggcgaacatcgtgcgccagtagagccagaagttcgaatcgagcacctcgtggtcgaatatctcgtcgatgcgcttgttgtagagctcctcatccggcgtgaagaacagcttcatgatctccattgcggccttgtcggacaggccgaacttcttgtcggtatgggcgtcctgcccctgcttctccgtggcacggcagagcgagtagttcggatcggccttgttgagccagtaatactcatccagcacgctcacgccctccgtctcaatggacgggatggagcggaacaggtcccacatgcactcgaaatggttgtccatctcgcggccgccgcgcatgacatagccgatgtcggtatactgatagccgtcacacgcgccgccggggatcgggtccttctccagaatatggatccgctcaccggccatctgaccgtctcggacaaggtagcaggcagccgccagagcggcaaggccggaaccgatgagatatgcggctttttcgtcaacgccctgcggcttctgcgggcgggcaaacgcttcataattaccactggaataatacatgctcagttcctccgtagtttctatcgaatttgtagccttattataagatgcccgtcttttccgcacaatagacagaaattccgccgtgccgcaatttcaggcacagcggaaaagctgtcttatttttgggcacggcgggctttttgtcgcaatgtcacggaagcggccgcagatactcgcttttcgcccagccgagcaggccgtcataatccacgacggaccagtcgtcataggaattgagaatacgcaccggcgcgccgttcggcatgcgcgcgagaatgcgggcagtcgtggccggagcgccgcgcagcagaagattcccactgttcacggacacgaccccctcccgctccggccgcggcgaaaggaacggcacgccgaaatactccgtcacggacagggccagactgcgcgcaatggcctcgaggttgttttcgatccattcggcatcggcgcggttgtcatgatagcccagctccgccagcacggacggggcacgcacgcggcggatctccgtgatggacgtcgaggccagcggccgcactctctgcggcagcggatagatctcgcgcagattatccgccaggatattagccatccgcaggccgtccgtgctgccgggataataatagaggtcgatgccgcgcacggtcccggctgactgcggcggcgcggcgttgctgtgcagagcaagatggaaatcatagtttccggcgttcgaggcgcggatagacgtgccgaccgtcccctccgggtcgttgcgggtgacgttgatgccggaggcgcgcagatacggctccatccggtcggcgatgcggttcatccacaggcgctcatttccctccgtcacatagggattgcccgcctgcgtggagggactcagaaataaaaacggcataaacagttctccttttcctcttgtcaaaaacctctcagacttttccgccaaaaaatttcaaagcaaaattttgtagtttgattttgcaattttgccgctcctccgaaacgttcgtccgggcaggttttctgacagtctgctttggctttcttctttttttccattctatgccgcagcgcaaaaagtgttgttgcggtgctgagaaaagtatgatatgatttaagttgattgtgaatcagaaggcggaggaatatccatgcagtatatcgttctggacatggagtggaatcagccgtggcccggctcctatgcggcgcagaaggtgctgccggtgcagatccacggggagatcattcagatcggcgcagtgcgcctgctcgagaccggcaagatcgccgatgaatttcaggtgttggtgcgccccaaatactataaaaagctcaacagccgcgtctccaagctcacaggactgcgcgacgcccgcctgcgcgaggagggtctttccttccccgaggcgctcgagcgcttccgtgactggatcggcggcccctgcatcttcctgacgtggggctttgacgacatcacggtgctggaggacaatatcctgctgcacgacggcgagccggactggatcacgcagtggtacaatgcgcagatgatcttcaatgcgcagaccggctgcggcaacactcagaaggccctctcgaccgccatggagctgctcggcatcgagccgtcgcgcccggcgcacgacgcgctcggtgatgcctaccacacggccatcatctgcagccgtctggacctgccgcgcggcattgcagaatataagcaggccctgcagagccatgcggacggcttccacggcgatccgcccgcaggctgcatcagccgttctgtcttccatggctacgcgacccgtgaggccgccatagaagccatgacaagccgcgagaaccactgtccgaaatgcggcaagagcatgcgcaacggccgctggatctcgcagcagggccaccgctatatggcgatggccgagtgcccggagcacgggcgctatctggtccgcatccgcatcagcgacgagcccggcggcacgcagcgcgccagccgtcttgtctacgagggcgacagcgaggccgcgcagaaatatgacacactggccgcgcgtccgtctgccgcacgccgccgcaggcgcagacgctccgcccgccgctcctccgccgccgaaagcggcaagcaggaaacgaaataacaagagcttgtcaaaaaagtatttttgacaagctctcaaacgagacccgtttcactgggctctcgtttgaaaggggctgcggctcgctgcagcgcacgaagggcgcgcccttcgtgcgtttgcgagccgagcggtattttctccgacgtacacgccgccggagaaaatgatttccattttctttgcgcctgcgggcgcaaactctgcgaggcttttttgacagtctgataacaaatggtcctgcagttcattcgctgcaggaccattgtgttttaaggaggaaaagaacatgcttgagcagctgcccgtcctgctgctgccgtggtttgcggaacaccgccgcgacctgccatggcggcgcgaccgtgagccgtatcacgtctggctctcggagatcatgctgcagcagacgcgcgttgaagccgtccgcggctattatctccgctttctcgagcgtctgccggatatcgctgcgctggcaagcgcgcccgaggacgtgctgctgaagctctgggagggcctcggctactattcccgtgtgcgcaacctgcaaaaggcggcgcagtgcgtcatggagcagcacgacggcgaattcccgcaggagctttccgccatccgcgccctgcccggtatcggcgactataccgccggggccatcgcctccatctgttttgaggcacccactgcagcagtagatggtaatgtcctgcgcgtgatcctgcggctgacggcctgtgccgactctccggccgatgtgcgcgtgcggcggcgcatcggcgaagaactgagcgcagtttaccccgcggggcactgcggcgatttcacgcaggcactcatggagctgggcgcgaccgtctgcctgccgaacggcgcaccgcagtgcggcgcctgcccgctgcgtgcgctctgcgaagcccacgcgcaggggacggagctgcagttcccgacaaagccgccaaaaaagccccgccgcatcgagcagcgcaccgttttcgtgctgcagtgcggcgaccggctcgccgtctgcaaacgtccgtcccgcggcctgctggcagggctgtggcagctgccggacgtgcccggcaagctggaaacggcggaggcgctccggcaggcggagcagtggggcgtgcatccgaccggtatcctgaaaacggccgaacggacgcacatcttcacgcatgtacagtgggacctgcgcggcgtctggctgacgtgtgcggcggaagcgccgcagttcacctgggcggatgaggacgcactgcggcatgagatcggcctgccgacggcttatcggcaatttttggacttgcatgcggaataaaaagcgtgtatactgaagctaccaacaaaacggaggtcattgacatggaagacaagcgcgcacagtacggcgaggacgagatcatcacgctggaatttgacgacggcgttgcgttcgactgcggcatgatgggcacgttcgagctcgacggcaaggaatatatcgcactggaggccctggacgattccgacgacgtctatctctacggctatcagcgcaacgacaccgatttcgatttgctcgacatccccgaggaagaattcgaccgcgtcgcggcagaattcgaccgtctgatggacgagccgatctgagaatccaaatcaacatgcggccggagctattctcttaagagaggcttagtaaggaagaaggtagtacaaaatttgtgctgccttctttttgtatgattcgatgctcattgtgcctatggacaaaaaagtgatattccggaccttgcccggagtgatattttccttttcggaacgtgatataaaagccgcacggcttttgtgatattctattcgccgctcaaactgccgcaggcaatatcacgatgcaaagcatcatttcactgtccgaaggacaatatcactcgccgtcaggcgaatataacagaggcgcacatccctacggagtgcgcctccccggccgctgcattttttattcccggttattcccggaccggctccgccgagatcgcagaaatttcataagccgtccgccgctcggccgtggtgccgagcattttgatatactcccggctctgcagccgcccggtcagcgccaactgcgtgccgaccggcagttccgccgcctcctgcgccgtgcggccccagaggatgcagggcagatagtccgcacggcgatagggccggttcaccgcgagcatcacgtcgcagatctcccgcccgagcggtgtgcggcgatagaccggcgcgcggcagatggtcccgagcagctcggcgcggttgtcgtgcgccgcgctgcagagcgtcatcgtctcggccagcacggagatcacgagccgccgcccctccggctcgcggttgttataggagcggatctgccccgtcacacacagcgtatccccgcctgccgcgggcgtctgctccagaagctccagcggcgcgagcaccggcagcgtgtccgtcgtgccggacaggcgctcgacctcgagcgggaaagcataaaaccggcggccgtggttttcatgggaatagcgcggagcaccggcgagatttccggtcaggatgatctgattgacgatatgttccattctcccacctcgttgtattcttatgggagagtatattcccctgccggagccattatgaaatggaatatggttatcaaaacggcctgccgcgatcgcggcaggccaaggtgttttttcattttcttttgcggcgcttgcccgtcatggactcgaccgcaagacggaatacccgcgtgtgcgccacagacgcacggtcaaaggcaaagtccgggcggccgtagtgcgccatcaggcactgcagcgcagcctcgcgctccgcctccgggaccgtctcgagccgcccgcggccgatgacgctctcataggccatggtgcacataccatgcgcctcatccgtgcagagcatgtggccgcagtccatctcaaacgtcgcgcgcgggtccctctccatacgatcgtactttgttccggtcagcgcgccgtggaacagcagatacagcgtaccgtcccgctcctccataccgaaattcagcggcacgacatagggatagccgctttcgtcattcagggcaaggcggcagacgtcacagcgcgccatgacgtccagcagctcctgccggtccgtgatctcccggtctgttcttcgcattctcgtccctcctcaggaattcagcagcggccgcagcacggcgcgctcgtcgaagcgcgtgtcctttgagttgaccaggaacacgagctctgtcagattttccgcgccgccataggcctgcgcaaatttttcgatcttcgagccgtccacatcgcggatatacaggcggcccgtgcagacgtcggccgggaaggccgtgtcgtccgtctcgaacgagatcatgagattgctcccggagaagaacgtcgtcagctcctgcgccgcgtcctgcgtcagctccgcgccggacttttcggaatgataggagatgctgttgctcgccgggaaacggaagtccgagaacacgacctcgcggaagccgcggctcgaaagctcacgcgcgatctgcttgaggtagatcatcacggtctcgctcgcggggtcgagccagtagcagccgttggagtccatccacagcgcgccgctcgaaagcgggagggccgcagcggaattggccagcgcaaacgccgtgtcgcagaaggccgggacctccgcaatgaggtaatagccgtgctggctgagccagtcgatgagggaatccacggccgccgtatcgacgtccgccagctccgcgccgtcgatggagctggaatagtaaaaattgccgaacgtgctcttgagctgcagcagaacggcacaggccccctgctgctcgagcgccgcgcgcacggcctcggggtcgcgcagcatctgcgtcgtgacatacacgccgccgaggtcggtgatccggtccgagccgggctgcgcctcgtcatagacgatctgcgcatccgagacctccggcagcgccgccgtcgcgcccgtgccgtccggatcctgcgcgtttttcttcagggagaggtgcgcgccgtcgcggtcataggtgacataaggctcaaggtacagcagcagcgctgcgccgatgacgatggccgccgccagcacgatgccgagcacgcgcaggagcttgcgcagcatcaggcgcctgcgataggaaaggcggggcatctcagcgcgcccccaggcgcgccgtcaggccgcaccattcaccctcgtgcgccgcatggacgatctccagcccggccgccgcgagcgccgcgcgcacgtcgtcctcccgcgtcgtgaggatgccgctgcagacgaacgccgcatccggccgcatgagcttcggcacaacgggcgcaagacggatgatgacatccgccacgatgttggcgcacacgatgtcaaagccgtctcccgccagcgcctgcagaaaatccgcatcctcgacgacgtcgcccgtccgcgccgtgaagcggtccgggccgaagccgttctgcgccgcattcgccgcggcgatatgctccgcgctcgggtcgatgtcgacgccgacggcgcttgccgcgccgagccgcagggcactgacggaaaggatgccgctgccgctgccgaggtctgccacgcgctctccgccgtggaggagcgactcgagcgcgcgcatgcaaagctgcgtcgaggcatgctcgcccgtgccgaacgtcaggccgagatcgaggatcacgggcagacggccctgcaggtcgtcgaccgtcatccactgcggaacgacgagcaggcgctcacccaccggcagggggcggtagttctgtttccaggaattggcccagtcctcgtccgggatgcggtcgagtgccagcgtcagcgggccgaattcacaggccggatagcggccgggcagctccgcgagcagggcgcgcagctctgcaagctgagcctccgcagtctcctcaggcaggtacaggcgcacctgcgacaggtcgcgcatccgcgcggcaagcttttcatccacataatcccaataggcgcgcgcgccgtcgaggaactggcggaactgttcgctgtcatcgatgacgaagctgtcaaacccggcctccgtcagctcggcgcacagaagatcgatgccgccggatgccgttcggatggtcacttcaagccactgttccatgttcatccctccataaatacaaatcacttctccctattctacaggattccgtccggaataacaagcgaaatctttttgcggctctttcatttccgggaaaaacgtgtataataaaggcagcaccgcatcattcagcgagggcattcggcgagagattttttgtcgggccaaggtttgaaaagtgcaggaatactttgtgtatttcaaacttttcgaaccgacggatcggcagaaaatatccggcgaaggccgaagatgcaattgtgcggtgttgcctaaagacaaacacgctgaaaaaggatgaatgcccatgatcgaaacgatcaagctggccgcaggcgttaccctgttggccgtgcagaccgagaaattcaagtccggctgctttagcttcaacctgatgcgcccgcacacgaaggccgccgccccgctcgatgccctgctgccgagcgtgctgctgcgcggctcggagcgctggccggatatgcgcgccatctcgatgcgccttgacgagctgtacggcgcaacgctcggcacgctcgtccgcctgcgcggcgaaacgaagctgaccggcttttacgctgattttattgaagaggccttcctcccggcgggcgaagccgtctttgccccgatggtggagtttttccgcgatattctgttccatcccgcgctggaaaacggcctgctgaacgcccgctatgtcgaaagcgaaaagcagaacctgatccacgccatcgagtccgcgcagaacgacaagcgcgtctacgccgccatgcgcatgcgccagatcatgtgcgagggcgaagccgccagcatcccccgcctcggctatgctgaggacgtcgccgcgatcacgccggaggccctgacggcgcactggcgcacggtgctgcgcaccgctcccatcatgctgttctacgcaggccgccgcacgccgcaggaggccgccgccctgttccgtccgctgtttgacggactggagcgtgaccccgtctctcccccgccgacggtcgtgcgccgaagcgcggagaccgtgcgcgaggttacggagtccatggatgtcacgcagggcaagctcgtcatcggcatgcgcaccggcatcaccgcctccgacccggactatcccgccctcgtgctgctcaactccgtctacggcagcggcgtgacgagcaagctgttcgtgaatgtccgcgaaaagcgctcactgtgctactatgcctcatccgccgttgagaagttcaagggtctgatgatcgtgtcgtccggtatctcgtttgatcagtatgaaacggcacgcgacgccattctggccgagctggacgcctgccgccgcggcgagatcacaccggaggagctggaatccgcccgccgctcgctgatctccgctgtccgcgccgggctggacacgcccgccgcgctcgacgactggtatatcggcatgtccatcgagccgtgcgacgaccccgagaccatgctgcagaagctccccgccctgacggtcggggatgtcgtgcgcgcagcccagcgcatcaccacggacacgatctatttcctgaagggagacgaagcatgacactgcatgaattcccgcgcctcggcgagcgctactgggagcagcggcttgaaaacggcctgctcctccgcgtcgtcccgaagcccggctttgcccgcagctacgccttcctcggcgtggactacggctccgtcgacacgtccttcacgcgcggcggcatcccctgccgcacgccggacggcgtggcgcactatctggagcacaagatgttcgatctgccggaggacaacgcgatgaacctcttcgcggcccacggcggctatccgaacgccttcacaggctatgccatgacggcctattatttcgactgcaccgaacagttcgccgaaaacctccgcatcctgctgcgcatggtgctcacgccgtggttcccggccgagagcgtagaaaaggagcgcggcatcatcgcgcaggagatccgcatgtatgaggacagcgccgactcccgcgcctatgaggacctgttcggcgcgatgttcgcgcatcaccccatccgcgttccgatcgccggaacggtcgaatccatcggtgagatcaccccgcaggtcctgcaggactgccatgcggcattctacgcgcccgcaaatctcatgctctgcgtgacgggcgatgtcgaccccgcgctggtggaggagatcgcccgtgcggagtccgcaaacgcccatgcagagccggtccccgtgcgggactacggcccggccgaggccatgacctgcccgacaaagcgcacggtccggcatatggagatcgccatgccgacgttctgcctcggcttcaaatgtgagccgcccgcccgcggtctggagtccatgcgccgtgagatcattggcgatctggctgccgaaattctcgtgggcgaatcctcggcgctctatacgcgcctgtatgacgagggcctcatcaattccgacttctccgccggatatgaaagcgtccgtgacgcctgcctgttcagcgcgggcggcgacagccgcgacccggacgccgtgctccgcgccgttctggacgaggcgcagcgcctgtcccgcgagggctttgaccgcgcgctgtttgaccggctcatccgttcgtcgctcggccgccgcacccgcgaccttgacagctttgaaagtgtgtgctaccgtatgtgtgcctaccacttcgacggcgtggattacttctccttcccggaggcctacgcttccgtcacgcccgaggacgtgctgcaattcatccggcaggtcatccgcccggagcgcgccgcgctcagcatcattcttcccaatgaaagtgaggaatccgcatgaatatcttcttaaccagtcccatcagcttccccgggctcggcattgagggcattgatccgcccgacggcttctgcatcccgggaacaaacttcgagatcaaattctacggtgtcatcattgccatcggcgtgctgctcgccgtgacgtactgcctgcgccgggcaaagcagttcggcgtcacgcaggacgacattctcaatctcgtgctcatctgcctgccgtccgccatcgtcggcgcgcgcctgtactatgttatcttcgagtgggaccagttcttcggccccggcatcccgtggtaccgcttcctcgacatccgcagcggcggtcttgccatctacggcggcgtcatcggcgcggtgctcggcatgctgatctatacccgcgtgcggaagctcaaggtcctgccctttctggacctgaccggcatcggtctgctgctcgggcaggccatcggccgctggggcaacttcttcaaccgagaggcccatggcagcgtgacgacctgcttcctgcgcatgggtctggtcgaaaacggcgagctgcagtatttccacccgacgttcctctatgagtccgtctggaacctgaccggctttgtcgtgctgcacttcctgtcaaagaagcgcaaattcgacggtcagatgttccttgcatacctcgcctggtacggcgcaggacgcatggtcatcgagggcctgcgcaccgacagcctgtggctcggcccggtccgtgtcagccagctgctcgcagccgtgaccatgctgctgtcgctcggcatcctgctgtatcaggccatctttgtcagacacgatcccgcgaagatgcaggtcaaccgcgtggcagcggcagaagctgccaaggccgcagaggcgcagccggaggagaccgccgaaccggaagatgcagcatctgagccggaggacggagtatctgaggaaaccgaatcatccgaagaatcaaaggagtgatcttttatgaaggaaaccatggaaaccctgaaatgcaaggccgtccacgttgcgggcagcgcagcccagaccgcgcgtctcgtcgcgctgatctccaagaagaagtttgccattctggcggaacaggacaagatccgccgctgctacacgcagcttggtaaggtctactacaaggactacgtcacggatgaagagccggatgacgccgagtacgacccgctgtgtgagcgcatctcccagtcgttccgccgcatcaaccgcctgcgtctggagctggaagccgcgaagaccaagcttgccggtgagcagcctgaggacgaagccgaacccgtggccaagcctgagacggagccggaatccgaggccactgcggaagaagaggactttgcggacaacgaaactcccgcggaagagaactcctgaagcaactgccggactgtcgaaaataccgcccggccgaaagtttcggagagaaggttcgaaggagcttattttgacaagctgcacatgaatgttccccctccggcatagatatgtcccggagggggaattttctatgcgcttgaccgagcttgccctgcggcgggcgggtgccgccgatctggaggaattccagcggcgtgagggcctgtatccgtccgggcaggaggatattctgaccatgcagcggctcacgccgctgctgctgggctatgaacgctatatggtcaagcccggcgacacctattaccgcatcgccacggcgcgcggcacatccgtccgcgccatgctgacggccaatccgaaccagaacccaaatctgctcatcccggggcaatatctgaacgtgccctacggcttccccgtcgtgccggcggacgtcccgttttcatcggagctgctgcagatctgcgtgcagggacttctcgtgcgctatccgttcctgtcacagaaatgcattgcccggacggcgtggggcaggcccgtcacagccctgcgcatcgggcaggggccgcgctgtgcgctctataacgccagccaccacgcgaacgagtggatcacaacaccggtcctgctgctgtttctggagcaatacgcctatgccgtggcgacggaggggcgcatcctcggcatggatgcccagcagctctggcggcgcacaacgctgtggctcgtgccaatggtgaacccggacggcgtcgacctcgtcacaggggccatccggccgggcagccaacagtatcaggcagcgcagcgcatcgcggcaggcttcccggaaattccgttcccgggcggctggaaggcgaatctgacggggacggacctcaatctgaactaccccgcaggctgggagcaggcgcgcacaaacaaattcgcactcggcttcaccggcccggcccctcgggactatgtcggggcctcgccgctcgaccagccggaaacggctgctatggcagctctgactcaggccatccggccggacgtcacgctgtcctatcacacacagggagaagagatctactggcgctttcaggactatgcgccgcccggtgcgcaggagctcggcgaacggctggcgcgggtcagcggctaccggctggaggacacgccgttcgcctcgggctttgcgggctataaggactggttcctgcaggacttccgtcgccccggctatacgatcgaggccggtctcggcacgaatccgctgccgctttcccagttcgacgaaatttaccggcgcaacatcggcatcctcgtccatgcgctgccgtaacagcactgcctgacttcggtcaggcattccagcttgccaaaaaagtccctccgagactttcggccaagcagttttttgacagtctgcaatgcctgacttccgtcaggcattcttcttgttgcaatcggggacgtcgtatgctatactgagggtacatttctgaaaggtgagctgaaacgatgatcgattggctgttcggcaccgtccttggcaaatgcgtgatgacattcctcatctcgctgctgccggtcgtggagctgcgcggcggcatcccctatggcatctcgcagggactggatccctggctggccttcgccgcaagcgcactgggcaatatgctgcccgtcccgttcctgctgctgttcgtgcggaagatcctgcactggatgaagcgctatcctcgtctcggccgtcttgccgtttcgctggagcgccgcgccgaccgcaagagcagccgtgtgcgcaaatccgagctggtcggtctgtgcatccttgtcgccattcccctgcccggcaccggcgcctggaccggcgccctcgtcgccgcgctgatggagatgcggctgaagcgcgccctgcccgccatctatgccggtgtgcttattgccggtctgctcgtgacgctcgccctgaccggcgtgaaggccctgcgctttctcgcctgacccgtccgaaaggagccgcgatgaaacgaaccgactacatttcctgggatgagtatttcatgggcgtcgccctgctggccgcccgccgcagcaaggacccgaacacgcaggtcggcgcctgcatcgtctcgccggacaacatcatcctctccaccggttataacggcctgccctgcagctgcagcgacgacgtttttccgtgggagcgcgagggcgcggagacaaagtatccctatgtcgtccacgcggagctgaacgccattctgaatgcaggcggccgtgtgctgcgcggcgcgcggctgtatgtggccctgttcccatgcaatgagtgtgccaaggccatcatccagagcggcatccgggagatcatctatttttccgacaaatacgccgaaacggccaacatccgtgcctcaaagcgcatgctggacgccgcaggtgtgcgctatcaccctctgcagacggagcttgcctccatcacactggatttccgcgcgccggaaagcgccgggatcccgcagaaaagcgacgcggacgaaaaataatcctttacttttccgtcattctatgctacgatattacggctggtaattttgccggtacatccacgcgctcagttctgggagaccgctccggaaggagcattccgcccgcccggacttagccgttggataatattttgaaaggtggagtattcccatgatccagaaggaaaagaaaaccgctatcatcgccgagtatgcgacccatgagggcgacaccggttcccccgaggtccagatcgcgatcctgaccgcccgcatcaacgagctgaccgagcatctgcgtgagcacaagcatgacaaccactcccgccgcggccttctcatgatggtcggcaagcgccgcagcctgctcgactacctggccaagaaggacatcaaccgctatcgcgccatcatcgctcgtctgggcatccgtaagtaatcacgaacaatgggcggcccgccagcggtccgcccattttcacgatttccccatccccgcatttccccgcacacgggagcgaagtttagcagttgaaggcgctgccgagcgcgcgtttggccgcggcttcaagtgctaaacctcccgtggaacttcattctgacaggaggataaaccatgatcaccagaaaacagtatcccaaccaccatgtgtttgagacttccatcggcggccgtccctttaccgtcgagaccggcaaggtcgcagagctggccgacgccgagtgcatctgccgctacggcgacaccgtcgtgctcacgaccgtcacctgctccccggatcccaagcccggcatcgactacttcccgctgaccatcgagttcgaggagagaatgtacgccgtcggccgcatccccggcagcttcaaccgccgcgagggcaagccctccgagcgcggcatcctcaacagccgcatcatcgaccgtccgatgcgcccgctcttcgacgatgagctgcgcaacgatgtcgtcgtgacctgcaccgtccttgccaacgactacgagaaccccgttgagatcgtcgcctctctgggcgcttccatctctgtggcctgctccgacgtcccctggaacggcccgatcgccacgacgaacgtcgcctatgtcggcggccagtacgtcatcaacccctctgccgagcagcgcagcgcctccgagtgcttcgtgtgcatcgcctctacgttcgagaaggtcgtcatgatcgagaccgaggccaaggaagccccggagagcatcgtgctcgagtgcatccgcatcgcccatgagacgaacatggaggtcgtgaagttcatcaacaccatcgtcgagaccattggcaagccgaagttcacgtttgaaaaggcagccgtcaaccacgacctgctcgacgatctgtgcgcctatggcatgaaccagatcgaatatgccctcgacaccgacgacaagaacgtccgcgaggagcgcctgaccgcggcccgccgcgatttcgccgacaagttcgccgaaaagtatgaggacttcgacgtcaacatcgaggtctgcctgtataagatgcagaagaaggtcgtcaagaagtggctgctcgagggcaagcgcgtcgacggccgccagatggacgagatccgcccgctcgacgccgaggtcggcgttctgccgcgcgtccacggctccggcctgttctccagaggccagacgcaggtcctgtccatctgcacgctcaacacactgtccgccgcgcagaagctcgacaccatctatccggaagagacgaagcgctatatccaccactacaacttcccgtcgttctccaccggcgaggccagagcgagccgctccacctcccgccgcgagatcggccacggctcccttgccgagaaggccctgctgcctgtgatcccgagcgttgaggatttcccgtatgccatccgtgtcgtctccgaggtcctgtcctccaacggctcgacgtcgcaggcctccatctgcggctctacgctggctctgatggacgcaggcgttcccatcaagcgtccggtcgccggcatttcctgcggtctcatctccgatcaggagaccggcgcatggcgcacgttcacggacatccagggcgtggaagacttccacggcgagatggacttcaaggtcgccggtacgacggaaggcgttacggccattcagatggacctgaagaacaagggcctgacgatggagatcattgccgacgcactcgagcgctgccgcaaggcccgtctggaaattctggacaaggtcatgctcccctgcatctccgagccgcgcgcggacgtctccgagtacgctccgaagatgatctccatgaagatccccgtcgagaagatccgcgaggtcatcggctccggcggcaagaccatccagaagatctgcgccgacaccggcgccaaggtcgacatcgatgacgaaggcaatgtctttattgccgccgtcgatcctgcagccggctacgctgccaagaagatgatcgacgatatctgctttgttcccgaggtcggcgccctgtattatggcaaggtcgtccgcatcctgccgatcggcgcgttcgttgagatcgccccgggccacgacggcatggtccacatctccaagcttgaaaaccgccgcgtcgaaaaggtcgaggacgttctgaacgtcggcgacatgacgtgggtcaagttcatgggcttcgatgagaagggccgcgcgaacttcagccgcaaggatgccctgaaggagatcgctgagtccgagaagaagtaaacctgatttctccaatgtccggcgcgaaagcgccgggcattgtcgttttgaaaggcacaaccgccgctcaaccggaagttgagcggcggttttttgcaaaatgaacgaccggatgatagctttttcggccaattcatgatatggtaatgccagaacatgaaggagggaaaccacaatggaacagggaacgcttggaaagcgcattgcctatcaccgcaagcggctgggcatgacgcaggagcagctggcgcagcgcgtcggcgtgagcgcacaggcggtgagcaaatgggagaacaacctctcctgccccgacatcaccattctgccggagcttgcctccatcttcggcatcagcgtggatgagctgctcggccgcacaccaccgaaggaggagcgcgtacacgaggcagaggtcatcaagccggaggagaaggaacacattctggattacaccatcggcagcgccgcacgcagcgggctgtggttcgcgatctacgtcctcgccatcggcgcgctgtttcttgtcaatgcgctgggaaaattcgatgtatccgtctggacgatcctctggacatccgccctgctgctgggcggtctgagcatgctgacgcaccgcttctcctgcttcagcatcggcctgatgctcgtgggcggctattcgctgctgaccgcattcggctttctgtccatcggcttccgctggagcgtcctgatcccggtctttctgctgctgtggggcgtgagcctgctggtcgattatttctgcggccgcaggcggaagcagcaccatgtgcgcgcctcctacggcgggaaattcacgcaggacacgcgctgcgataacggccacctgagctgcgagctgagctttggctcctgccgtgtgccggtcgtgacgccgctgctgcgcagcggcaaaatcgaggcgagcttcggagacttcaccgtcgatctgtccggctgcgaggccgtgcaggacaactgcccgctgaccgttgagacgaatttcggcagcctgacgctgctcgtgccggaccgcttcgccgtcacggtctccgggaaggatacgacggcggccagcctcaaccagcgcgggacgccctgtgagcatcctgaagcgcagatcctgctggatgccgatctcagcttcggcagcctcgaaatcaagtacatataaataccgggaccgcctctctttgtgaggcggtcccgcttgatgtcagcggatcacatagaagtacagcagcacgagaaggccgaggccgatgcgataccagccaaatgccgtgaaatcgtgcttgcggatatagcccatgaggaagcgaatggcgaggatggacacgccgaaggcgaccgccatgccgacgagcagcacgccaagctccgtgccgctgatcgtgccgaatctcacgatcttcagcagcgacgcgccgaacatcacgggcacggcgaggaagaacgtgtattccgcggcgacctcgcgcgacgtgccgatgaggatgccgccgagaatggtcgcaccggagcgcgacgtgccgggaatgagcgcgagcacctggaacacgccgatgagcagcgcatccgaccagcgcagcgaagcgatggaattcacgcgcggcttgcggctgcggttataccgctcgacgaacaggaagccggcgccatagagcagcagcatcagggccacgacggtcgggttataaaagtgcttgtcgagccaatcgttcagaggcaggccgatgagcatggcaggcaggcaggacaccgcgatcttcagccacatgacgatcttgtccatgcagcaataacggtcgccgaagcgctgcaggccgcccacgaagccgttcgtgctctgctgggcgaaccacgagcgctgcgggatgcgcttacggtggaagggccagagcttgctccagtagagcaccacaacagcaaggatcgcgccgagctggatgacgacgttgaacatctccttgaacgcatcagactgctgcagcggccagatggcgtccgtcaggatcagatggcccgtgctgctgatggggagccattccgtgatgccctccacgatgccgagcaagatgaccttcagccattcgataaaattcatgaaaaaccttctttccggttatctgttcgattctatgccaacaccgggaaagtatagcacatcttccgccggatgtcaaagcaaaaggggatgcggccgcatccccctttatctgtcttttctgcaggacgtccggcagtgcgtgcagtctccgcagcagccgcagcagccgcggtggtgcagcatgcgccaaagcgacacggccagccacgccgccagcagcgccagcacggcccattccagccaccccatgcgtcaggcgatcagcagcaggagctgatacagccccgccgcaacgcaccaggctacaacgcactggaacaccgcaacgactgcgccgcgcagcttgctgcccagctcgcgcccgatggccgcaatagccgcgacgcacggcgtgtagagcagggtgaacgtcaggaagctcacggccgacagcggcgtgaacaagccggagagcgctgcgctcaggtgctccgttcccgcgccggtcaggatgccgagcgtgctgaccacggcctccttggccgtgaagccggtgatgagggccgtcgtcacacgccagtcctcaaagcccagcgggcggaacaccggcgcgaggatgcgcccgatggacgcaagcaggctcctgctgctgtccgtcacgaaattcaggtgcaggtcaaacgactccaggaaccagatggcaagcgtcgccacgaaaatgaccgtaaacgcgcgctgcaggaagtcgcgcgccttgtcccacaggagcatggccacgctcttgagcgtcggcaggcggtaattcggcagctccatgacgaacgggacgggatttccgcggaacaccgtgtgattcagcagcagggagatgagcacgccgacaaccatgccgccaaagtagagcagcgccatggtgagcacagcatgctgcgggaagaatgccgccgtgaatacggcatagatcgggatcttggccgagcagctcatgaacggcgtcagcaggatcgtcaggcggcggtcgcgtgcggacggcagcgtccgcgttgccatcacggcggggaccgtgcagccgaagccgatgagcatcggcacgaagctgcggccggacaggccgatcttgcgcaggagcttgtccatcacaaaggcgacgcgcgccatatagcccgtatcctccagaatggacaggaagaagaacatgaccacaatgatgggcaggaagctcaccacgctgccgacgcccgcaaaaatgccgtcgatcatgaggctatgtactaccgggttcatgccataggccgtgaggccatggtcgaccaccgcgctcaggcggctgatgcccagcgccagcaggtcctgcaggcccgcgccgaccacgtcgaacgtcagccagaagatcagcagcatgatgccgacaaagatcggcagggctgcatatttgttcgtcagcacgtggtcgatgcgcacactgcgcagatgctcgcggctctcgcggcacttgaccacggttttggagcacaggcgctcgatgtagtcatagcgcatggaagcaatggcggcattgcggtccagcttgccctcgtcctccatctcgacgatgctgtgctcgaccatctccagctcgttctgattgagcaggaggcggctgatgatgtcctcgtcgccctcgatgagcttcgtcgccgcaaagcgccgggccatcccggcagcctgcgcgtgatcctcgatcaggtgcgagacggcgtggatgcagcggtgcaccggaccgtcatcacagaaatccacgcgcttcggcagcgtgcgcgtgcgtgcagcacgcacggcactgtcgaccagctcctcgatgccctcgttcttcgccgcggcgatgggaacgaccggaatgccgagctcgtcggacattttctgcacatcgatggtgccgccgttgccgcgcacttcgtccatcatgttgagcgccagcaccatcgggatctgcatttcaagaagctgcagcgtcagatagaggttgcgctcgatattcgtggcgtcgacgatattgatgatgccatccggcttctgattcaggataaaatcgcgggtcacgatctcctcggccgtatagggtcgcagagaatagatgcccggcagatcgacgacgctgcagccctttgcgccgcgcatcacgccctccttgctgtcgaccgtcacgccgggaaaattgccgacatgctggttggacccggtgagctgattgaacagcgtcgttttgccgcaattctgatttccgaccagtgcaaagatcatgcgcccacctccggcaggatctcgatctgcgccgcgtcgtccatgcgaagcgtcagctcatagctgcgcaggcggatctccatggggtcacccatcggggcgatcttctgcaccgtcacgcgcgtattggggatcaggcccatatccagcagtctgcagcgcaggatcccctcgccgccgaccgccgtaatgagcccgctttttccgacaggaagctcctttaaggtcatggcttctccctccaaagttagacagtcttaacattttttcatagtagcatactcggctttccctgtcaagggaaaaaacggtgcaccgaaaatcggtgcaccggaaatttatcttgcggtcatttttctgcggaagatcacaatggccgccgtcagcaggccaaaggcccatgccagaacgatccagagctgtgggaacatgccgccccagtcccctgccagcgcggcccgcgccgcgtcgacggcgttggcgaacgggagcgcgtaggcgatgcggcggaaaacctttccgccgaggtcgagcgagaaccagatgccggagagccacgccgagacattggtcagtaaggctccgcacatcccaccgacggccttttccggcagcagcgtgccgcacagcatcccgagcgccagattcacaagcgcgatgggcacgttgaccgccgtgcaggccagaatgcgccacgacaccggcaggccgagcgggatggccgccagcaggcacacaagcgtctgcgccagcgccatggggagcatgggcagcagatagccgaggatgaaatcccgccccgtcagcggcgaggcatacagccgcagaatgagggccgacgagcggtcgcgtgagagcagcagcgcggaaaacagcgccagaaagctcaggctgaacacgctgacgcccggcgcaagctgctccggctcaaagagcgtcatgtgggcctccgccgggatatgccggttcaggaagctcagcagcaggagcagcaggatgggaaacgcgacgccgaagccgacgctgatcggatcgcggagaatttcgcgcgcgttgcgcgaggcaaaaaagcgcattcttctcattgggctccctcccctgccagcttgataaaggcctcctcaaagcgcgtctcgcccgccgcggcgcacagctcctgcgccgtgccgcagatacgcagcctgccgtgcgacaggatgccgatgcggtcggaaagcgcctccgcctcctcgagataatgcgtggtgagaatgacggtcactctgccgcgcaggcttcggatgacctgccacagctcccgacgcgccagcacatccagcccgagcgtcggctcatccagaaatacgagctgcggctgcgagatcagcgccatagcgatggaaagccgccgctgccagccgccggagagcgttttggcccggctgcgctctacctcgcccagatggaactccgcgatcgtctccgccgcgcgctgcgcggcctcccggtgcgatgcgccgtagatcccggcgataagctccagattctcccgcaccgtcaggttcggcgcaacggccgtctcctgcggggagagattgatgcgccgcttgatctcctgcggctgctgcgtcaggcgaaagccgaggatgtccgcctcgccgcccgtcggctgcagcaggcccgagagcatgcgcagcgtcgtcgtcttgcccgctccgttcacgcccagcagggcaaacagctcgccctgccggacggtcaggtccagcccgtccacggccgtgcgcggcccaaagcggcgcgtcagagcatgagtctcaatggcattcatgctttgtcatcctttctcttcggcattgccgccgtaatggctgcaaagatctgcccggcctgcgccttgggcggcagggcgatgccctgctccgtgtcggccagcagcaaaagctggtcgcccggcgcgataccgaacatttcgcgcacctcggccgggatgacgatctgccccttcggcccgaccttcacggtcgtcatgtattttccctccgggaagccgttgtttcccatggtcgttcctccatttccgatttgtataacttgtatcaccagttataccaccaatgggagaaaaaatcaacccgtgcgcggaattttccgcgcacgggctgcaggttagttatgagatctgattcacaatcccgaggaagacgatgctctgcgtctcatggtcgaagatcacaaagaggaacggccgcgtgagggcaatggtcttcggctcctccatatctgccgctgcagtgggcgccatgagcgtgctcgtcacggcggctgcctgcgtcccctgctcgtcgagctgcagccaaaccttgtgctgcacggaatcgatcttcagcggcttctctgcaaggcgggagaaatccgcagcgtcggtaaacgccagctccatgcccatggcgcgcagcggctccttcagctgcatcctgtccgtggcagcgatgagctttgggatcgcgacatggacctcctctgtctgcggctcgccgagggcgtttagcagagcctcgccgtccagcgcctgcagcagctcctccggtgtggtgccctcggcaggcagaaggcccgcaaacacatagcgctcgcccgcatacggccgcacaaagccctccgcgcccgcaagctcgaaatagctctcctccacgctgtgcaggaacggcacgacctgcctgctgccgtcgcttgtgaaaaacgtaccgtcatagacggattccggcgtataggccacgggccattcggcatcgaatgtcagggcgttgaccagacatgcctgactcatcgggtcgtcctgctccaaaatcttttcgatccggcccttcgtgttcttccggacccagtcattcacagcttccatgctgaactcgccctcgtgaagctccgcatcatactgtttccggatcgtcttccggaactccttccggacctccagctcctgccgcgtccagagggaattggccgagacgaccttgccgtcctccgccaagcggcaggcggcaagccagtggttcaggtcgtccgtctttgcgccgagggcatattccatctcctccagcgtgcggccgcccgcgccgtttgcggccatgccgagggccagcagcacggaatatggcgacagaagagtcgttttatccggctttgcagcattccgcagcagcgtgatggagaaatccgccgctacggcggcagtccggcagtccgtttccgtcagcgtcacaggttcgcgcgtgccgcaggccccgagcaggaggactgtaagcagggctcctgccagtaagcttcgcttcattccatttccctccgactcagccgtccacccggttcacaatcccgaggaagacgatgctctgcgtctcatggtcgaagatcacgcagagatacgggcgcgtgagatagaccgtcttgggctcctcggtctggaccgccgttgcctccatcatcggtatgctcgtcacggccgcgccgatcgtgccgctctcatcgacctgcagataggtcttctgctggacggcgtcgatcttcagaggcgtgtcagacagcagcgagaaatccgcagcgtccgtaaaggccgcctgcatgcccatacgctccagcaccggcttgagctctgccgtggtcgcagcggtaaatttcggcatacgcgtgtagaccgttttcgattgcggattacagattgcctgcagcagcgtctcgccgtcaagtgcctccagcagagcctccggggtactgccctcggccgggagcaggcccgcaaaggaatagcggccgccggaatagtgctttacgaagccagttgcgcccgcgacctcgagatagccgcgctcttcgccggacaggtaggtcacggtctgctccgtgccgtcgctcgcgtggaacgtgccctcgctgcagctctgcggctcataggggctggcccactctgcgtcgaatgtcatggcgttgatgagataggtcacgatgctcgggtcgtcctgctccaggagctttttgatgcgcccctttgtgttagaatcgacccattcgttgatggccgcaacactgaggtccccggcatggacctccgcgccgtatttctgctccatggtctgccggaactccggcaggagctgcacggtttcattccgtgtccagatcgaatttgcagagacgacctcgccgtcctccgccgcgcggcaggaagcaagccaggcattcagatcctccagccttgcgccaagcgcgtattccatctcctccagtgttcggccgcctgcaccgtttgcggccatgccgagggccagcagggcggaatacggtgagaggatcgttgtggcatccggctttgctgcgccgcgcagcagatcgagtgcaaaattcgccccacccacagcggcggtctgatccggcacggtcagatcctcgaccggctccggctttcccaacgattcggcagcatccgtcggaacaaccgggtccagccaggcatcagtcggctttgtttcctccgttgcttccgtcggtccggcaggactgccgcaggcgccgagcaccaccgctgccagtagcaggcagataagttgtttcagcttcatgcgtgattcctcctttgcagatgttctgctggttagacgcagcagcgcaccggaagttcccgcaaaaaggaggcagtcgctctccaacaatcattctctaataaagcacctattgcatgccgtcaatgatcgcatgatcatccgcctgcacgctggagaatatcttcaacatctccgattccgggatttctttttcgcacatcagcgtaaacatatactcatgatttgtccagatgtaggttatgacctcattatcggtaattttgatcacctcaaatccatttatgccggttgattccgctgttgctccctccgaattaatgcctccccttgttgcattctcgtagtcctccggcatggggacttgatcaaagcaaatccaccaattgttcgcattgtgccagccgattgacacagctgcaatgctgactgttttgaattcctgctgatatccatccggtatatatgttgggagatacactgtctcgatagaatccggggcagaagccgcctgtattgggtcgaatgaaacctcataatgggtgccctcatcatggaggaagaacttgataattgcttcacggactgccggaatcgccattgcgcttgccgccaatactgccgcaaggattgcaataagggccactcgcttccacactgtattctgatacttccaacctttggatactgtcttcctgttcagcttttctgtctttcggataaagtgatccgacaattgaattgcaattttatcctcacaatctggtacatccgagtactcctccagcgtcgcatcgatcagcgcccgctcaaacggcgtttcagccctgctcttcaaagcacattccctccttccgacaaaaatcaatcaggagttttttcccgcgattgagctgctggcgcactgtccccggcttgcgatgcagtatggccgctgatgcagctacagtctgcccctctacgcagattatcagcaatacctcacgatatggagcgggcagcattctcgcagcacgcagtaatgtgtcatagtcctgagattgcataaccttcacaaacaaatcctcgtcagaggctattggaagctcatcaatgtcaagcatattgtcctgccgtttcttctgcggaagcaacgatagtgcagcgtttttggctgcggtaagtacataagcccgtaaacgcctatcatcaaccggcagggattttatcctttgtgcgatgcccagaaatgcgatctgaacagcatcttccacatcttcatcactgtgcagaatacgcttcgccacaagcagcatctgcttctgatagttgctgtaaatatcggaaaagcgaagctggtcggcttcgctgtcaatcagggcaaaatacagcatcagcaaggaaacgcacctcccaactattcatcatgataccccgcacgccgcacactgtcaagcaacccatctgtccaaaatgtatgtaaaaagcgaaaaagttgtatcatttttgccccagcagctgtcttagaaaatagaggcaatggtaagcgtagcatacaccatacagaaataggaggtgaaataatgaaacgtgtattcagttttctaattgcaattattgttactatttcaatatcatataatgtgcaagcacttcgggcagatagcattcggccacaatacgcaaatgctcgacaggcggaggttcttctttctatcagtagctccggaaaagcagttgttgttgttaagtgttacgggacaaacggattaaaatcagcgtatgtgacaacgtatcttgaaaaaaaggtcagcggtacgtggattcgggtgaatattccagcaccaaataatacttggacatattctactacgagccaatcttttagtcaagaatacattgtcgcgcttgataatgtggggcaatatcgggcaacgtcgcaatttgtattaaccgcagctacggttgaatacataaccgacaccagctatgcaatatacaaaagttgatttttataactgattcatcgaaatatccagtacgtttactgaggttctaaaagtgctaacgcatagccattgcttggttcagtgctgattgatttaatttaccatcataaagacgtacatacattaatttgagcacatttgctcataacgataagattctgaaaggagaaagtgtcatgaaaaaaatcaaaaaagtggttgccctcttgtccattgtttctctgctcattgcaacagcattttctgcttccgctgttgaagcaaatgcctcttatgacccggagacaaaccatgcgactgtgcttcataacgaaaatcaagttatacctgttgcaggcacgacacaactctcacaagatgagtacaaacgcacttgggcaagtctgactgataacgcgggaacagctgccgaaatacaggcgacctgtgagctttttatttcttcaatctatgccagcagacgagatagtgattacaactgcactacgtttactgttcagtctattcggaatgagcaggttgacagcacgatcgcatatatcgaaagccagaatcaataccagcgtgaaattgctgatatttgcgattttaagatcatttctgatagtattgaatttgaaaatttctcgggcgtattaactgggaatacttgcaccgcggaaataggcgttcattattgttatgaaatggaaggtgctttcgaggatacattttatctaaactgtgtttattatctgacactggaaaaaatcaacggaaactggggcatcgtcacagcaaagacaagtatgccgaatgaacaagcagacgggtttgtttatgactcattcgatgcccacgcagccgctttggccgttgtcggtgaccatgatttttcgacaatggaaaagcccgccaacacgaataacacagctacaaccacagcaacataccaaacaacatcatatagctcgacggcggcagtaaattacgccaagcaatattacaataaaactaatagtttatttggtgcaagcagttctaattgccaaaatttcgcgtcgcaatgtgtttgggccggacttctatctggatgtggcgcttcaggtacttcgacaactgcattccccgctgtttctacagcttggacaggcactaattctacaaatgtctggtgcagaaatcaatacactacctactatggtgataaatattggttaaattggggatggaataatgtaaacggcttcctcaaaatcatctggctcagtgatcatactatatccggtccacaaggctattattggctgggcttagccaaagcgtgtgttggcgatgtaattatctgggacacagctggcacgcgaagtgtagacagtggaacctatgatcacgcaatggtagttacacgaacaacaggaacagttggttcacgcggcgtgagtaatttttgcatagcagcaaattcgagttcgacgacatctgcctatatgcctcttgcgcagtattgcagctattctgcaagttgctttgcaactgctcatattactggcggctactactacatttgatgaaggcaggatttcgcaaacgcattattgcactgctttttccatgtgcatgctgtactattttgtcaatatatctctccgcctgctgttcagatatacttcacgacattgagggaaatataccaaccatcgaacaggagagcattccaccccgtaccgcacccacggaggccacagaggcaggaaacgttccctcccagccacagaataccgagaacagcacccatatgccggaggcgccatcggtcattgccacggagcctgagcgcacatacgccgtttgggacgaatccttctatcaaaacggtgtaccaatttcgccgcagccgggagacacgcaggctacatggcagcctgaactggcagaaacatttcccgctgatcagaattgcaatgagatggagctgttggaaaaatggatggcagttgaggggcttacgccggaaggccttgactctcgcgagtgtaaccaactggtgctggtcgtagcacaggagacggatggcattcagacggaaaccgtgtgttatcagcgggaggcgggcggagcctggcagcctgtatccggtctgagcaggatgcatggctgggttggaggtaacggcattatgcacggacgcaaacgcgggagcaacacatctcctgcgggactctggtcgctgggtttggctttcggaaattctccaaagccagatggactgaagatgccatggcgagacgttacgccaagctcagattgggtatgtgacgaagattccatttactttaattcgtggcaggaacgcgacgacccgtccatcctcgatctgtggagcgatgatgttgagcatctggaagactatcagagcgcctatgcatatgcttgcgtcatccgttttaacactgctccctataccattccggaacgcggctgtgcaatattctttcattgcagcaagggtgcaacgggaggctgcatcgggcttcccgaagccgatatggtaaacacactcttgtggctagacccgcaggaaaacccgtacattctgataacgggctatcagcgcagtgcaggaaactgaatcgtctgcttgctaaactgtctgaaagctctcttacagaaaaaccgccccggggcaccttccttacggagggtgccccaaagcggccccctgtcgtattcaagttctccgtaagaatatctccccgcacttgcggcagacgatcttcgtctggccgcagcctgccgggacgatctgcacggctctgcaggccgggcagcggaagaagcgcctcctgcggccgcggtgcagcgcctgccgcggggcatgtgccgcaaaaaacgagaggatcggcgcattcatgcctgcttccgcgcgccgtctgcgcgcgcctcccgcagaatgccgccgtagcggatggcatacttcacaaacgccagcaggatcaggcaggcgcagagtgcggcatccgcatacaggaaccagtccggcgccgtccgccagagcatcaggacgaacatggaaaggtagatcacggccgtgcacagcttgccgtaccagcccgcgccgtagaccatgccggtgtggtgcagggtcaggagcgtcatgatgccgatggagacctctttcaaaaccagaatgccgacgacccaccagcacttcatgggcataaggcacagcagcacggcgatctgcgtcagcttgtcggcaacggggtcgatggccttgccgaaattcgagaccatgtgatacgtccgcgcgacccagccgtccacgacatccgtcacgccggacagcacgagcatgccgaacgcccaccagacctcattctttgcatacagtacgatgatcacgggaatgagcgccagccggaaaaagctcagcacattggggatcgtcaggatccggtccgtatccgcctttcccgcgcgctccagattgcggtgctccttatcattcatgctgcacatcctcctctttttcgtccacctgcgggacgaacaactgcgtcacaacggactttttgcggtgcttctgatggaaatagccgatgacgctgaacacgaccgcgccgatgaggttgacgatcaggtcgcccatggtgtcatacaggccgatgtccagataaccgccgaggccgaggctctcgccgttcacaacgacatcctgaatgttcgagatcgtgatgggaatgttgcggttcgtcgggtcgagcgccacggaggtgatctgctggatgactgtgtccttctgcatatccttgtggaacaggttatccacggagaattcaaaaatttcccacaatgcgccgatcgtcatggagaaacagaacgccacgagcgccagaaacagcggtgaaagctcgaagctgaccttcttgtggcggttcagaacgtccgccatggaatagccgaccgccgcatagataaagccgctcgtcgtatgcagggccttatcccagaacgggaccgtcacataaaagcaggcgatttcaccgaggatctccgctgcaaagatgaagacgacaaccgtgatctccaaaccggccgggaggcgtacccccagcttccgctccagaatggagggcaggagcagcagcacgagcgtcaggaggcaggtgtagacgctttcgatctggccgttgaaggccgagcggacgagcacgccgaccacgatgagccggatcacggcatagacgatgagcgtcagcttgctcttcttctgcaggcgcagcttttcctggcgcagccgcgcctcgcggcgttcctgccgcgacattttatttttcaattccgttcccgtccttttcatgtttctaccgatatcatatcccggaattatcaattctgcgtcaaccgattatgaatttcagttcataaaccggaaattttccgttccaaaatccggccgtctgtggtatactgagaagacggaaacggagggatccccatgttcaagattctcgttgccgaggacgacgccgagctgcggcagctgttctgccgcgtactgacgcgccacggcttccagcccatcggcgcagccgacggtgtggaggcgctgcaggtcctcgagcgcgactatatcgacctcatcgtctcggacatcatgatgccgcagctggacggctatgcactggtgcgcggcctgcgcgacagcggcagcaccatccccgtgctgatgatcacggcgcgcgacggctttcaggacatgcagttcggctttctggcaggggcggacgactatctggtcaagcccatcaacgtcaacgagctcgtgctgcgcatcaacgccctgctgcggcgcgcgcagatggtcgcggaccggcggcagacgcttggcacaacgacattcgaattcgactcgttctccgttctgacgggcggcgtgcagaccgtcctgccgcagaaggaatttttgctgctatacaagctcgtctcctcgccggggcacatcttcacgcggcagcagctcatggacgacatctggggcatcgacacccacacggacccccgcacggtggacgtgcacatcaaccggctgcgcgaccgcttccgggagaatcaggactttgagatcataaccgttcgcggcatcggttataaggcggagcggaagcatgaagaaggataaacgattttccctgcgtctgcggacgtattacctgctcatcatcgccatcgtcgtcatcatctcgttcggtgccgttgtcggcgcgctgacggccctgcagcagctcggcgtcatcggccacatcaacgtctccacgctcgtggccctgctgctcgtggcggccgccgcaagcggcagcgccagctttctcgtcgggcggcgcgtgctggccccgatggtcaagctgagcaaggcctcgcgcgaggtcgcgcgcggcaactacagcatcacggtcgaagacccgagtaagcttgaagaggtgcagacgaccctgcggaacttcaacgcactcgtgcgcgagatgaaccggatcaacaacgtcacaaacgactttgtctccagcgtctcacacgaattcaagacgccgctgaccgccatcgagggctatgccatgctcctgcaggacaccggcctgacgcaggcggagcgcgacgaatatctggacaagatcctctataacacacaccgcctctccacgctcgtcggcaacatcctcatgctctcaaagctcgagaatcagtcgctttccgaccagcgcagcacgttccgcctcgatgagcagctgcggcaggccgttgtgatgctcgagccgcagtgggaggaaaagtcgctgagctttcgtgccgagctggacgccgtgagcgtgacggcctgcgagccgctgctgctgcaggtctggacgaacctcatcggcaacgccatcaaattcagcgagccggggcaggagctgtccctgcgcctgctcgaccagacggaatgcgccgtcgtctccgtcacggaccacggctgcggcatgacgcccgaggtgcaggcgcgcattttcgagaaattctatcagggcgacagctcccgcaaggctatgggcaacggcctcggcctgccgctcgttaagcgcatcgtcgagctgtccgacggtgtcatcgaggtcgacagcgcccccgggcagggctcgacgttccgcgtcatcctgccgaaaaagtaaaacagacgctgcaggtttttatcgctgcagcgtctcagcgtgtcgaaaaactcttttcgacacgctggaagactgcgaaaaagttcggaaggcaagcaactcgcacccgtcggcgtacaaaggtacggtagggtgcgagttgcgcagtaagtcaaaatccatgtaaatcaagagatttttcgctaaaaagtttgaaaatcctaaataatacggaaagtccaaaaccaacgaatatctctaaaatgttttccggattttgacggttacggactttttcgacggtctcagacgctgcagccacgaaaaagctgcagcgtctttggttttatttctccggctttttgccggtatagagctggtaatagcggcccttctgggcaatgaggtcgtcgtgcgtgccgcgctcgatgatgcggccctgctcaaggaccatgatgcagtccgcgttgcgcaccgtcgaaagccggtgggcgatgacgaacgtcgtgcggcccttcatcaggccgtccataccggcctgcacgagcgcctccgtgcgcgtgtcgatggaggacgtcgcctcgtcaaggatcagcactggcgggtctgccacggcggcgcgcgcaatggcaagcagctggcgctggccctggctgaggttcgcgccgtcgctcgtcagcatggtgtcatagccgttcggcaggcgctcgatgaagccgtccgcattggccagcttcgccgcagcgatgcattcctcgtccgtagcatccagacggccgtagcggatgttctccatgaccgtgccggtgaacaggtgcgtatcctgcaggaccatgccgaggctgcggcgcaggtcgtccttgcgaattttgttgatattgatgccgtcatagcggatcttgccgtccgcaatgtcatagaagcggttgatgaggttcgtgatcgtcgtcttgcctgcgcccgtcgagccgacaaaggcgatcttctggcccggcgtcgcatagagatcgatgttgtgcagaacgatcttctctggcgtatagccgaagtccacatcgtggaacaccacgtcgcccgcgagctttgtataggtcacggtgccgtccgcctgatgcggatgcttccacgcccacacgccggtgcgcttctcgctctcggtcagcgtgccgtccggatgctcgaccgcgttgacaagggtcacatagccctcatccgtctcggacttctcatcgagcagccggaacacgcgctccgcaccggccatggccataacgacggagttcagctgctggctgacctgcgtgatgggctggttgaagctgcggttgagcgtcatgaacgccgcgagcgtgccgagcgtcaggccgacatagccatgcagcgccagcgccgcgcccgccacgacgcacagcacgtagctgacgttgccgagctgggcgttgaccggcatgaggacgtttgcatagctgttggcgcggcaggagctgtcacgcagctgctcgttgagctcgttgaagcgctcgatggcggcctgctcgtggttgaagaccttcacgaccttctggccctgcatcatttcctcgatgtagccgttgaccttgccgaggttctgctgctgccggacgaagaacttgcctgacttcccggcgatcttcttcgtggcgaacagcatcagagccaccatgacgagcgtcagcagcgtcagcggcacattgagcacgatcatgctgacgaacacgctcacgatgctgatgatgctggaaaacagctgcggcagactctggccgatgaactggcggagcgtgtcgatatcgttcgtatagacggacatgatatcgccgtgggaatgcgtgtcgaaatacgagataggcaggctctccatatggccgaagagcttttcgcggaagttgcgcatcgtgccctgcgagacattgaccatcaggcgggtatagccccacgagcacagcacgccgatggcgtagaccgcgccgacctggatgagcttgtgcagcaggggcgtgaagtccgtgctgccgctctccagcatgggggaaagatagctgtcatagagcttctgcaggaacagcgtgccattcagctgggccagcaccgtcaggacgatgcagatcacgacggcaaggcagtgccacttatagtgcttcaggatgaaggccatggtgcggcgcatggtcttgccggtatacttcggccgttccgtggcgtgcatcgcgcgcccgccggggccgcgcatcggtttcgtcgccatattatgcaccctccttctcgtcgaagtcgccgccgccctgcgtctggccctgatagacctcctgatagatgcggttcgaggcaagcagctgctcatgcgtgccgaagccgttgacgcggccctcgtccagaacaaggatgcggtcggcgtcctgcacgctggaaatgcgctgggcaatgatgatcttcgtcgtattcgggatctcctcgcgcagggccttgcggatgcgcgcgtccgtcgcggtatcgacggcgctcgtcgaatcgtcgaggatgaggatcttcggctttttcagcagggcgcgggcaatgcacaggcgctgcttctgcccgccggagacattcgtgccgccctgctcgatgtaggtctcatagccctgcggcatggcttgaatgaaatcgtccgcacaggcaagacggcagacacgctcgcactcctcctgcgtggcctctgcgttgccccagcggaggttttccagaatcgtgccggagaacagcacgtttttctgcagcacgaccgcgacctcgtcacgcagcgtcgtcaggtcatattcacgcacatcgtgcccgccgacgcgaacactgccctccgatacatcgtacaggcgggagatcaggttgacgaggctcgacttcgcgctgcccgtaccgccgaggatgccgatggtctgcccggcctcgatgtgcaggtcgatgtcctgcaggacgggcttgcccttgccctgccggtaggagaagctgacgtggtcaaaatccacgctgccgtccggaacggccgtgagcgcctgcgccgggctggtgaggtcggccttttcgttcagcacctcgcagatgcggcgggcgcttgccacgctcatgctcatcatgacaaagatcatggagatcatcatcaggctcatgaggatgctcatgacatagctgaacaggctcatcaggccgccctccgtgaagccttcaagcacgatggcctttgcgccgagccacgacaggcccagcatgctgccgaacaccgtcagcatcatcacggggttgttgaacgacacgtaggtctccgcctttacgaacatgcggtagacggcgttggccgctttgttgaacttgctgcgctcataatcctcgcgcacgaaggccttgacgacgcggatggcaccgacgttctcctgcacgctggcgttcagatcgtcgtacttcttaaacacgcggttgaacgtgcccgtcgccttgaagatgatgaacgacagcgcagccgccagaatcacgatggccgcaacgaagatcatgctcaggctggcgtgaatggaaaatgccatgatgagcgccgtgatgagcatgacaggcgcgcgcacacagatacgcgtgatcatctgataggagagctgcacgttgctgacgtccgtcgtcaggcgcgtaacaaggcccgccgtggagaagcggtcgatgttcgagaacgaaaagctctggatgttggcaaacatggcctgccgcagattcgccgcgaagcccgtcgaagcgatcgatgcgaagcggccagccagaatgccgcagacaagcgcaccgatggcaacggccaccatgattgcgccgtagtgcagtacagcctgcatacctgcctgcccgccgaccttgacgcccttgtcgataatctgggacatcagcatcggcaggaacatatcggccacggcctccagcgcagaaaaaacgggcgtgatgaacgtgacccagcgatactgcttcacctgcgcccccaaggctttcagcatggtattcctccttgcttcaaattgttagcatgctaattatatggcgatatcactaaattgtcaatggattttttgttaattctgtcattccacggttgacggagccgcgatccggcggtataataagatttataaattccaaaagcagaaacggaggcggagcatccatgcagcagatggagcagcccatcggcggtgtcgtaaaatgtctgtccaatcagatccgccgccatctggacgcagcggcatcggaggccgggcttgtagagctgaccggcacacagggcatgatcctgcactatctgctgcgcaacgagggccgttgcctgacgcagcgcgacgtggagcagcgcttccagctgcgcggtgcaacgctcagccgcctgtttcagcgcatggaggccgcaggcctgctcgagcgccgcgcagtctcccgcgatcagcgctgcaagcagctgcttccaaccgaaaaagcacgcgccatgcatgcacagtttgttacctgtctggatgaaacggaccgcctgcttctgcagggaatccggccggaggacgaggctgttttccgcagcgtgtgcctgcagatgctgaacaacctcacgcagcaggatgcagcaggcccggccgctcactgagagcagccgggcttttttgacaagctgagccaagggactgcagctgcaccatatggatcagaaatggagcgtatctgcaccgatacgctccattcactatcttatactagaatctaataaaaagctttaaaagctttttatagcgccgagggcgcgtcagattctgcatgagacggcgcagcgtgcgtcagcacgatgcgag

SEQ ID NO: 11143 - DNA, 1273 bp, Unknown
  gut microbiota DNA sequence
atacagttgcccgatactgacggttgttagccggatgcgccccaatttccgcaacgtcgcccgggacgttataaagaattactcgattattgtagtggaagaagaccagacaggcagctgctgcaaggagaaggaaaaggaaggagcgcaagtttttgcttcttgttttcttcatgttgctctgcaccccttctctacaaactgaacatcgctacaaaaattaatttccacggcgttttttctttttgcgaaggtatcatagcaactcttcttaccgcttcattaggaacggctccattaataagtccatggatcgcgcctgttttcggccacaaacctgtgtagccaatccgtttcggaattgtctcctcgcccaaaaggaaaatcataggaaagaaaaatctggtttgctgcaaatgtatcacctgcctgttcgtttttggtgtacctgctaaagatgaaggtttcgcctttagcaggtttgccgttctgactagcaccgaggtgtcattttaatgtagaaagccgaataaggctatttcctgccattgctatggactgcttagaaatgacttttacaagcatctcaaaaattatggacattattttagttgccaatgaaataatgcgccaaagctttgaaagcactcttcgcagatccaactattgcttttctcttcataatagccgaaatgcagatcctcggaacgcttgctgaattttgcccaacaaatctcgcagtggacatggtccgttttctccgcgtcaaattgccgcggggaaagcgttgcattgtgcagatagtccttcgttctaacagcccagtcataccagttttcttgcatagttatactccaatcattggtactcattattttacaaaatcaattctgttatccgggaaaacacgccacttgtgaccgtgtccatcgcagcccagcttttccggaacgctcgggtaatcgctgtccttgagtatgtagccgctgtagacctgcatggtcttgaccgtgaagccatccgccacgaaggtgaccgtgtaatatgtcgtgatcttcgtgcaggtcgcgctaaccgtcacattgctttggacgggcgagggatatcgctgccacgcgccggtatacccggccttttccgtgcccgcgccggtctgcgtggcggcggtgacgttgccgtcggcgttgtaggagtaggtctgcaccggctcctgccgcagggagaggttgtcgaaccgggccgtgccggaattgtggtcgaacgcgcagtagac

SEQ ID NO: 11144 - DNA, 8522 bp, Unknown
  gut microbiota DNA sequence
cccctacaatggcgtgtgcggccgcgtatcccacaaaaccaacccaccaaaggagtttcattcaccatgctgatcgatttttcaaagatcgaagaagttcgcgttcccaatttcaagggcggcgagaaggagctgctgaagaaggcctatgccgacggcctgaactgcatcatgctcgaccgcctcatgcccggtgcttccatcggcaggcacacccacgagacgaacagcgagatcatgtacatcgtctccggcacggccacgttcaccgtcggcgacaccgtcgagaccgtgcaggccgggcagtgccactattgcccgaagggcggcacgcatatgcttcagaaccgcggcgaggagccgctcgtgttcttcgctgtcgttacggaacagtaagggcagcaccgcatcattgcagctttggccttcgccggatatttttcgccgaatgctttcacggaatgatgcggtcctgcttaaccgcgcggcgtgcctccgctgcgcaagaccccgcgcgggggaccggcctgccggtccccttgccgggcaatatccggagagaagagattggaggatattaggatgagagatccgctgccccgcgtgcagcgcggccttgccgctgccctgcgcgaccgccgcacccagctcagcgccgctgcctttgtgctgacggcgcttgcctgctatctctatgtgctggtcggcaacatcaataactacgacaacatcgtctgcacaccggagggctacggaacgggcctgcgttccggccgctggatgctgacgcttctgggtgataccgtcgggcacgccatgggcaacttcaacctgcccctgttcaacggcctgctcggcctcgtctttcttggccttgcctgccagttcctctggcgcgcgctgcatttgcagaagccgtggcagtgcgccgtgctcacggccatcacggcggcatggcccgccgcggcctcggccatgctgttttccttcaccgtacactattacctcttcgccgtcctgctggcggccgtggccgtctggatgacggaccggagcggctggggctggttcgtcggcgcggtgctgacgctcgcctgctccatcggtgtttatcaggcctatttcccccttgccgccgccctgcttgtgctgcgcctgctgcagcagtgcctcgacagcgagactccgtggaagaccgtcgccctgcgcgcgctgcgctttgtcggggtgctcgcggcggcaatggtcgtgtatttcctgctgctgcatctgtgcctgcgcctctatcacgagacgctcacggcctatcgcggcatcaacaacatgggcaagctgaattttgccgagctgccgcagatgctcgtgcgctgcgtgcgctgcttctacctgctgccgaagaccggctatgccttcctgacgaattcgcggctcatccgctgggccatgtgggcctccctgctgctgtccgccgtcagccttgcgctggcatggcgggaccgcgactggaagaagatcgtcacggtcgtgctcctgctggctgccctgcccattgcggcaaacggcattttcatcatggccccggaaacggcgacacatacgctcatgacctacggcgtcgtcacgctgttctacctgccgctcatcgtgggcgacggcctgcgctggaggcgcgacgccgtgcgccggtgggtcagcctgctgacctgcctgtgtcttgccggtgcgtcggcagggtatgcatggttctgcaacggctgctaccgcacgaattactattccaatgagatcatggcgagctattacacctccatgctcacgcgcgcgcgctcgatggagggctacacgcctgatctcgagatcgtctttgtcggtcagtatgtggaggacccgacactgtgcgacctgtggagcggcacgccgttcatcatgggcggccgcagcacagcctccgtccagatcaacgaatacggccgcctgcgcatgatcgtgatgtccaccggcatgggaacgcgctacgccacagacgacgagctggcgcagtacgcagacagcattgccgctgccccgaactaccccgccgacggctgcatgtggatcgaggacggcaagctgttcatccgtctctgcgacccgagcacggtatattattaacagactgtcaaaaaagctctggagggcttttttgacaagctgattatgaagccccggcgttgtttcccggttgacagccgccctgtccgatgctataatcagaatcgatataacagtaccgatattgacgccccggctgcaccttgtaggggaggggacagccaggcccggcgctgcacggacggttggcacagtgtatcgttaaaatggtgacagcccccgacttgtcattgcgaggaggccgtaggccgacgtggcaatctcgggaaggcagtgcagctcgtacaagctgtcgttaaaatggtgtgcaccgattgcgtctgtagcggcgctcactgagcgccttgtacagggcaattcaaccgcgtcagggcgctggtgcatcgccgcaccaccctgacgtgtcattgcgaggagcgaagcgacgtggcaatctcgcagtacccggcagcatcgtgggaaagcaatcggcgaaaccgtaactgccttcccgagattgcaccccaagggcacttcctcgcgctgcgcgctcagggcgccacggccccttctgggcctcgcaatgacaaatccggaaatctgtgcattcgacgatgccaccctataacttgccagcctgcaaggcgctcactacccgcaaggggcacgccgcatccgtaaggcggcaaagccgccaacggctgcgcagggaacgccgctacagtcaaatctggcggcgtatacggtcggcgatgcctttcccattccggcagtgccttcccgagattgccacggccccttctgggcctcgcaatgacaacacggctggcggcctcgctcaacttttccatttgcctctccctgcataatctgaaccctcccgccccggcggaatatagaatttaggagaatcaccgatcatgtttgaactgaccttccaatttgaaaacgatgaaaagcccgtcgtgatctcggtctccccggaggagagcgtgctcgacgccgcgcgcaaggccaacgtcgccatcgatgcgccgtgctccggcaacggctcgtgcggcaagtgccgcgtgaagctcgtctccggcgagctgaccggcccgcagacgtcccatatctccgacgaggagtatgcagacggctggcgcctttcgtgctgcatgcacgcggcgtccgacgccgtggtgctcgtgccggacatcgcctcggcctaccgcagccgcatgaagacggccgacctgtccagcggcgaggagatccgtatcttcgaggagctgctcgcgggcgtccagggtgcaggcatcagcctcggcaacggcttccgcgccgtcgaccttcagctcgatgagccgacgctcgacgacaccatgcccgataacgagcgcctgacccgcgcgctcgaggcgcaggacggcatcgacgccgtccgtctgccgtggtacgccatgcgccgcctgccgaaggccctgcgcgacaacgcctttgccgtgcgcgtcctcggcgagctgcagaacggtattttcaccgttttcgacgtgaccggccagaacgacacgctcccgctgtgcggcgtcggcatcgacatcggcaccacgacggtctccgccgtgctgttcgacatgaaggacggccgcctactgtccaaggcgtccggcggcaacggccagatccgctacggcgcggacgttatcaaccgcatcatcgagcagggcaagcccggcggccgcaaaaagctgcaggacgccatcctcaaggagacgctcgtccccctgctgcagaccctgtgcaaggatgccaagctgccgcctgcgcgcatcgtgcgcctgtgcgtcgcgagcaacacgacgatgaaccacctgttcgtcggcgtggatgccgaccccgtccgcatggagccgtatatccccgccttcttccactgggacggcctgcgcgtgcacgacctcggcctgcccgcccatccggacgccgccatccgccttgcaccgaacatcggctcctatgtcggcggcgatatcaccgccggtacgttcgccagcatgctctgggaccgcgacgagctgtccctgttcatcgacctcggcacgaacggcgagatcgtcttcggcaaccgcgacttcatggtctcgtgcgcctgttcggcaggcccggccttcgagggcggcgacatctcctgcggcatgcgcgcaacggacggcgcgatcgagtcctgcgtcatcgaccccgagacgatggagccgacgttcggcatcatcggcgagccgggccagaagcccgtcggcctctgcggcagcggcatcatcgatacgatcgccgagctgttccacgccgggatcctgaattccaagggcatcttcgtccgcgagggcaagcgcgtcgcccacgaccgccacggctgcggccgctacatcctcgccacgccggaggaatccgccaccggccgcgaggtcgccctgaacgaggtcgacatcgacaacttcatccgcgccaagggcgcgatctactccgccatcgacacgctgcttgctgccatggatatggacgagagcgtcatcgagagcttctatgtcgcaggcggcatcggcagcggcatcaatatgcgcaatgccgtccgcatcggtatgttcccgaacgtcccgctcgagctgttccattacatcggcaactcgtccctcgcaggcgcatataccatggccctgtccgacgaggccaacgaccgcgtcgagcaggtcgcccgcaacatgacctatatggagctgtccacgcacccgggctacatggacgcctttgtcgcggcctgcttcctcccgcacaccgacgctgcgcgcttcgcctcggcggaataaggagccgttatgcagatcgaaaatcacaaggaagaggtcccgtttgcccactattgcgagtgcttcgccgcgctcgacccgcaggaggccgccgcgcgcaccggcacgccgtttgagaacggcgcgttccgcctcacccttctcggccatccctaccgcatcacccacccggagttctccatctccggcgagggcggaacggccctgaagagcctgcccgcgcagacgttcctgatgcgctggctgctggagggaaagcagaccgccggatcacgcgatttcctgaccttccgcgagatgccgtggggcgagctgtatatccagccgttcacgggccgcgtgctgaagcgcgccgcgttcagcttcggcacgcggctggaggccttccgcgccgcctgcaccgccatgggcggcctgcccctgcaggccggcgacgcaggcttcgagttcaccctgctggggaactaccgcctgcgcatgctcctgtgggcgggcgacgacgaattcccgcccagcgcccagctgctctacagcgcgaactttgtcgacggcttcgcggccgaggaccgcgtcgtcgcaggggacctgctgtgcaacgagatcaaggcgaatctgtaaaaaaagcgaaggccagaaatggccttcgttcatttttttgtggcaccacgccgaccgcatatgccactgtaggggagcggcatgccgctcccggcactgcacctgcagaattgacagactatcgttaaaacggtgaacgccccccgaattgtcattgcgaggagggcgcaagcccgacgtggcaatctcgggaaggcagttgcgatttcgccggtaactttcccacgatgcagccgggtactgcgagattgcaccccaagggcacttcctcgcgcttcgcgctcagggcgccacgtcggcctacggcctcctcgcaatgacaagtcggaggtgcgtgcgattttagcgatggccggaacctatcggcagcgcctgcaaggccctctcagtcaccttcggtgacagctctcccaaagggagagccaagggcgcttcgcgccccgcaatgacacgggaggaaggcgcttacaagcttgtcactgcgtccctccggatgcagcaggccgccaagtttgtcattgcgaggctccgcaggagccgtggcaatctcgcggtaccgtccggaacacgggaaagcccccggcaaattcgttgctgccttccggagattgccgcgtcgggcttgcgccctcctcgcaatgacaagtcggaggtgcgtgcgattttagcgatggccggaacgtatcggcagcgcctgcaaggccctctcagtcaccttcggtgacagctctcccaaagggagagccgagggcgcttcgcgccccgcaatgacacggcacggtgcaggacttccgtcaaactcctagctggctgtcccctgagcttacaaaattcagcgttcctctgtcatgcggcggccggacatcggatttcgtgcaaatccgcgaaaaaaaggaaaaattttacgcaaatttttgttgacaagaaccggatatggtgatataatccaaaccgataaaaacatatcgattgtttttatacgataccgcgaactcattccaacggggagcggtatgacaaaactcatcctgccggcgccattccgacggccccgggcaaattttatggaaggagaacatccatcatgagttttaagtctgatatcgaaattgcacaggaaaccaccatgcagcccatcactgaggtcgccaagaccgcgggcatcgacgagaagtatctggagcagtacggcaagtacaaggccaaggtcgactacagcatcctgaaggaagagacccacacccagggcaagctcgtcctcgtcaccgccatcaaccccacccccgcaggcgaaggcaagaccaccacgacggtcggcctggccgacggtatgcgcaagctcggcaagaacgttcttgtcgctctgcgtgagccgtctctcggcccggtcttcggcgtcaagggcggcgcggccggcggcggctatgcgcaggtcgtcccgatggaggatatcaacctccacttcaccggcgacttccacgccatcggcgctgccaacaacctgctggctgccatgctggataaccatatttatcagggcaatcgcctgaacatcgacccgcgccgcatcacctggcgccgctgcgtcgatatgaacgaccgtcagctccgcttcgtcgtcgacggcctcggcggccgcgtcaacggcaccccgcgtgaggacggctacgacatcaccgtcgcctccgagatcatggcagttctctgcctggcctccgacatcacggacctgaaggcccgcctgtcccgcctggtcgtcggctatacttacgacgagaagcccgtcaccgccggtgacctgaacgcccagggcgccatgaccgccctgctgaaggacgctctgaagccgaacctcgtgcagacgctcgagcacactccggccttcgtccacggcggcccgttcgccaacatcgcccatggctgcaactccgtcaccgcgacgaagatcgccatgcacctgtccgactacaccatcaccgaggccggcttcggcgctgacctgggtgctgagaagttcctcgacatcaagtgccgcatggccggcctgaagccgagctgcgtcgtcctcgttgccaccgtccgcgccctgaagtacaacggcggcgtgccgaaggccgagaccggcgtcgagaacctcgaggctctggagaagggcctgcccaacctgctgcagcatgtcgggaacatcaccaaggtctacaagctgccgtgcgttgtggccatcaaccgcttcccgcaggacaccgaggccgagctgaagctcgtcgaggataagtgccgcgagctgggcgtcaacgttgctctgtccgaggtttggggcaagggcggcgaaggcggcatcgcgctggccaacgaggtcatccgtctgtgcgaccagccgaacgacttcacgttctcctatgagctcgacaagcccatcaaggaaaagatccgcgacatcgtcacgaagatctaccatggcgacgacgtggccttcacgccgaacgccgagaagcagatcaaggctctgaccgagctgggctacgacaagatgcccatctgcatggccaagacgcagtattccttctccgacgatcccacgaagctgggcgcgccgaagggcttcaccgtcaccgtgcgcaatgtcaaggtctccgcgggcgcaggcttcctcgttgccctcaccggtgagatcatgaccatgcccggcctgccgaaggtccccgctgccgagcgcatcgacgtggacgagaacggcaagatctccggcctgttctaattaagacaactcacgaaaaatgccataaactccggcggaatccccgccggagtttttcggattccctgcccacggcgcaatgctgacgattcgtatcggctgccgataaaacggtacgcaccgattgcgtctgtagcggcggtcactgaccgccttgtacagggccattt

SEQ ID NO: 11145 - DNA, 8522 bp, Unknown; identical to SEQ ID NO: 11144
  gut microbiota DNA sequence

SEQ ID NO: 11146 - DNA, 34303 bp, Unknown
  gut microbiota DNA sequence
ccacgcggcggcggtgacgatgccgacaaaactgacagcgacgcagctcaagggccgcgaactggataacgaggcggccgagcagaccgcacaggcgccgaagcttcatttcccggtcccgcgcttcgaagaggggagaagggcattgacagcggcggagcgcggcacggcgctgcaccttgccatgcagcacctgaactatgccgcctgcgcagacgagtcagggcttcgttcggaactggagcggctcggacggcaaaaattcctgacgccgcagcagcttgaggctgtcgacccggaacggctgcgccgcttctttgcctctccgctggggctgcgtgtgctgcaggccccacaggttgtgcgggagttcaaattctctgtgctggatgacggcgcgtattatgatccggagctggcaggggaggaaatcctgctgcagggcgttacggactgctgccttgtcgagctggacggccttgtgatcctcgatttcaagagcgaccgcctgcgccccggtgcggagcgtgagcgcgcggaatactatcgcggtcagcttgatgcctacagccgcgcgctgtcgcgtatttttgagctgccggtgtcggagcgcattgtgtatttctttgcaacggacaccgccgtcagcctatgaaggcaacaccgcacaattgcagtttcggcctttgccggttttttgctgaatgctttcactgaattatgcggtgctgcctaaaaaagctccggccctgcatggcgttcgatccatgcagggccggggaattattctgatattacgcctttaccgcgcggacaaaggctgcggggtcggcggccttgaaataggcgctgcccgcgacgaggacgttcgcgccgttatcgcggcagatctttgccgtctccacattgacgccgccgtcaacctccagctcgcaggctgggttctgctcgtcgatccactggcggatctgatgcagcttcggcatggtactgtgcaggaacgactgtccgccaaagcccggctcgactgtcatcacaaggatgagatcgcacagcggcaggaacggcagcacggcctctgcaggggtgttcggcttgacggaaatggcagcgcgcacaccgttttcccggatgcggcgcagggcctcgagcgtgttttcctgcgtgtcggcctcaacatggagcgtgaggatgctgcttccggccttgcagaacgtgtcaacatagcggatgggccgctcgatcatcagatggacatccagcggcaggggggcgatgcgcgaaatggcagcgacgaccgggatgccgatggtgatattcggaacaaacatgccgtccatgacgtcgacgtggacataatcggctcctgcggcgggcagagagcggatatctcgctccagattgacaaaatccgcggacaaaatggacggtgcgaccttgatcatagtgtaaataacctccttgcagttcttcctgaacctctgctcttcattatagcggattttccggggctgtcaatttgaaaatggatggaatttccatgatttttcccggcggagcggcgcaaactaggctcgaaatcaagcaaaggaggaaccgttcatgagctgtgattgccatgccaaccattgcatccagtgctccgttacccagtgccggaaccactgcagcgacgaaaactactgctcgctcgagcgcatccaagtcggcacccacgagtccgatcccacgatgaagcagtgcacggactgcatgtccttcgttcgcaagtgatccttctgcaagcccgctgcccggcaaaccggacggcgggtctttttttctgcgtggcggcataggctggaacagaacaatgggagaggggatcgccatgggtggaaaacagggaaggaaaaaacggaattggctgccgctgcagctggcggcggccatgccgctggcaacgctggcgctggccgcattggctgcgcgcctgatcctgggcgggaagctgccggaaagcagtctgacggttgccgcgggcgtgatcgcggggctggtcgcctttctcggtgcgctgatcgcagccctgcacagcggacggcggaagctgctttgcgggcttggggcggcaggcggctatgcgctgtttttgctgctggggaacctgctgttcttcggcgtacattacggggaagcactgccggtcctgctgccactggccggtgcggggctgctcggcgctctgctcggggccgggcgccggaaaaagcgccgctatgcataaatcgaaaacggataaatgcaggagaacttgcaaatatgcaaaacacagcatgtggtgaatatgcagataatgaatacaacatctggtggaatatgcagatgagccgctgaattacgatgtctccgttgcattggttaacataatattgttaacataattcttgagcataatatacaaagttttcctctctgggccggaaaggattgaaatccgggaaaatatgcgttatcatattctacactgccagaaatgtttgcagaacgctccggttgcctcctgtatgcgccgggccgctgcggcatagttttttgctggcgagagggaacgcaagatggggaagctcgtggctgcatatgaatcctaccttatgaatatcaggcacgcatcggacaatacggtcgcttcctatctgcgcgatgtgcggcaattcaccacctatctggagcagacggacggccctgcgctggaggcgtgcacgcaggagacggtctgtgcctatgtgcgccatttgacgagtatcggcaagtcgcccgcaacggtctcccggtgtgtggcatcgctcaagagcttctatggctactgcgtctccaccggcgcggtcgcgcagtctcctgtgcacgatatcccgcagcagaaggcggaaaagcgccttcctcagattttgaccggccgcgaggtcgagctgctgctcgagcagccgaagtgcacggatatgaagggctatcgcgacaaggccatgctcgagacgctctatgccaccggcatgcgcgtcagcgagatgatcgcgctgaatgtttcggacgtcagtctggcgggcggctttgtccgctgcatcgggaatgggaagtcccgcatcataccgatctacccggcggccatccgagccctgatggcctatgtgacggacatccgaccgaatatgatcgccgagccggacgagcaggccctgttcgtcaacctgaacggcggccgcatttccagacagggcttttggaagatcatcaagcactatcagcagaccgcgcagatcgacaaggagatcacgccgcatacgctgcgccacagctttgcggcccatctgctcgaaaacggcgcggacctgcattccctgcaggagatgctcggccacagcgatatctcctccacgcaggtctatgcgcaggtcgtgaaaaagacgctcaagagcgtctatgaaaaataccacccgcgcgcttaaagaaaaagcttcggagctggtgaagtgatatgctccctctatgagacgatgaaagacaccgtcacatagggggagcattttcatgccgcgcaggaagcagtcccggtgctgcgcggggatactcttatgagaggagcccatacccccgcagcactgcccgcaggtggctgcggtgcggctcctccagtggtgacagcggcaggcggagcgtcccgccgcacaggccgagatcctccatggcagctttgaccgggatggggttcacgacgcagaacagcgcctcgcacagcggcagaagctccaactggcggcgcgcgccttcgcggaaatctccggcaaggcaggcatccgtcatggcaacgacggcctccggcgcgacgttcgacaccacggagatcacgccgctgccgccgagcgccatgatcgcggccgtctggtcgtcgttgccgctccaaaccggtagaccgcaccggcccagcagctgtgcggctcggctgatgctgccgcaggcttccttgatgcctgcaatatgcggatggcgggcgagcgcccgcaccgtctccggcaggaggtcgacgccggtgcgcgacggaacattatagagcacgagcggcaggggagacgcgtccgcgatcgcggtatagtgcgcaagcaggcctgcctgtgtccctttattatagtagggcgtgacggccagcagcgcatccgcgccgttctgtgccgcaagctctgcattttctactgagcctgccgtgcagttcgtcccgacgcccatgataacgggacaatggccgcaggcagcctgctttgcgcggcgcaggagtgtcagcctctcgtcctgcgtcagggccgcagcctcgccggtcgtgccgcagacaacgagcgccgcgatcccggcatccagctgccgctcaagcaggcggtcccatgccggaagatcgatgctcccgtccggccggaacggggtgaggagcgccgtggcggcgccccgaaagatcggcagcattccgatcacctccgcgtcatcctatgccgcaccgcctgcaggggtgaaatcccggtcttgcaattttcggggcgcaatggtataatcagacattgaaatacaataggagcaatctgtccatatgtatctgaaacagctagtcattcagggcttcaaatccttcccggacaagacggtcgtgggatttggccatgatatcaccgccatcgtcgggccgaacggcagcggaaaatccaatatctcagatgccatccgctgggtcatgggcgagcagaattcccgctcgctgcgcggccagaagatggaggatgtcattttcggcggcacggagaagcgcgcccccgtcggctttgccgaggcgacgctcgtgctggacaacagcgaccgcgccctgcattatgacgccgacgagctgatggtcacgcgccggtattaccgctccggcgagagcgaatactacattaacaagcagagcgtgcgtctgcgcgatgtcaacgagctgttcatggataccggtctcggccgcgacggctattccaacatcagccagggacgcatcgacgaaattctgtccctcaagagcacggaccgccgcgaaattttcgaggaggccgccggtatctcgaaataccgccaccgcaaggaggaaacggagcgccgcctcgccacgacgcaggacaatctgacccgcatcggcgacaaaatctcggagctggagctgcaggtcggtccgctgcgcgatcaggcggaaaaggcaaagcgctacctgacctaccgtgaggagctcaagggccttgaggtcgcgctgtggctgcagtcgctcgagcgcctgagcgccacggcgcgcaaggccgaggaggactatcattccgccgccttcatcctgcagcaggagcacgacgcgctggacaagctctatgtcacctcggaatccctgacgttcgacctccacaaccgcgacctgcagacggatcagatccgtgatgcgatccggcaggcggaggccgcctcgcaggagcagcgcagccggatcgccgtgctggagacgaatcgcggcaacgcgcagagcaacctgaagcgcgtgcagcacgagctggaggatcaggacagccgcagcggcagcatctccgcgcagatcgaagcactggagcagcgcatgggcgagatcgacacgcagaccgccgcgctggccgaaaagcagaagcaggccgaggaggagggccgcagactggcggactccgccgacggcatgacaaagcgctatctcaccctgcgcgatctgcagggccggaagcgcgaggagctctccgcccgcggcgcggacctgaccgccgtggaagagagtcttgcccagagcacggagcggcagacccagctggcacaggatctgcaggcggcgcagagccgctgcgctgaggcacagcgcgcgctcgagaccgcacagaagcagctctccaaagcgcaggccgatatcacggccgcgcagaaccgcatcaacggctaccgtttgcgcagccgcacccgagcggagcggagcgaggccctgcagaagcaggccacggacgccggtgtccggctcgacacggtcagctcccgtctgaagctctttcaggagatggagcgtgagctggagggctattcccgcgctgtccgcaccgtcatgcaggagagccgacgcggcaagctccgcggcatccatggcgcggtgtccatgctgctgcgcacacaggacagctacaccgttgccatcgaggtcgcgctcggcagcgccatgcagaatatcgtcgtggaggacgagggctgcgccaaggctgccatccaatatctgaaacgctcggacaacggccgcgccacattcctgccgctgtctgtcatccacggccggccgctgaacgagagcggcatcgagcgctgcgccggcttctgcggcgtagcctccgaccttgtctcgtgtgagccgcgctatcgcgagatcatcctgaatctgctcggccgcacggtcgtggcgcaggacctcgacgcggccatttccattgccaacaaattcggccaccgcttccgcatcgtcacactggacgggcaggtcctgaatgcaggcggctccatgacgggcggctccgtctcccgcagtgcgggcatcttgtcgcgcgccaacgagatcgagcgtctgcaggcccagcagaaggaggccgccgccgcgctggacaagctccgcggagagcagaaggaagcgcagcgcctgctggagcaggcgaattatgacctgacgaacgcggagacggacctccgcacggccgaagacgccgctctgcgcctgcagggcgaggaaaagcagcaccacgttcttgtgcaggccctgacggacgcgatcaccggctcgcagcgcgagcaggagctgctcgaaaagcggatcggcgccgacagcggccgccgtgcggcgctgcagaaggccgttgccgacctgcagaaggcactggaggaggctgagcaggagctttccgtcgtttcggacggccagagcgttgcttcggagcagagcagccgcctttcggagcgcctgacggcgctgcgcatggaggcggccagactggaggccgagcgtgccacggcgaagagctccgccgagcagctgcgcgggctggagcatgccatgcgcggcgaccgcgagcagaagctgcagctcatcgaccgctatacgcaggaggccgctgagctggaaaagacgctgcaggccgagcaggacaagctggccgggcaggacgccgcggcgcaggccaggcaggaagagctgcaggccgcgcttgccgagcgtgcgaaggtcgaagcgcgcaaaacggcaacggaaaaggaagtacaggagaaaaaccgcgacatcctgaacatggagcgcgagagcgcccgtctggagtcgcgcaaaaatgccgccgagctggaggaaaagcaaattctcgaccggctgtgggatacctatgagctgacgcgctcgagcgcgcccgccgctgcggcggagctggagagcacggctgccggaacgaagcgcgccgcggagctccgcaagaagatctccggtctcggtacgccgaacctcggcgccatcgacgagtttgcccgcgtgaacgagcggtatgaatacctctgcggccagcgcgacgacgtgctgacgtccaagcgcgacctcgagggcatcatcggcgatatcaccggccagatgaccgatattttcgtcacggaattcggccgcatcaacacctatttcggccagacgttcacggagatgttcggcggcggcaaggcctcgctcgagctggaggaccgctcgcagccgctgacatgcggcattgaaattcgtgtgcagccgcccggcaagcagctcaagaccatcacgctgctgtccggcggtgagaaggcctttgttgccatcgcgctgtattttgccattctgaaggtgcggccgacgccgttctgcatgctcgacgagatcgacgccgcgctggacgaccggaatgtcgaacgcttcgcgggctacctgcgcggcttcagcgggaaaacgcagtttatcgtcatcacgcaccgccgcggtaccatggaggccgccgacgtgctctatggcgtgaccatgcaggagcagggcatttcccgtatcctgcatctggacctgaatcaaatggagcagcagctcggaatttcggaggagatcaagtaaatgggtttttttgaaaaaatcaaaaacggactgaaaaagacgcgcgccgccatggccaacacactcggcggcatcttcgcctcgttcagcggcgcaaacgaagaattttacgaggagcttgaggagagcatgatcctcgccgacatcggcgtggaaacgtcctgcaaggccgtcgagcagctccgcaccgtcgtgaaggagcggaagctccgcacggcggaagaaattcacgatgccctgaaggatatccttgtggacatgctgaacgtcggcgacacgagcctgaagctcggcacgcgcccgtccgtcgtgcttgtcatcggcgtcaacggcgtcggcaagacgacgaccatcggcaagctggcccatcgcctctccggcgagggcaagcgtgtgctgctgtgcgcggcggatacgttccgcgccgcggctgccgatcagctcgaaatttgggccggacgcgccaatgtagacatcgtccgccagcacgagggcgcggaccccgccgccgtggtgttcgacgccatttccgccgccaaggcgcgaggcagcgacgtcatcctgtgcgacacggcaggacgcctgcacaacaaggccaacctgatgaacgagctcggcaaaatttcccgcatcattgaccgcgagctgccgaatgcggataaagaggtcctgctcgtgctcgacggcacgacgggccagaacggcctgctgcaggccaagcagttcaaggagatcgccggtgttacggccatcgccctgacaaagctcgacggcacggccaagggcggcatcgtcatcgccgtggcggacgcgctgcagatccctgtgaagctcatcggtgtcggcgaacagatggacgacctgatgccgtttgagccgcgcgcgttcgtcgacgcgctgatctgaggaggcacgcacatgaaggtcgttatggcaagcaacaacgcccacaagatcgccgagctgcgcgcgatcctgtctgcctacgggctggacgtcgtctcgcagcgcgaggcgggcgtacatgtcgagccggaggagaccggcacaacgtttgaggagaattcccgcatcaaggctgtggctgtgatgcaggcctgcggtctgcccgccgtggcggacgactccggcctgatggtcgacgcgctgaacggggagccgggcgtttattccgcgcgctacggcggaccggactgcatcagcgattccgaccgcatcaactatctgctgaaaaagctcgaaaacgttccggaggggaagcggacggcaaaattcgtcagcgttatcaccctcgtcacgccggacggcaaggagatcgtcgcgcgcggcgagtgtccgggacacatcctgttcgagcgccacggaaacggcggcttcggctatgatccggtgttctttgcggaggatgccgggtgcacgttcgcagaactggccccggagcagaaaaatcaggtatcccaccgcgcccgggcgctgcgtgcctttgtggagaaggcgtttggaacgaaaaaggagaaggaattatgctgaccagcaaacagcgcgccgatctgcgcgcacaggcaaatgatctggacaccaccctgatggtgggcaagggcggcgtgacggagaacgttctgtccgaggccgcccggcagcttgaggcgcgtgaacttgtcaagggccgcgtgctcgaggcggcgctcctgtccgcacgcgaggtctgcgatgcgctgtgcgaagcgctcggtgcagacggcgtgcagtgcgtcggctcgaaattcgtgatctaccgccgctcggagaagaaggcacaggaggccgcacggcaggcgcgcgagctgaaaaagcgcaagtcgaaccccgtccggcgcggggcgcaggagcgccgccggcaggcacgcgaggagcgcgagcgccgcaatgagtatttccggcaggctgccattcaggccgccatcgagcgccggaagagccgcgaggaataacaaaaattatcggaaaggggagcgccgcacatggcaaatatcggtatattcggcgggagcttcaacccgccgcatcgcggccatttgctggctgcagcggagttccggcgcagacttgggctggaccgcgtcattctgatgccggcggcgctgccgccccataaggcgctggccgccggatcgccggacgcccacacgcgtctggagctgacaaggctggctgcgcaggacctcccgtttgcggaggtcagcgatctggagctgcaccgcagcggcgcaagctacacggccgatacactcgaggagctgcaccggcagtatcccaacgaccatctctggttcctgatggggacggacatgcttctgacctttgcgcaatggcatgcgccggagcgcattgcaaagcttgcctcgctggcggtcgcgcaccgcggaagggatgacggcaaaacgcttcgggaagcggcgcagcagctgcgcgaccgcttcggggcggacgtcgtgctggtggaaaatgactttctgccctattcctccaccatcgcccgcgccatgctggccttccgctgcggggaggactatctcgagcctgcggtctatgacgccgtctgcgcacagggactttatcacacgcgcagagacctgcgcgccctgccgctcgatgcgctggcccgcatcgccctgccgctgcacgacccgaagcgcgtgccgcatgtgcttggctgcagtcatacggcggcagagcttgccgcccgcttcggggaggatcccggcccggcccggcgtgccggtctgctgcacgatgtgacaaaggcgcttcccggtccggagcagttgaaattatgcgataaatatggtatgatgttggatacattcgaacgcagtcaccccaagctgctgcacgccaagagcggcgcggcggtcgcgggggcggtgttcggggaatctgcggcggtgcagtcggccatctgttggcacacgaccggcaagccggacatgacgctgctgcagaaggtcttatatcttgccgattacatggagccgaaccgggatttccccggtgtggaacggctccgcgctctggcggagcatgatctggatgaggcggtccttctgggccttgagatgtcgctcgatctgctgacggaaaccggtcagcccattgacgtgaattccagagcggccagagattttttgaaaagcgaaaggacgaagtcggaatgaggaaactattcggcaacagcagccgcggcgcttccggcgggcgctatgtcgccgggaagcaggccgagcgccgcagtgcgccggtgcagcccgatgtgcagcgccccgaggcggatgacgaggagatcccgctcctgcgtgattatgccaaccgcgaggcggcacagcaccgtgcggagacggaagagaatgatatcccgcttctgcagcaatatctgaagcgcccgccgctgtcgcaggtcatgccgcaggagcggcatcaggctccggcgcagccgcagcaaagacctgcgcagcaggcgcgcccggcggcacagcaggcgcagagccggccggccccgcagccggcgcagagcgttcccgcaccccgtgcgccgcgtgccgaagcgccgcggccccgccgggaggaagtcagggacgaggacctgacgcgtgatctgcctcgcacggatgccgaagcgccgcgcagcggcatgaacggcaaaacgcgcggcctgatcctgctgctggcctccatcgcgctgttcctcggctctgtcgccatgtgtctggcgctgctcggccgcacgacggccgtcgctccgtccggcggggataacaagtccggcggcggcacgagcgtccgcgttgagacggacgcacagactggccagagcatcgaaatggatgtgccggatgcctccggccacgaggggatttataatattctgctcatcggcacggacggcgacagcacccgcacagacacgcttctgatcgcgaacctcaatacgaagaagcacaccgtcagtctgatgagcatcccgcgtgatacctatatcaccggcaattacgtcattccgaagatcaattccgtctacagcgcggcgggtcagggcgaccgcggtatccgtgcgctgaccgataagatccgcgagacgcttgccattgctgtcgacggttatgtgctggttgatctgcagggctttgaaaagacgatcgacatggtcggcggcgtggaattcgatatcccgaccgacctgcagtatgacgatgacgacgaaaacatccacgtcgacctgaaggcgggccgtcagctgcttgacggcgcgcatgcgctgcagctgtgccgctaccgcagcggcgctgccgatatggacattgagcgtgcggctacgcagcaggaattcctgcgagcgctggcacggaagctggcttcgtccgcgacgctggcaaaggtgaaggactatgccgagctatttgcgacctatgtccgcaccgacctgaccgtcggcaacctgatctatctcggatccgagctgatgcagtgcgatttcaacgccatgtacaccgtgaccctgcccggcgaggccgtggagatcaagggcggcgactattatcagctcgacccggacggcgtgctgaagatcctgaacgagcacttcaaccccacgtccgaggaatacggaaaatatgacatcaacatccgccagaagacggatattcagcgcggggatggaaccgtgacccgtgataccacggcgacaacgccgacaaagagcacgcagccgcgccaggagccgacagagcccacgcaggatacggcgacggaaccgacgggagatcccacggagccgacggagggcccaaccgacgaaacgcaggacccgacggaggggccgaccgagggcccgacggaagcgccgacggaggctccgactgaggcgcccacggaagcgccgaccgccgcgccggagacggcagaataaggaggaacaccccatgtatacacccaaggagctggcgctgcgcgccgcaaaggcactcgacgaccgcaagggcctgaagatccgcctgctgcaggttacggacgtcacgtccattgctgactattttctgatttgtaccggcacgtccaacacgcatgtcaagacgctgtgcgacagcgtggaggcggccgtttccgatgagctgggcgagccgctgctgcaccgggagggccaccgcggcggaacgtgggtcctgctggacttcggctgcctcgtcgtgcatgtcttcacggaggagacgcgcgccttctatgatctcgaacgcctgtggaacgacgcaacgccggttcccattgattttgcagaataaagagggagaaacatgaagtacgattttaccgccatcgaggccaaatggcataagatctgggatgaaaagcagctctatgccgccaggaccggcagcgacgcgaagaaattctatgcgctggccgaattcccgtacccgtccggtgccggtctgcacgtcggccatgcccgcccctatacggccatggacgtcatcgcgcgcaagcaccgcatgcagggcgagaacgtgctgttccccatgggctatgacgccttcggcctgccgacggagaactacgccatcaagaaccacatccatcctgccgtcgtgacgaagaacaacatcgccacgttccgcggccagctgcaggcgctcggctacagcttcgactgggaccgcgagatcaacacgacggacccgaggtatttcaagtggacgcagtggatcttcctgcagctctacaagaacggccttgcctacaaggccaagatgcccgtgaactggtgcacgtcctgcaagtgcgtgctggcaaacgaggaagtcgtagagaacgtctgtgagcgctgcggcagcccggtcgtccgcaaggaaaagagccagtggatgctgcgcatcacgcgctatgcccagcgcctgctcgacgatctggacgacgtcgactttatcgagcgcgtcaagatccagcagcgtaactggatcggacgctccaccggcgcggaggtccgcttcggctcgacgttcggcgatgagatcaccgtgttcaccacccgcccggacacgctgttcggcgcgacgtacatggtcctttcgccggagcatccgctgctcgagcgctggatggaccgcctgacgaatgccgacgaggtcaaggcctatcaggaggcagccgccgcgaagtccgactttgagcgcacggagctcacgaaggagaagaccggcgtgcagctcggcggcgtgaagggcatcaaccccgtgaacggcaaggagatccccatcttcatttcggactatgtcctctccacctacggaaccggtgcgatcatggccgtcccggcccatgacgaccgcgactgggaattcgcgaagaagttcggctgcgagatcatcgaggtcgtcaagggcggcaacgtgcaggaggcggcctttacggactgcgccaccggcgtgatggtcaattccggcttccttgacggcatgagcgtcgccgacgccaagaaggccatcacggaatacctgacggagaagcacatcggcgaggcgaaggtcaacttcaagctccgcgactgggtcttctcccgccagcgttactggggcgagccgatccccatcgtccactgcccgaagtgcggcaccgttccgctcgatgagaaggacctgccgctggagctgccggatgtcgagagctacgagccgacggacgacggtcagtctccgcttgccgccatcacggactgggtcaacacgacctgcccctgctgcggcggcccagccaagcgtgaaacggacaccatgccccagtgggccggttcctcgtggtactatctgcgctatatggatccgcacaacgacgaggcccttgcctcgcccgaggccctgcgctactggagcccggtcgactggtacaacggcggcatggagcacacgacgctccatctgctctacagccgcttctggcacaagttcctctatgatatcggtgtcgtgccgacgaaggagccctatgccaagcgcacgagccacggcatgatcctcggtgagggcggcatcaagatgtcgaagtcccgcggcaacgtcatcaaccccacggatgtcatcgctgaatacggtgcggacaccatgcgcacctatatcatcttcatcggcgatttcgagaaggccgcctcttggtcgacgaacgccgtgaagggctgcaagcgctttctcgacaaggtatggaatctggccgagaccgtcaccgatcacgagacggcatactctgccaagaacgagtccatcctgcacaagacgatccgcaaggtcacgtcggacatcgatgcgctcaagggcaacaccgcgctggccgcgctcatgacgctgacgtccaccctgacggacaacggctgtaacgctgccgagctcaaaacgctcctgcagctgctcagcccgtttgcgccgcacatctgcgacgagatctggcagcagcacggcttcgagggcatctgctccgtctcggcctggccggcgtatgacgagtcgaagtgccgcgatgcggagatcgacatggccgttcaggtcaacggcaagctgcgcggcacgatccatgttgcagccgaccttgacgacgagaccgtcgttcagacggcgctggccgacgaaaagatcgcccgcttcctcgagaagaccggcggcgcgctgcgcaagagcatcgttgtcaaaaacaagctggtcaacctcatcgtaaagtgatggaatccggccgctcggcttgaaatcggcaaaagtttgaaaaaaattgtagagatcgcttgacttttgacttgcgattgactataataattgatgccgttatatcggccctgaaagcatcccggattgaaccggatgcaccggagggagggaaatcaatgtctgaaattcgcgtgaaggagaacgagtctctggagagcgcgctgaagcgtttcaagcgcagctgccagaaggatggcgttatcgctgaggtcaagaagcgtgagcattacgtcagcccgagcctcaagcggaagcagaagtccgaagctgctcgtaagaacaagcgtcgcggctattgattcccgttttcttgcatagccagagccgctgctgatgcagcggctcttgttttttgtcccgcctcctgcacttttgcggcccgccgtcataacatggaatgagccgagtgctcagaatccaaacgggaggttcctgactatgaattgcaattccaattgcttcggcggcaactgctggtggatcatcatcctgctcctgctgttctgctgctgcggaaataacggcggctgcgccaacgcggccaacaacaactgcggctgcggcggctgcggctgctgacgcatcgatccggcgggggagaaggcttgccttctcctccgctatttttttgtatcggtactggccttctgccgcttcctgtgatataatgcagaaaagtacttcccggaaggagcgtgttttatggaggatcgacccgtacaggagggctatcaccgtcccgcacgaaagaaaaagcgcgcgggcctgcctgcctttttcctagccgtcatcgtgctggcgctgttggctgccgccctgctgcgcatctggctcggctaccgcagcggctcgcttgccgccggagatatcaccgtgctgcgccgcggcctgccgttcggcgtgggagccgccgggctggctgccgtgcttgccgtcgccggtctgctgcggaaaaagtgccgccgcggctttgccgcctggggccttgctctggcgctcgttgcgctcgtgctgacaggcggactgctgtatgcagaccattatctgaccggcaaaatgacgacggacgatgatttcgattcgctttccgccagtgacctgcaccagacggcgacggaggctgacggccgcctggaacgcgaggagcgtttttctgaggcgctgtccggtctggaggagcagttggctgatctgccgtccttcacggaggtcgatcgctacctgctgtccaataacgatatcccggccgaggcgctggccaagctcgacacgggcaaggccccgcgcagcagctatctcagcagcgatgcaagcaaaattcaggtgttcgtgctgttcggcctcgacggcgtcgattcgtccgacagcgtcatgctcgttgcgctcgaccgcgtgcatcagaagatcaagcttatctcgcttgcgcgcgattcctatgtttttatcccggaattcgcctcattttccaagctggcctattcctacacctggggcggcgcggcgatggccgtaaaaaatctgaactataactattacttgaacgtgtcggattatattgccgtggattttgaacagctcgcgcagatcatcgaccggatcggcggtgtgacagtcaacatcgacgaggatgaggcgcgctatctttccggatatccgaacgtccatgtcggcgactgcctgcttgacggggaaacagcggtctcctatgcccgcatccgcaagagcagcgccacggacagcgaccgcaagcgcaccggccgccagcgtgaggtcattctctcgatcctcaacacgctgcagaccatgccgctgtcgcagtatccgggctttgtgcgcgactgcctcggtatgtgcgcaacatcgttcgaggctgagacgcttctgaccatggccgctgagacgctggggcagaattacacggtcgagcagtatttcttcccggaggggcaggtggactggtgggccgggctcatcaaggagtatttctactacgtctatgacctgcgccgtgccagtgaccgcatttaccgcatcatttacgaggagctgtatatctcgggctacgatgattgagtgcaaagcatgaggctaagcctgcagcagcacatgcgaaaatccgcatatttgcccaatcactacagcagcggcatggccggaccggccatgccgctgctggtattttctgttatccgttctgctgctccttggcagccagcagcgccttggcgagctggtccgggcaggacgtgggcttcgagccgcagcggatgccctccaggcgggagatcagctcatcgacattcatgccctcggccagccgggcgacgccctgcgtgttgccgctgcagccgccgataaagcgaacattcgagaccttattgccgtccagctccagcaggatctggcgcgagcagacgccgtgcggcgtataagtaaattccatggtgattgctcctttgcttcattttagactagtataacattttttcgtgttttttcaagcactttgaatgatttgcctcccgttccaccatactaaggagcagaaaaaacagggaggaacggcatggacgaaacacagagcaggctgcaggaacggctggaggagcttggcgcggggctgacgcagacgaagcgcggcaatatctataccctgacgatcatcgggcagatcgagggccatcaggcacagcccgagacgatcaaaacaacaaaatacgagcatgtgctgccgctgctggccacgattgaggagagcgaggacatcgacggcctgctgctcctgctcaacaccgtgggcggcgacatcgaggcgggacttgccattgcggagctgatcgccgggatgcggaagccctccgtgtcgctcgtgctgggcggcgggcactccatcggcatcccgctggccgtttcggccaagaagagcatgatcgtcccgacggccagcatgatgatccaccctgtgcgcatgagcggcgtcgtggtcggcgcaccggcgacctatcactattttcagcgcattcaggagcagatcacggattttgtcacggcgaattcccgcatcacgcgcgagcagttctcggactatatgatggcgactgggcagatcgccacggacgtcggtacgatcgtctatgggcgcgaggccgtggaaagcggcctcattgaccgtctgggcggcctgcacgacgccctggagtgtctgcaccggatgatctcccgaaaacagggaaacaagggatagcaattttaacattcctgtgctataataatcttcaaagcaaaattacaggagattcttggtttgaagatttgggaagcattgatctatggccttgtcgcggggctgaccggcttgctgccggtctcgttcagcgggcatgcggccgtgctgcaggacgcattcgcgctctcgccgctcacgcagggcgggggactgtatgtccgggcggccatcacgctcgggctcagcgctgcgctcgtgctggctttccccggagagctgcagctgacctgcggggagcttgcgcgccgcccgcagcgcggaaaacgcgcccggcagccgtctccacgccgccgcgccgtcctgatgggcctgcttgctctcccgatcggtctgctgagcctgatctggtgcgcagcggcagagcgcatcacgcgcctgtcgctcatcgccgcgttcttctgcctgaacggccttatcctgtttgctgcgggacggcccggcggacagaaggatgcccgcgcgctcatgctcccggatgcgctgctggcaggcgcgacccgtctggccgccgtgctgcccggcctgtcgccgctcggtctgacgctggctgtctgccgtctgcgagacctgcggacggattttgccctgcgctttacggcgatgctgacgctcggcttttcgctgtgtgaattcgtctaccgcctgctgcgtgcagtcattgtggggactttttccgcgtcgctgtggctgccgatgctcgtcgcgctcgtcgcctcgaccgtggccggatattttgccctgcagtatctcaaatatctgctgcaccgggaaaagctgcgtattttttcctattattgttgggatgcagccgttatcgcgctgatcctggcgcttatcaatgcctgaacggaggggaatcatggcaaggaaatcgcaacccgttaaaaagccgactgcaaagcagaccgccgcgcagaagcgccagacgcagaaccgccgcgagatctgggcgctcgtctgcatttttctggcgatcttctccatcatctgctgctttaataccacggcctttctgatcaagccgttcgcgtcgctcatcgcgggcctgttcggacaggcggggcgctacatactgccgctggccctcatcgccacggtcgtcatcctgtttacgagccgcggcaagccggtgcgcctgcgcatcgtcagcgtgttcacgctcattctgaccgtctcggcagtataccatctcattcagggcgaggcccttgtgtgggagtggaaggtcgtgcccgcactgttcaagggcggcattgccggaacgacgggcggcctgctgggcggtctgctggccatgctgctgaagacgggaatcaccgtcgtcggcgcgtatatcgtcctgatccttgtgatgctcgtgcagatcatcaccatcatgaatatgacggtcaacagcatcatcacggccatcaagaaccgcccgcgcctgcaggagcccgacgaggagccggagcccgagcaggacacggccgaacgcatcgtcaaccatgtggccaaccgccatatcgcccgcgtggaaaagcgccgtgcggcggaatttgacctgcccgtggacgatcccccgctggaaaaggcggaaaagcggaagaaaaagtcccgcgttccctcgccggatgaatatttggaaaagcagcaggaggagcgcccggctgcgagaccggtctctgtgacctgtgacgatgtcccggaggagccgcttcacgcggcagagcatcccgtgacggtcgtgccggaggcagcgctcccggaggaacctgttcctgagcctgcttttgagccggtcccggtgcaggagcttccggaggagccggaggaccggccggagcccgccgcggagcaggagcctgccgcgccgtgggacgaagcgcccgcgccgcagtacgatgagccggcggtccgtcctgcgcctgcaaagcaggaggacgcagaggaacttgtcatcccgcagccggagcagtccgggcaggcggagtatgtcttcccgccggtctccctgctgacgccgcgccgtgagggcagcgtggacgccacgtccgagatgcgcgagaattcccagcgccttgccgacacgctcaagagcttcggcatcgagccgcacatcgtcgacgtcgtccgcggcccgtccgtcacgcgctacgagctggagctggaccgcggcgtgaagctctcgaagatcacgaatctggccgacgacatcgcgctggcgctcggcgctgccggtgtgcgcatctcggccatccccgataaaatttccgtcgtcggcatcgaggtgccgaacaagatcgtcaacaccgtctacgcccgcgaggtcatcgattctccggccttccgcagcagcaagtccaaaatctcgtttgccgtcggcaaggatatcagcggcaactgcatcgtcggcgacatcgccaagctgccgcacatgctcatcgccggtacgaccggctccggcaagtccgtgtgcatgaacacgctcatcgtctcgctgctgtataaggccaagccggacgaggtacggctcatcatggtcgacccgaagatggtcgagcttggtgtgtataacggcattccgcagctgcttatcccggtcgtcaccgacccgaagaaagcctccggcgcgctgcagtggaccgtaacggaaatgatgcgccgctaccgcctgatgtccgaggagggcgtgcgcgacctcgactcctataacaaggcaatcgcaggcgacccggagcggcagaagctgccgcagatcgtcgttgtgatcgacgagctggctgacctcatgctcgtggccgccaaggaggtcgaggagtcgatctgccgtatcgcgcagatgggccgcgcctccggcatccacctcgtcattgccacccaacgtccgtccgcggacgtcatcaccggtctgatgaaggccaatatcccgtcgcgcattgcctttgcggtctcgtccgccatggaatcgcgcatcattctcgacacgccgggcgcggaaaagctcgtcggcaagggcgatatgctctttgctccgctcgggcagggcaagccgaagcgcgtgcagggctgcttcatctcggatgaagaggtgcaggccgtcgtgaacgcggtcaaggcccagtcgcagagcgactactccgccgaggtcatggagcagatcgaacgacgcgccgagcagagcggcaagcccgacagcggcgcagccgcgcaggacaccggcgagggcgacgagctgcttccggcggcggtcgacgttattctggagacggggcaggcctccgtttcgttcctgcagcgcaggctgaagctcggctatgcccgtgcggcccgcatcgtggacgagatggaggaacgcggcatcatcggcccgtatgagggcgcaaagccgcgccagctcctcatcacccgcgagcagtgggagcagatgcagaacggcacctatgccccgcccgcgccgcccgtcgaggacgagcttccctgatctgcttgtatgccgggctgcggcaaggcgcgccccggctgcaaaataaatgtttgcgttgcatccgggccgtccggagcgacagcaggaggtattcccttgaatcatcagaaaatcaaccgtatggtcggcattgccgtcctggccgcgctcgtcgtggtgctgcagcttctcagcagtgtcatcaagatcggcacggtctccatcacgctgacgctgatccccatcgtggtcggtgcagccttctacggcccgggagcgggcgcgatcctcggcacggtgttcggccttgttgtctacatcaactccgctaccggtgcggattacggcggaaacatggttttccttgccaatccgtttctctgcgccgtcgtctgcatcggcaagggcacgctgtccggctggtgcgccggccttgtctaccggctcgtcgcccggaaggatgccgcgcttggccgcaatgccgtcgccgttctgctggctgccatcaccgcgccggtcgtgaacacgggtgtgttcctgctcggcatggtgctgttcttccaggagacgctccgtgcatgggccgcaggctccgcgctgctgacgtatgtgctcttcaccctgacgggtgtgaacttcctcgtcgagctcggcctcaatcttgtgctgagcccggccgtttcgacgctcatccgcgccatccgcaagacgcacaattaagttagaaacctctgaataaatcggcttcggtggatgccggatctttttcgctgatccatctgttcgggaaacttgaaatacacaaagtattcctgcgtttcccaaacatcggcttagcaaaaaatctctcaccatcgactcttgcagatttcattcagatgtttctcagctccgatcatcggttcttccttgcacgaaccttgccgccccggttttccggggcggcttattttttgtcctaccatctgcaccggacgcatagagtaagggcaggaggggacgagcatgacggaagaagtgagacaggccctgcgcatctgcccgcccgggctgcggcaggccattgaccggctgccggatgccggggccatggaggagctgcgcctgcgctgcgggcagccgcctgcctgccggatcgcgggtaaggagcgggcgctgccgcttgctccggtcacgccggagctgctgcgcggcattctggagcaggcaacgcagcgctcggcctatgccatgcaggaaatgacccgctgcggctttgtcacgctgccgggcggacaccgcctcggcatctgcggaacggccgtcgtgcagaacggcacgatcacagccctgcgcgagccgtcttccctgaacctgcgcatcgcccgccagccggacggcattgccgaccgcctgcgtgatgcgctctgggcgcggccacagtccgtgctcctgtgcggcgcgccgggcagcggcaagacgacgctgctgcgcgacctcatccggcagctctccgaccggttcggctggcgcatctgcgttgtggacgagcggctggagctggcggcctgtgcctccggcgtgccgcagttccgcctcggcgcacacacggacgtgctgtccggtgcaccgaaggcggcgggcatcgagctgctgctgcgcacgatgaatccggagtggatcgccgtggacgagatcacggccgaggcggacattgctgcgatccggcgcgcgtcctactgcggcgtgcgctttcttgccacggcgcatgcggccgaccggcgcgagctggagagccgcccgctgtaccgcgcgctgctgcaggacggctttttccgcatggcggcctttctgctgccggatcgttccgtgcgcatcgaaagggggctggaccatgcttagagtgctcgggggcgcgctggtgctgctggcaagcggcagcttcggcatcacggccggggtgcggtattaccgcgcggcgcgccatctgcaggccttctgccgcgccatagagctgctgcgctgcgagatcaactattccctgcagccgctgccggaggtctgcgccctcgtggcggacaggctggcggggccgcccgccgcgtttttccgctgctttgccgcgcagctccgcgagcccgtcagccgggaccgggccgcagccgcagccctggaggccgcgcggggcctgcagctgccgcaggatgcggtcatggcggtgctggagctgtgcagcgccctcgggcgctatgatctcgacggggagaatcgtatgctggacctgacggcctcgcgcctgcaggcggcgctggcccgctgtgaggccgaaaagcgcccgcgcgcgaagtgctatgccgcgctgggcctctgcacgggactggcgctcctgatcctggcggtgtagcctatggatgtgcagctgatattcaagatcgccgccgtcggcatcatcgtgaccattctgaatcaggtcctcgtgcgctcggggcgcgaggagcaggcgaccatgacgacgctggccgggctcgttgtggtgctgatgatcgtggcgcagaagatcgcgcagctgttcgacctcgtgcagtcgctgttccggttttagatggacacactgctgcaggttgccgggcttgggctgatcgccgtgctgctcgggctggtcctgaaaaaggggaacggcgtactggcgctgctgctgacgctggccgcctgcgccgccatgactgtgagcatcgtgcgtctggcagagccggtcgtatcgtttctgtcggagcttcgccagctggcaggactggagcctgcgctgctgcagccgttgctgcgtacggtcggcatcggccttctgacgcagctgacggcttcggtctgcgccgatgcgggcgagagcgccgtggcgcggctcattgagctgtgcgggagcgtgctcggcatttacacggccctgccgctgctggaggccgtgttgtcgctgctgcggactatgctggagggatgatgtgaaaaaaatcgccgtttttctggccgttctgctcctgctggcggctcccgtactggcagcggagccaacggaggcgctgagcgacgtgcttggcgcggacgagctgacgcagagcctcccggacgaggctgcagaggtactggacgggttttcgccggacggtacgccggacttccgcagcggagtacggagcatcctgcgcgcggcggccggcgggagcggcggcgcgctgcgcagcggccttcgcctgtgcgcggtgctgctggccatggttacgctgtgcgccgtcgtgcgcatgagcgcgcagaaggaccctgtgaacgccgtctcggccgtcggagcgctgggcatctgtgcggcctgccttggcgggatgcagtccatgatctcgctggcctcggagacggtcacgcgtctttcggactacagcgcctgcctgctgccggtcatggcgtccgccatggccatgagcgggggaacggtctcagccggggctctctatgccggaacggccctgttctctggcctgctgtcgcgcctgatcgcgcggctgctcctgccgggcgtgagcgtctatctcgtcgtggctgcggcagaggctgcgcttgcggacagcctgctctccgagctgcgggaattcgtgggctggctgatctccaagagcctgcgtgtcgtgctgttcgtgttcacgggctatctggccgtgacgggcgtcatctccggcagtgcggatgccgccgccgtgcgcgcaacaaaggctgccgtctccggcatggtgcccgtggtcgggagcatcctgtccgatgcatccgaaacgctgctggcaagcgcctcggccctgaaaagctccatgggcgtgttcggtatgctggccgtcctcgccatctgcctggcaccgtttctgaagatcggtgcgcagtatctgctcctgaaggggacggcggccgtcagcgggacgatcggcatgccgcagcaggtgaagctcgtgaagcatgccgccacggccatgggctatctgctcgccatgacgggggcctgcgcgctcatgctgcttatctccgttgtgtgctttctgaaggtggtgggatgatggaggcgatccggagctatctgaccgccgttgtggcggtgagcatgatcgccgtgctggcctccgcgctggcccacggcagccggatggagcgcgtcgtgcgctttgcggcgggtcttctggccctgctcgtctgcgttacgccgctgctgcggctcgatgcgcggacgctcacggacgtgctggagcaggccgagcgtgcgctcgactatgatgcctccggaacggaccggacgcggcaggatatgctccgcgacctcatccgggagaacacggagcggaccattgaaaagcaggcggaggcgctgggcatgctcgtccgggccgacgtcacgctgacggaggaggaatatccgcagccgtggtccgccacgctgacggggacgctcgacccggagcaggtccgggcgctgtcggaatttctgtcgcaatcgctcggcatcccgactgaacggcagacatggaagacctatgggtgagcaggaggaatggctttggggaagatcgatccgaaaaagctctggcaggggctgaaaaaataccgctatgccgcgctggtcctgctgctcggtctggcgctcctgctgctgccgggcgggaaaaagacgacgcagaagtccaacgcggctgcttcggcggcgcagacggactatgcggcggagacggagcggcggctgacgcagatgctgcagcagatcgcgggcgcagggcaggtcagtgtgatgctgacgctggagaccggggagcgcgtggaataccagacggatgtgcaggcaagctcggacggggcgcagagctccgagtcccggaaaaccgtcattttgtccgagggaagctcatatgataaagcggctgtagccgcgacgacctatccgcgttttcagggcgcgctcatcgtctgcgagggggcggacagcgctgcggtgcggcttcggctgctcgaagcggtctccgccgtcaccggactgagcacggaccggatcaccgtcgtgaaaatgagatcataatggaggaatggcaatgaaaaagacttggaaacgcaatctgatcgccgccggtgtgctgcttgtggtatgcgccgggatctatctgaactggtatgccgggcacagcgccgcggacctgacggaaacgcttgacgcaggcaagatcctcgacgacacgacgctcgttctgcagcaggagcagggcgacgcgctggtgacgccggtgcagcagaccgggacgcaggcggagtatttcgcccagatgcggctctcccgtcagacggcgcgggacgaggccgtcgagctgctgcaggagaccattgcctatgccgacggcgatgccgccagcagcgccaagctcgagggcatcatctcggacgcgctggccgaatcccagatcgagagcctcatcgtggccaagggctatcaggactgcgtggcctatatcagtgaggacggcatctccgtcgccgtcgccgcgccggaggacggcctgacgcagtcggacgtcgccctgctgtcggatatcgtgctctcgcagacgagctgcaagctttcggacatccgtgtcatcggcgtcgagccggaaaaggggcagtgaggcctgagtgcccggctttccgcatttgacgatccgattttcgcaacgccgctattgtattttccgtaaaatgtgataaaatagataggacaatcgcgaagcatgccctgcggcggcttcggagaaagggtggtcaataccatggcagaaagcaaaaattacatcgttcagccccaggagggcgggaacattctgatttcggaggacgtcatcgcctccatcgcctcgctggccgtgcgcgaggtcgagggtgtctatggcctgagcgccacgcagacgcttgatctaacggcgatcctcggcaagaagaacctgagcagcggcatccgcgtgacgctgcaggacaacgtcattgacattgcctgcaaccttgtcgtccggatgggccagcccgtgatgaccgttgccaagaacgtgcaggagggcatcgccaacgctgtggagtccatggcaggcgtccgcccggcccacgtcaatgtcaacgtctgcggcgttgccgcgccgaaggcggagcaggcctgaggctatgccgctctgcagccccccgccgcagagcggcagcccttcactttcactttacataccaaggagacatgacatgacacgctcaaacgccagagaggtcgccgtgcatctcatttatgagatcgactataccggcgaagaccctgcccaggccatcgagacccgcatggaccgcagctattacagcggcctttctgcggagaacgacgtctatgcagagcgccccagcaaaaagcagatggactatatccgcacctgcgtgacgggtgtctgcgagcacgcagaggagctggacgccctgatcgcccagtatgccgtgcgctggaatctgcaccggatctcccgcctgacgaaggcggcgatgcggcttgccatttatgaaatgcgctatgtcgacgatgtgccgaacggcgttgccatcaacgagtgcgtggagctgacgcggaaatatgaggacgcgcaggtcgtttcctttgtgaacggcattctcggctccgtggcgcgcggcgcaaagccgaacaccgaggcccctgcggacccgcagccggaggaagcacagccggaggagactccgtccgaagagacgcagcccgctccggaggaggcgcagcagccatgagggtgctcgccttcgacaccagcaactatacgacctcggtcgcgtccttcgacggcacggccggtcacaatatctcgcgtctgctcgatgtggagcagggcgcgctcggactgcgccagagcgatgcgctgttcgcccatgtaaaacgcctgccggagcttgccgacaggctgttttcggatatcggcacggacgcaggctttgaagctgtcggtgtcagcacgcggccacgcgccgtggaaggctcatatatgccctgcttcctcgcgggcgaatcgcaggcacgcgtgctcggtgcggcgctcggcgtgcccgtcctgccgttttcgcaccagcaggggcacatcgcggcctcgctgtggggctccggccatatggagctgatggacgagccgcatctggcctggcatctttccggcggtacgacggagcttctgcgcgtcacgccggagaagaagggcggcgtgcatgccgagaggatcggcggcacgacggacatctccgccggtcagctcatcgaccggaccggcaagctgctcggcctgccgtttccgtccggcaagcacatcgacgccctgagccgttccgcgcaggaccggcaggtcttccgcgtcaaggtgcaggggaccacattttccctttccggcgtgcagaataaggtcgagcagtaccatgcggcgggaaattccccggaggagacggcgggctatgcgctgcgctgcctcatcggcgccatcgtccgcgcgacggagaacgcgctgctggaatatcccggcagcagcgtcgtgtttgcgggcggtgttgcatcgaacacgctgctgcgcagcagctgcgcggcgcttccggccattttctgtccgccgcagttcgccacggacaacgccctcggcgttgccgttctgacctggagggcgttgcatggctgagatctttgaggtatcgcagatcaacgagtatctgcgacagcgctttgaagcagacgaatttctcggctcgctgctcatccgcggtgagctgagcaactataaaatttacccctccggccatcactatttcacgctgaaggacagccagagcgccatccgctgcgtcatgttcaagggcagcgccatgcgcctgcgtttccggccggagacgggtatgaaggtcattgcgggcgggcgcattgccgtgttcccgcgtgacggagcctaccagctctactgcacgtcgctcacgccggagggcgtcggcgatctgcatgtcgcctttgagcagctcaagctgaagctgcaggctgagggcctgttcgcccgcgagcgcaagcaggccctgccgcgcttcccgcaccgcatcgccatcatcacgtcctccgcgggcgcggctctgcacgacatgctgcgcatcctgcgcaagcgctacccgctgacggaggtcaagctgctcggcgtccgcgtgcagggggccgaggctccggcggagatcgccggggcgatccgttacgccaaccgctgggagctggccgacctcatcatcaccggacgcggcggcggctccatggaggacctttgggccttcaacgacgaacgcgtggcccgcgccattgccgattcgcatattccggtcatctcggccgtcggccatgagccggatgtgacgatctcggacttcgtagccgatctgcgcgcagcgacgccgtcgaacgcagccgagttggccgtgccggaccagacggagctgcgccagcatctggccgcccagcgcgccatgctgctcacgctgatgacgcgccgcctgaagcaggaacgccagcgtgtggcccagctggccggagcgcgcgccctgcgcgacccgaaaaactatatcgacgaccgccgcatgcagctcgactatacgcaacgccgcctgatcgccgccttgcagcggcttgtggcgcagcagcgcgagcgctttgtccggctgacgtcgaagctcgacgcgatgagcccgctgaaggtgctctcgcgcggctattctatgacatttgacgcgcagggccatgtggtacggagcgtccgcacgctgtcctgcggcgaccggatcaccgtccggctcgcggacggccgcgcctctgccgaggtgcgggaaatacaggaggatgcaacatgagcacggaatcgatcacatttgaacaatctctgcagcggctcgatgagatcgtccgccgcatggaaaagggcgacgtcccgctggaggaggccctctcgctgtttgaggagggcacgcggctggcaggctcctgcagccgcctgctggacgaagcggagctgaaggtcgttcaactcaccaagggcgcagacggcgccccgcaggaaacggagcttgccgatgctggaatttgaagcgctgctgcgcagctatgccgaccgcgtggagggctatctccactcctgctttacggatgcggacgagccgcagcaggtcctgtttgacgccatgcgctacagcctgcttgccgggggaaagcgccttcgccctgtgctggcgcaggccttctgcgagctgtgcggcggcagcgccatggacgctctgccgtttgctgccgccgtggagatggtgcatacctacagcctcatccacgacgatctgccgtgtatggacaatgacgattaccgccgcggccgcctgacgaaccacaaggtctacggcgaggcgacggccgttctggcgggcgacgccctgctgacggctgcattcggccatcttgccgcagccccgctgcccgcgtcccgcgtcgtcaaggccacgcgggtgctctcgctgtgcgcgggcgagctcggtatggtcggcgggcaggtgctggacatggaggccgagcaccgcgtctgcacggaggaggaggtcctcgccatccagtcgcgcaaaacgggcgcgctcatctcggccgcctgccagctcggcgtcatcgcagccggcggcagcccggcccagcagcaggcagcggcggattacgctgcaagtctcgggctggccttccagatcgaggatgatattctggatgtcgtcggcgatgccgcaaagctcggcaaggcgaccggcatggaccagaacaaaaatacattcgtccggctgcacggcgtggaagcctgccgtgcccgcatcacggaagaaacgcagcgcgcggtcgctgcgctcgcgccgttcggtcaggcggagttcctgacggagctggcgcagcgcctgacgagccgcgatcactgaggagaaaaaccatgaaagcactgcttcacagccttctggaggccgctacccttggcagaccggtcgtcctctgcaccgtcgtgcattccggcggctccgcaccgcgcagcgccggcgcgcatatggccgtgttcgccgacggcagtacccgcggcacggtcggcggcggccgcctggagctgctcgccgcaaaggagggcctgtcgcttctgcagcggcagacctcggccctgagggcctatgacctctcggagcgcgagggcggcatcggcatggcctgcggcggcaatgtcatcgtgtcgtatctctatctcggcccggagcaggccgacttcgtgcgcgccatggcggctgcgttcgacgccgcggcgccctgctggctgaagctcgtcattgccggggacggcagaacggacgtttcgctttcgaacggggcggaccgttccctgtgcgcggcccggccggtctggatgccgggaacgcccagcgtctacaccgagccgctcacgcagccggggcgcgtctacctcttcggtgcgggccatgtcgggcaggcgctcgtgccggtgctggaatatgtcggctttgccgtgacggtctatgacccgcggcaggagctggccgagagattctccgatgtgatctgcgcgccgtatgccgagctggaggaccatatcacgctcacgccgtatgacagcgtcgtcgtcatgacgccgggccacatggcggactttgaggtcctgcaccgcatcctgcgccatccgctgtcctacatcggctgcatcggcagccggaacaaggcggccaagacgcgcgacctgctgcggcaggagggcttctccgaagaggccattgcgtctgtccatctgcccatcggcctgccgatcctggcgcagaccccggcggagatcgccatcagcattgcgggcgaaatgatccgctgccgcgccgaggcggcgcagaaacgctaaaaaacggagcgccttccagccggaaagcgctccgaaatttttctgccttacagtgttttgatggcgtcgatcagcgcgtcgacatcctcctgcgttgtggaccagctcgttgcgaagcgggcgacgctgtgctcctcgtcgaccttgccccaggtgtggaaggcgatcttctgctgcagggcacggacggccttgttctccatgatgaggaactgtaggttcgtcggcgaatgaagatagaactgcaggccacgcgcatcgaaggcatcgcggatctgcatggccatgttgatggcgtgcttgctgatgcggaaatacaggtcgtccgtaaacagcgtgtcgaactgcaggccgagcaggcggcccttggccagcagcgcgccgtgctgtttggcaatggtggagaaatatcgcggcatgttgtgctttgtaaagactgcggcctcgccgaacagcgcgccgaccttcgtgccgccgatgtagaacacgtcgcacagctgggccagctccggcagggtgatgtcgcacttcgggctcatcagaccgtagccgaggcgtgcgccgtcgatgtagagcggaatattataccagcggcagacgctggccagctcaaca

SEQ ID NO: 11147 - DNA, 8660 bp, Unknown
  gut microbiota DNA sequence
cgcagtttaattgccctgtacagggcgctcactgagcgccgctacagacgcaattggtacataccattttaacggcagccggtacggactgcaagtgccttcccgagattgccacgggcgcaaagcgccctcgcaatgacaatttggggggcatttaccattttaacgatagcctgtacgggcggcaggtgcgtcgccgggcgaggcatgcctcgcccctactttttcacacataccggagcagcggacaaatgtccttctccgcggagaaaacaggccgattttcggggaaaaagtttcaaaaagctcttgcattccgggtatttcagtgttataataaggacaatctatagtagactttactaagagaggggttttcccctctcttttcttctgaaattctgcgccggtccccggcaggaaggaagcatttccatgaagatcaccgatcaggtttgggagttcgccgagccgctggtcaaggcctgcggctgcagcctctgggacgtggaatacgtccgcgagggcggcgagtggttcctgcggctctacctcgacaaggagggcggcgtggacatcgacgactgcgaggccgtgtcccgcgcggtcgacccggtccttgacgaaaaggaccccatccccgagagctaccgctttgaggtctgctccgccgggctggagcgccagctcaagcgtccgtcggacttcgagcgctatctgggcgagccggtgctcgtcaagctctaccgcccgcgcgacggccagaaggagtttcccggccgcctcgtgcgctatgaggacggggcagttacgatcgagatgcgcggccgcgaggtcacgtttgacaaggcggaggtcgcgctcgtgcggctccgcgtggagttctaatcacgaaggagagaaatcatgaacgctgaaatctttgcggcgctccgccagctggagaaggaacgcggcatccccgtggattacatggtcgaaaagatcacgcaggcgcttgtcgccgcttataaaaaggaccgcgacggctacaccgacaacgtctacgtcgagctgacggaggacgccatgcgcatgtatgcgcagaaggaggtcgtcgacgaggtcatcacccccgctaccgaggtcacgctcgacgccgcgcgcaaggtcgacccgcacgcacagctcggcgatctcgtgaacgtggagatcaagacgcaggccttcggccgcatcgccgcccagacggccaagcaggtcatcattcagggcatccgcgaggccgagcgcggcatgatcttcgagagcttctcctcgaaggagcacgagatcctcaccggctcggtgctgcgcttcgagccgaacggcgacatgaccatccgcatcggccagggcacggacaagaccgacgccctgctgcccgtcggtgagcaggtcaaaacggagcatttcgtcgagggcgacatgatccgcgtctatgtcatcgaggtccgccgcagcagccgcggcccgcaggtcatggtctcccgcacgcatccggcgctcgtcaagcgcctgttcgagctggaggtcccggagatcagctccggcgccgtggagatccgctccatcgcgcgtgagcccggctcccgcacgaagatcgccgtccacgcggccgaggagaacatcgatcccgtcggtgcctgtgtcggcgcccgcggcgcgcgcgtcggcgcggtcgtagaggagctgcagggcgagaaaatggacatcgtcgtgtggtccgaggacatctgccagttcgtggcctctgcgctgtccccggcggacgtcatctccgtcacgcagctgcagcagggcgcaaaggcctgccgcgtcatcgtgccggacgatcagctgtcactcgccatcggcaaggagggccagaacgcccgcctcgccgcgcgcctgaccggctgcaagatcgacatcaagcccgcctcgcaggccgaggcgctggaagaagcagctgccgaataattttcggggactgcacatcattctgtcaaatcgttttcttgaaaggcctcgggcctttccacagtaggatcggaggggatgtaccgtgccgaagaaagtgccgatgcgtcaatgcctcggctgccgcgaaatgaagcccaagcgtgagctgacccgtgtggtgcgcagcccggaggggcaggtcagcctcgacgcacgcggaaaagcgcccggacgcggcgcttatgtgtgccgcagcgcggaatgcctgaagaaagcaatgcgctcgcacgccattgaccgcgcgctgggcgtaacggtgccgcaggagctgtacgaaaccctgcgtttggaaatggaggcgctgccggatggaacagaataaaagtctgggtctgctgtcgctcgcgcgcaagggcggaaacatcgtcctcggcgaggagcaggcgggcgcagcggcccgcgccagccgcgcacggctgatgctgctggcctcggatgccggcggccacaccgtgcggcgggccaagagcttcgtggccgggacggcgcagccgctgctgacgctgccctatacgcgcgacgagctgggcgacgccctcggcacgacgagctgcgccattgccgccatcacggatgtgcagcttgcgctggcgtttgtcaagacgctcggcgagccggaaaagtatgcggacctgctgcaggagctggacgagcgcgtcaagcgcgtggaaaagcggcgcgccgaggaaaaggcccaccgcaggaacgtccggcatgggaaatcgtaagtgtgtcaatcaggaggtggcgagaatatgagttttgtgaaataccgcgtgaaggaggtcgccgctgactttggcgtgacgccgaaggatattgcggagatcgttggaaaatattttgagaagccgcgcagcaacacgcaggtgctgacggacgagcagctgaacgtcgtgttcgacgtgataacgcagaagcaccagatcgcttcgctggagcaggtgttcgccgtggccccgcaggcaaagaagcccgagccgaagaaggcagaggccccgaagcccgcagcccagcccgcacagggcagcgctccggccgcaaatgccgcgcccgctgcgcagagcgccgacaaggccgccaagccccagcaggagcagcgcaagcgcgagcgccgcgtcgtcgatacctctgccgtcaccgtcaatgccgaccgctttgacgaccgcgtggacgtgctcatctccgagcgcgcgcagaatttctccggcggcaagcagaagatcgccagcaagaacaagaataaggccaagggcggcaaaaagccggccttcggctcgaagcagcgcaacgaggagcaggagaagatgcgccgcctgcgcctggaggtcatcaagaagaccccgctgaccgtgaagatccccgatgagatcaccgtcggcgagctggcctcccgcatgaagaagaccgcgaccgaggtcatcaagaccctgctcaagaacggcgtcatggccacgatcaaccagaccatcgacttcgacacggcggaattcgtcgccacggagatgggctgcaaggtcgagcgcgaggtcgttgtgaccattgaggagcgcctcatcgacgaccatcaggacaccgaggacgagctcgtcccgcgcagcccggtcgtcgtcgtcatgggccacgtcgaccacggcaagacaagcctgctcgacgccgtccgcaaaacgaacgtcgtctccggcgaggccggcggcatcacgcagcacatcggcgcctacaccgtcgagatcaacggaaagcccatcaccttccttgacacgccgggccacgccgccttcacctccatgcgtgcccgcggcgccatgtgcaccgacatcgccattctggtcgttgcggcggacgacggcatcatgccgcagaccgtcgaggccatcaaccacgccaaggccgcgaacatccccatcatcgtcgcggtcaacaaaatggataagcacggcgcaaacgccgaaaacatcaagcaggagctcacgaaatacgacctcatccccgaggagtggggcggcgacaccatcgtctgcccgatctctgccaagacgggcatgggcatcgatcagctgctcgagatggtcatcctgaccgccgagatgcaggagctcaaggccaacccgaaccgcgccgcgaagggcaccgtcatcgaggcccgtctcgacaagaaccgcggccccatcgccacgctgctcgtgcagaacggcacgctccataagggcgacctcatcattgcgggcacggccgtcggccgcgtgcgtgtcatgacggacgacaagggccgcgccatccagtccgccggtccgtccatcccggtcgagatcaccggccttgccgaaacacccacgccgggcgatgagttcgacgccgtcgctgacgagcgcatggcccgccagctcgtcgagcagcgcaagcaggccgagaaggatgccgccgcaaagcaggccagcaaggtcacgctcgacaacctctttgccaaaatgcaggagggcgagatgaaggagctgaacctcatcgtcaaggccgacgtgcagggctctgccgaggccgtccgcgccagcctcgaaaagctgtcgaacgaggaggtccgcgtgcgcgtgatccacgcaggcgtcggcgcgatcaacgagtccgatatcctgctggcctccacggccaacgccatcgtcgtcggcttcaacgtccgtccggacgccgccgcacaggcctcggctcagcgcgccaatgtcgatatccgcatgtaccgcgtcatctacgacgccatcgacgagatcgaggccgccatgaagggcatgctcgcgccgaagtaccgtgaggccgtcatcggccatgccgaggtccgccagacctacaaggtctccgccatcggcaccatcgcgggctgctatgtcaaggacggcaaggtcacgcgcgacagcaaggtgcgcgtgctgcgcgacaacatcgtcatctacgagggcgagatcggctcgctgcagcgcttcaaggactccgtcaaggaagtcgcgcagaactacgagtgcggcatgtccatcgacaagttcaacgacatcaaagagggcgacatcttcgagtgctacgtcatggaggagatcccccgctaaggtcgaccgaccgtttctcacacgcgggcgcggggaaagtgcttctccgcgcccgcccttatatttgcgccggggttccctgatttgtcattgcgagggcgctttgcgcccgtggcaatctcgcggcagacgccgcggaacacgctgacggcttcggcgaattcgccgcaggcccggagtacctgctccctgacgcacgcggcgcgcaccggcgcgccggaaggaggaaatttttatggcatccaaccgcatcggacgcatcaatgaggagatccagcgcgagctggcccagcagctccgcctgctgaaggacccccgcgtccagaagaccatggtctccatcacccatgtggagacgacgccggaccttcgctatgccaaggtctacgtctcgctgctcgaccgcagctgcaccaaagaagtgctcgcggggctgaagtcctcgggcggcttcctgcgccgcgcactgggcaaaagcctgcagctgcgctacacgccggagctgcagtggcaggaggacgactccatcgtccacggcgcgcacattctcgacattctctcgaagctcgacattccggaggacacggaagatgaaacagctgaccattcgtgaagcggcggattttctgctgcgcaatgacaactatgtcctcctgacgcaccgccgtccggacggcgacaccattggcagcgcggccgccctgtgcgcaggcctgcgcagcctcggcaagacggcccatgtgctggaaaatccgcagttcacggagaaattccgcccgtggctcggcaagctgacgtgcgagacgctgccgtccagcgcctgcgtcgtaagcgtggacattgcggcggagaacctgctgccgttcgacctgccggactgcgccgtcgagctgcagatcgaccaccacgccgggaaccgccagttcggcctgcaggcctttgtggacgcaagcgcagcggcctgcggcgagatcatcctgcggctgctgcagctcatgggcgtcaagctcgacgcctccatgggcgcggccctgtatgtcgccatctcgacggacaccggctgcttccgcttcaacaacacgacggccgacaccctgcgctgcgccgccgcctgcaaggacaccggggcggacacgttcgccatcaacacggccctgttcatgacgaagcgcctgccgcgcctgcagcttgaggcgcgcctgacggagaagatggaattctacgccggcggggccgtcgccgtgaacaccctcccgaacgtcctgctcgtggagcttggcctgacggaggacgacgtggacgatatctccggcttcagccgtgagatcgcaggcgtcgagatcggcgtcatgctgcgcgaaggcccggatggcggcaagatctccctgcgctgctcaccgaaatatgacgcggccgccatctgcgcccggctgggcggcggcggacaccgcggcgcggccggagccagcgtgcccgagggcctcgacgcggccaagaaggccattctgcaggccatcgccgacagcggagtcgagctctgatggcaagcgggatcctgatcgtcgacaagccggaggactggacgtcacaggacgtcgtggccaagctgcgcggggcgctgcacgagcgccgcgccgggcacggcggaacgctcgatcccatggccacgggtgtgctgcccgtgttcttcgggcgggcgacgcgcgccgtcgagttctttgagcatgccgaaaagacgtatgagaccgttctgcgccttggccttgtgaccgacacgcaggacatcaccggccgcgtgctggagcagcgcgatgccgcctccgtgacggaggcagacgtgcgcgcggccctgccgcgcttcctcggcccgcagaagcaggtgccgccgatgtattccgccatcaagatcggcgggaagaagctctatgagctggcgcgcgccgggcaggaggtcgcgcggcccgcgcgggccatcacgatccacgcgctggagctgctttcgtgcgcgccgccggactttaccctgcgcgtgcactgctccaaggggacctatgtccgcacgctgtgccacgacctcggcgcagcgctcggaacgggcggctgcatggctgcgctgcggcgcacggcggccggagcctatacggcggcgcaggccgtgccgctggcggacattctggcccaccctgcgccggagtccctgctgctgccggtcgacacgctgtttgcggcccatcctgcactgacgctgacgcccgcgcaggaaaagtgctgccgcaacggcgcttcgttcacgctccgcttcgcccccggccgctatcgcctgtatgccgaaagcggcgaatttctcgccctcggcgaggtccgggacgggcgcatggagaccgtgaagagcttttttgcgatttgagaggatgcatatgacacgaccctgtgtattggcgctcggcttttttgacggcgtccacatcggccacggcggcctgctgcggcgcacgcgcgaaatggcggaccgtctcggcgtgcctgcggcggcgctgaccttcgacacacatccggacacgcttgtctccggccacagtgtgccgctgctgaacacgccggaggaccgcgccgcgctcatgcgcgaatattacggcatcgatgaggtgctcacgctgcattttgaccgcgaaaccatgacgcagccgtgggagcgcttcgcggaggagacgctgctcgggcggtatcacgccgtgcacctcgtctgcggccacgacttccgcttcggcgaccgcggcgcaggcaatccggagaagctcgcggccttctgcgcgcagcgcggcatcggctttgaccgcatcgacgtcatcgagctggacggcgcgcccgtctcgtccacgcgcatccgcgctctgctggaggccggggacatggcagaggccgtgcgctgcctcggccacccgcatgtgctcaccggcccggtcgtctccggccgccaccttggccgcaccatcggcatcccgacggcgaatctggccctgccgccgcagctgctgtgcccgcgccacggcgtctatgccgcgctggcctgctttgacggccgccgcctgcccgccgtggtcaacatcggctcgcgcccgaccgtcggcggcacgcatgtgaccgtggagccgtggattttggattttgacggcgacctctacagccggacgctgcggctggagttttacaccttcctccgcccggagcggaagtttgacagcctcgacgagctgcgcgccgccatcctgcacaacgccgaacagacgcgggagtttttccgcgatcgataaaccacgaccgcccgccggtaaccccggcgggcggtcattttatggtatattggcagaggcggggcatgcccgccgaccgcacgcgccttgtaggggagcggcatgccgctcccggcgctgcacgaacgattggaacaatgtgccgttaaaacggcacgcaccgattgcgtctgtagcggcgctcagcgagcgccatgcgcacccgagaattaccgagcgccctcgccgaccgcac

SEQ ID NO: 11148 - DNA, 4603 bp, Unknown
  gut microbiota DNA sequence
aaaatggcaacattatttgaatgattgcgataacaaaaagcgctatctgatttgaagccaagtcagatagcgctttttccctgttgttttttaatcagccttcagccggtccttgaacgcctccaccattgcatcgctaagctgctgggacggcactttcacatagccggaggcttcgtcatatttcgggtagttataacgccacttgtcgtagtcctcccggttgatttcgccgttgcgatgcctttcggcttgtcgcctgcaattcacagacagtaaaccctctcggcagcttgagcaatttttataaagattatttctctaacctctggaaatgcttcattttgagacagccccgtcttttattcatttcggttgatcccaatatcaagatagacgcttactgggctcctgcccaatccttccacgcagcgaggtaagcaaagctgggccagaaaccgtcccggcgaagaagcatttgggaaaggcgctctctttcggtgcagtccggatgccagagcagaccgtacaaggtaatgccatattccagatcgtcttcttccctctccagcatttccagcgccgctgcaagcggcgttgtaccgctccagacctgcatggacttttcgtaagcagtatgatgccccaccgccatatccgggcgatagtacttcagaagagtcggcgctttctctgtccggacagcgctcagcgtgtgccagtaaagaaccgcaatccccatttcatcatcgcataaaggcatacagccctcaaaagcttccattgcctgttcgtaccgcccggcgtaatactgggcaaggccgatccgatagaggcagtccagcttttccgcacccaaagtcaggcatttttcgaagtcagcgatggcaggatcactttgcagcgtcgtcaggtaccgtcccgcccgaaggcggagcaaggacagattttccggctccagcttcagcccctccgtataggcatcaatggcctcccggtaacgaagctgcctggaaagagccttccctaatgcacagaatttttcaacggagtctggcaaggactttgcctgcctgattgtctgggagtcgggaattccggcgggaaggttcagaatctgactttctattccggcgtgcagggcatcaaacgggtattccatcacagcccccttgtatacggacggtaacaggcggagcagacgatttcaccgttttgaaggtgggcaaagctctcggcaaatcgttctccgcacacggagcaggtaacggtcttgaagattcgggcctcctccggcaccggctctggggcttccttcacgtcaaacatctcgtggaagtccccatccataagccacgacagccgttcgtccttggttttctccggtgtcgggcgcagaacaaggcggaaggactttccgtccgaacggcggtaaaaggagaaggcgtttttcccctgtagattgaaaatcaagttcccttttcccacggtacaggacagcagcgcctgaatggcatccacaccgcaggcgtcggtctcggcaatgcacacgatctcctcgtcctcggatgggctatcacatccgaacagctcccacgcatacagcaccgcccgaaagccgactgcaaggcctccgcagccgtggccatgaaacgccacgcatttttgccacagagattccagttccttttgcatcgtatgacctcctatttttcctgaatggcagcctgtcggtgctcaaaatacaggctgatgagatagaatgacagtgatagcatcataatgcacacgcccggcgagaggagatacccataggcctggcgaagaaaggcaccccgcttataggcaaagttgatcatggtgccccaagtgggatgataaagatccccaaagcccaaaaagctcagggtggactccatcataatgcagctgttgacccccagaagaaaccgggagagcaatacatcatacaggttcggaaggatgtgccggagaatgatatgcttccgactgtatccctggatcatgcaattttcaataaaaggctgggcattcaggtgaatgacctttgcacggacattccgggccgtccccacccagctgaatgcagcaatcagaaggatcagatttcgactggagcttcccagaaaggtcgccagcacgatcatggtcaccagcttcggaagcagcacgaaaacattgataatgccattggataggccgcccaaaaggcctttcccggcagccagcgtaccgatcacgctccccaaaagcaatgtcagaatactgctggatacgcccaccaacagcgtctgccgggtcccgcagaccagttccgtaaagatgtcatagcccaacgcattggtgccaagtaggtgttctgccgacggcatcagccacgggccaaacgtttccttctgcccgtaagccgtaaacacagtcggaaataatgcagcggtcagaaaaaggctcaaaaccacgatgccaaggagaagcggaatatgctgttttctcaagccggaccacctccgaagcgtaccttggggtcaataagaatgcagatcaggtccgtcacgacaatggagatcgtcatgatcgccgttgtgacaaacaggatgccctgcatcagtgggtaatccaacgtatagacggcatccgagagcaagctccccataccgccgatggaaaacagcttctccacaaccagagaaccgccgatacaggtgctgacgctcatgcctaccatggtgataaagggctgggcaacgttcttcagaatataaccaaattgaatcttactgtcggacaagcctcgttccttggcatagagcacatatttttcctccgtcacctgtcggacggtgttccgcatcaataggtaccgggagggtgcggcggcgacggtcagtgtcagcaccgggagaatcagatgatggatccggtcccagaagtacccggccgttccgggaacagccccggcactgttgagtcctgtatagggaaaccaccgctgccggaagcagaacaggatcaacagcaccagagcgatcaaaaatgtgggcatcgtattgacgatgatctggaatgtagtcgaaatcttctcaaagctgctgccttttttgtagccgcagcggagcccccacaaaagaccgatgaccgtgctgagcagcacggcaggcagggtgatctgtaaggtgtagcccagccgctgcccaatcagggctgaaaccgtggcttcctttttgaaggaatagcccagtgtaccgtctgcaagggagcgcagatagtacccgaactgcacgaataccggcttatccagatggagggcctgccggtaataagctacctgagcaggggtcatatcctcctcggaaaagccggtcagataagcaatggggttccccggcagaagccggggcagaaagaagttcagaacgatcacgatcaggaagcacaccagtgccagaatcaggtttttacgatactttttcaccggtgtgcctcctgcgtgcaaaaattatttcttggtgatgctgaaccagttgttgacgttgttcagaccgaatacagcatccacggtcacattgtccagcttggaagaataggccagcatcatattgtcccaatacagggcaatcagcggcatatgggccgcgtagtagtcctggagctttgctgcgccggtgtaatattcctcaatggtcttggcggccttcagttcgtccagaatggaggaaaaggcttcgtcgaacacctggcagccgccctgcacggcgtgattgccgtccacatagatggagccaaggccgttgcccatgcccatgccggcggcggtatagccatagatcgccgcttccatggtgatattgttctcggagaacttgttgctggttttggcattgtaggcatccttgtctacggcgtccagattcacctgaattccaaaggcctccagctgggtcttgatcatttcggcgtagcccacatgggtctcctttgcggcgttgaccgtcagcgtaaaggcagcagccgcaccgtcggcgttcacgtagaagccgtcggcattcttttcggtgtaacccgcagccttcatatactcgtccgcttttgcagtatcggtggtcagtttctccgtgtccgtatagcccaccgtggtggagggtacaaagccccggttggggatctcagcataggcgctgccgaaataggtcttgaattcctcgtagttcagtgcataggaaactgcctgacgcaggttttcgtcagagaacaggccctttgcgttgttaaaggccaggaccgcaggcgcattggccgcagccacattgacaagcgagacattggtatcggtggagagtacatcctgataggttcctgccacaccggtggagtaggcccagaccatgtcgatgtcgccctgctggagcgccaggtacatggtatcctcgttgccgaaaagctgatagacgattttctccacattgggcttctggggatagtattcattgactgcgaaggtaatggtcccggcttccttgttgaaggattccagcacataggggccgcaggtgatgcggccttcggccgccgtgacggtattctt

SEQ ID NO: 11149 - DNA, 5185 bp, Unknown
  gut microbiota DNA sequence
aggtcgtgggggtggtgccgtttgtaatgccttccttgactgcccagaaaacggcatccatgtagtagtccgatgcgatgtccgtgaacgggttattgctatcgctggcatacggctcgccctcactgcgccaaaggaaggtgacgatctgcgcgcgggtgcagttttcgtccgggctgaaggtggtggtgccggtaccattggtgatcttgttttccacggcccagagcacggccttttcatagtagctgccgggctttacgtcccggaacggcatattggtcgttttcggttcgggctgacccgatgcgcgccacaggaaggtcacggcgtgcgcacgggtgcaggtgccctcgggctcaaaatgcgtcgcatccacgccggaggtaatgccgtttgccaccgcccaaagcaccgggtcatagtagtatgttccctcggcaacgtcgacgaagggattggtcggctttgcttccaccttcgcaaaaaccgcctcgatggtatggttggccgtgacgttcttgaaggtgtacgacgtcaccgcgccgacgtccgttccgtctaccagcaccttggaaacggtatagccgctgttcggttggatggcaaaggcttgatccgcgccggccttgacggtgacgctgccggagggcgtgattgtgccgttggcacctgccttggccgtgataacgggatcctcctgcacggggttgccctcggcggtcatggtttcagtccagaagaacttattctcccagtccagcttgcacggcgtgtcgttgaggtagaacttggcgcccttcgcgaccccgacgccgctaaggtcataggagacatagataaagcactggtattcgcagttctcaccgtccgacgtttttcctgcctggaaggtaaagggcttatcggaatagtacctccagtcgtcatagcacttcagccaatcgacgcgctcgagcttcatgtacggcggcaggccgtcgatcttgcagtagtcactgcccggtgcggggctttcgcctgcgacaggtgccttcacggacagattcaggttggtcagctcgagccggttcagccaaaggccgcccagattggtgtctgactcgtcgtgcagcttatagcatgcgccggcgctgatgttgtccatgtccatccagtcgtcgttccaaatggcctccgcccattttccgggcttccactcctcattggcaaatttcagcgttccggtgccgctgcggaacacatagccgggctttgcctcgactatgcagtagagataatagggggcgccggtctcgtcgagcagctcatccggccacaggaagctgtcatagatggtagagccggaggagcggatgtattcgctgaccttcttaacggtgatggtgtatttgctcggctcatacgactccacatagatgtcattgacgcgattataatagaccaggccgcgcacgatgccctttgcctcggtgatcagctcgcactcctgtgcctccacgccgacgacgcaggtctgaccgccgtccgtgctgtagagccacgtcgccgtgatcttgttcgcgccgacgacgttgaatttcgtgtccttcgtcagatagaagccttgcttcgccttcagaaccacgctcttgttgcgcacggctccgttgtccgcccagtacacctgactggaaacggtgcagtcttcgccctcggagacggtaatcgggctgtcggtcgcggcggaggtggcggtcaggtcgccgtccttcaccgtcagcgtgacctcgggaatggcgacatcggtctccgacatcatccggtagcgcatcaggaacgcattggaagcgccgctcagtctcagcggctcgccgtccttataaagctcaacggtgatccccagcttctgcacctccgtctggtagctatagctattcacagggatagtctgaaacaagagattgttattgtagctgctggcggtgacgggataatccgtaccgttgagcgtgtacttgatcttatagctgtagcccgcgtccctcatcgcctccggcagggggttccagtagaaccggagttgctttttcggattgagcgcgtacagcggagcgccgctgtagccgcccgtcacgtccatctggtgcggcacataggccggcgcaccgttgacctccaccttgaccagaccgaaggcgttggtgcagacgtcggtgtaggccgtgccgctgtaggacgagaaggcgacgcgcttatagtcatcaagattcttggttgacagggcaatgatatactccttcgagatggagttggccatgtattcgctcttgatgtccttctgacggtagatcaggcgggtccgctcgtcggggcgaagcagagcggtcctctccgggaacattgcggcaaaggcaaagttttccagggtctgctcgctgctgctgagcgcgaaattctccgtgaagaggccgcggccgaagctgccgccgcggatgctgatggggaaagaccgcccctccgtgatggtctcgctgccctttttaacgacgataccgcccttgaacttgccgccgttgatcacggctttcggcttgcttatcccgtccgtccgggtggcgtaggtgaagccgaccagcccctcgaactcgccgccgttgaattcggccttgcagttggacgacagcagggcggaatagacataggggatgccgaccttcggggagatggcgtcgaccttgccgccgttaaagacgaccttcgcgtcgcccttgccctcgacgaccacaatgctgtttttggcaagaccgttatcgacgccgatccgcccgctgttgagcgtgaagcttccggtctcggcgaggatcagcacctgcttgctgctggccgtattgggattggcgtcgatgtagagcttgccgccgccgcggctgtccttgaccgacaggtcgcccgtgacgcggatggcagccgggagcggagaggttctgctgaaaaaggtcacggaatagccgtcaagatccagttgaaccgttccagtctgttggatggacttgttatatcccgcgccgtcattgaaatccttggtgttaatgttggcaccgagcttgacataggtgacgccggagctcagggcagagctgagctccgcataggtggttacgattcttgggtcgccttcggtggtgccgctgcctgcggcagaggcgatgctccccaaggcggggaggaggccgatcagcattgccaatgaaagcagtaagctgaatatcctgcgttgggtgattgatttcatcttgattcctccttttacattgtgtattgtataaattgagtccatcaggtggtgttacagagacgttttcggcgattgccctgcaacggaaatgcgttgtaggccggccgacacgcctccggctgcgcccaatgctgttttccttcgtcccgcttttatgtactctcttcctcactttgctatgcacaaagcattctcatttctcacccatcctttcctcaaagcgtgtcgattacgcctgcaaggtaggttggcgataccgacgcatagataaaaccatcggccagctgatccttcaccgtctgccgcacctcagaagcaagcagttcgtctgtgctctcatctaccagaagcaggaccttgcaggcccaaccgagccgccttacagcactgcagagcctgagtctctcgctcagcttccagaggccctgtcggatgacctccatcaccaacacgttggcacggcaggtacggcacagagcaagcgtttcctccggctttggagaacggtagataaggaaatccatgtcgcatcccgaaagcgactgcgtgaccgcctccgccaggagtccgttcttcatatccaacacaattcttcgcatctgtgcttttcaccgccttttttccttttgcagtttccgtttttattttatccgttatcgctcttttttgcccccaccgattggatagggtttgcaattatttttttcaaaggccattgcctgactcgtttctctcagcaaagggtgcaaaactgtgttgcctttttccatccgcatgatatactatcaatacggatgtgcagaatggagaggtatgcggcatgagcaaagtgacaaaaaaagagatttttgtatgtgctgggcgtgttggcgctcattgcgtttgccatgtggctccgctacgccagccggcatatttttcattctccggctgtcaaccacctgcgaagcggaatctatgtgtttttgttcagcgcgtggtgctactccatctggatgcgcatcgtgcagacgcaggtgcggcgctatctgttggcaatctcagtgctgatggtgctgtggatcctgctgcgctcaatcaaattttccattgataacatggatgccgggcgctggctgtggtacttctactatctcccgatgctgctcatccccatgctgtcggtctttgtttccctgtctctgggcaagggagaggattttcagctgccgcgatggaccaagcttctgtattttccaacgctgctgcttcttttgctcgttctgaccaatgatctgcaccagcaggtgttttccttcccgtccggcgttttatcggatcaggagtatcggtatgaaggcggctatttcttcgtgctgggttgggtggctctatgcgcggggttcgcgttgctttcgatggtgaaaaactgccgcatcccgcgcagcaggagaattcgctggctgccgctggttccgcttgcgctttcgttggtctatgcttgcatgtatattaaaaaggtctattgggtctgggttctcgcgggtgatatgacggtgtcgcagtgcctgatctttgcgagcatctttgaatgctgcattcaatgcgggctgattcagtctaacctcggatacgacgaactttttgaggcaacgagtttgcctgtccagatcacggatcctgcattttgcccccaatatgcgtctgtttccatgcaggaggctttgccgcaaagcgagctgcagcagatccggcaggataccgtccatctgagcgacgatacgcttttgaagcggcacaagctgcgccgcggctgggtgttctggaaggaggacatctccgcgctgaatcaggtccaaaaggagctggagctgacaagagatgagctgcgagataccggcgacgtttactgatgtgcgataaagaagt

SEQ ID NO: 11150 - DNA, 13073 bp, Unknown
  gut microbiota DNA sequence
aatgaaatccacccaccgccgcagcgatctcacatgccggaggcggatatcacacagcacagcggtatttccctcacccgcaagggtagattatactgaaaaagagcacttgcatcagcaagtgctctttttcctggcggagagggcgggattcgaacccgcgagacgcttttaacgcctacacgatttccagtcgtgcgccttcggccagctcagccacctctccacttttgcgccgatatcagatcactgaaatcagcttgcatatcatactcgatttttctccaaaagtcaagtcttttctgagattttttcgcgaacgcgcgggaatctttggactacccattgactttgtgggtaaaatatgatatcatcctattaacctaccgggatgatgggaaattcttccggaggcatcttacaattccaactccggcccggccggagacaccataaaggagaatccacatgaacgtttatgctgacaatgctgccaccacgcggatgagtcaggccgccgtggatgccatgctgcccttcctgcgcgagagctatggcaacccctcgagcctgtatacgctggggcagaaggctgcggagtccctgcaggcttcgcgcgagacgatggcaaagtaccttggctgcgacgcccgggagatcacgttcacgtccggcggcagcgaggcggacaatcaggccctgctgacggcggccacgctcggcgcgcgcaagggcaaaaagcacatcatctccaccgcctttgagcatcatgccatcctgcacagcctgaagcggctggagaagcagggctttgaggtcacgctgctcgatgttcatgaaaacggcctcgtcacggcccagcaggtcgcggacgccatccgcgaggatacctgcctcgtgacggtcatgtatgcaaacaacgagatcggcacgatccagccgattgccgagatcggcgccgtctgccgcgagcgcggcgtcctgttccacaccgatgcggtgcaggctgccggtcatctgcccatcaacgtccgcgagcagaacatcgacatgctttccctttcggcccacaagttccacggcccgaagggcgtcggccttctgtacgcgcgcaagggcattttcctgacgaacctcatcgagggcggcgcgcaggagcgcggcaagcgcgccggtaccgagaacgtcggcgggatcgccggcatggctgcggctttccgcgaggcctgtgagcatatggatgagaacatcgccaaggtcacggccctgcgggacaagctcatcgacggcctgtcgaaaattccgcactgtgcgctcaacggcgaccgcgaacatcgcctgcccggcaatgtgaacttctgctttgagggcatcgagggcgagtccatgctcctgctgctcgacggcaagggcatctgcgcttcgtccggctctgcctgtacgtccggctcgcttgacccgagccatgtgctgctggccatcggccgcccgcatgaggtcgcgcacggctcgctgcgcctgacgctctgcgagagcaacacggaagcggagatcgaccatattctggcctgcgtgccggagatcgtcgcctatctgcgcggcatgtccccggtctggcgcgatctggtcgagggcaagaaatcgtttattctctgaggaggaatcagttatggcactgtatagcgaaaaagtgatggaccatttccagcatccgcgcaatgtcggcatcatcgagaatgccgatggcatcggtgaggtcggcaatgccaagtgcggcgatatcatgaagatctacctgaagatcgacgacgacaaaatttccgatgtcaagttcgaaaccttcggctgcggctccgccatcgcctcgagctccatggcgacggagctcatcaagggcaagcctctgtcccaggcccttgagctgacgaacaaggctgttgccgaggcgctggacggactgcccgcgtacaagatgcactgctccgttctggcggaggaggccatcaaggcagcggtgaaggactactacgacaagcacggcatcgcctatgacgagtccaagttcccggactgctcgcattgtgaccactgtgaagcctgagaagatcttgatcgcgatgagcggcggcgtggattccagcgtcgccgccctcctgttatctgaggcaggctgcgagtgtgtcggcgcgacgatgcggctgttccacaatgaggacgccggggtatcgcgcgaaaagagctgctgctcgctcgaagacgtcgaggatgcgcgcagcgtggcctatcagctcggtatgccgttctatgtgttcaatttcacggacggcttcggcgagcaggtgatggaccgctttgtggatgcctatgagcgcggtgcgacaccgaacccctgcatcgactgcaaccgctacatgaaattcgccaaactcgtcgagcgcgcggagctgcttggctgtgatgccgtcgccacggggcactatgcccgcatcgagcaggaaaacggccgctggctcctgaaaaaggccgtggacgacagcaaggaccagagctatgtgctgtatttcctgaatcagcaccagctggcgcatctgcgcttcccgctcggcacgctgcacaagaccgaggcgcgtgagattgccgagaagcatggccttgtaaacgccagaaagcgcgacagtcaggatatctgcttcgtgccggacggcgactatgcccgcgtcattgagctgcgcaccggccaaaaggcgaagcccggcccattcgtggaccgggagggccatgtgctgggcgagcacgcaggcatcatccactatacgatcggccagcgcaagggactgggcctcggcatcgagcatccgtattatgtctgcgagaagcgcccggaggacaacaccgtcgtgctcggcccgaacgaggccctgttcaccacggagctggatgcgggggacttcaactggatcgcctatgatacgccgcccgctgtgctgcacgtcaaggcaaaaatccgctaccgccagcaggagcagcctgcgaccgtcacgcagaatccggacggcacagtgcacgtctcgtttgacgagccgcagcgcgccattgcacgcgggcaggctgttgtgctgtatgacggcgataccgtcgttggcggcggaacgatcctctgaggagaaatacgcaatgatgatttcaacaaagggccgctatgcgctgcgcgtcatgatcgatctggcggaaagcgggctggaggaatatgtccccctgaaggagatcgcagaccgcgaggagatctccagaaaatatctggagaatatcatgaccgtcctgtcgaaggccgggctcgtcgatgctattcacggcaagggcggcggctaccggctgaatcgccgaccggaggaatacaccttggccgaaattctgaacctgacggagggcacgctggcccctgtttcgtgcatggaaaacggtcagtgctcctgcgaccgcacgcaggactgccgcacgaaaccgatctggacggagctggacaatctcattcagaattatctggaaagcgtaacgcttgcggcgttcctgacaccacatttgagctaaggaaactctgaataaatcatctgcggtggatggcggatattttccgccaatccatcggtttgaaaaactagaaatacacaaagtattcctgcatttttcaaaccttgacttgacagaaaatctctcgccatccactcttgctgatttaatcagagcttccctaaattttcccggctgccatcatttggcagccgggctgattttatgggtcagacgagcgggatgagctcggtgccgccttcctcaatggcatgggtcgcgccgccctgatccgcgtccgcgaagaagtaccagccgtttccggcataggtgatgctgaagaagctgacgagatagtcgtccgtatagtaggcatccggatagtatttgtagctgccgtcggagaatgtcccgatgggatcaaaacggaggcagttgttgaagcagacgatctcgtccccatttttgccgaagcaatatccaaggcgctgcaatttggcgctgtcgagcatgctgtttgtcgcgagctcaagcgtcgaaaggtcgtagacggagtactcggcgccgcggtcgatgagctcatagcgcgagacgagcagcaggggcgtcccgctccggtcgtccgtaccggcgagcatggtcgtcggataggtgccgttgccctcgatcgtgagcagcaggctgtcgggatcgtctgccagcgtgacctgcaggtcggcgcggctgcctctgttgtaggtgtagatcaggtaatcgccggtcacggccgcttcacggatgtccttgtcgaagacgatgcagttttcctcctcgggcaccgcgccgatctttgcgcggaacagaccgttttcgccggacttcgtgtagtacatccagccgccgcgcagggcgcggatgccgatggagagggcagcgcctgtgaacgtctgcgactcgaccatgccgtagtcggccgccatgccgtcccggccctcggccagatcgacatagcacgactgcccgccgctgctcaggtacatcctcccggcgtccgtgatgccaatgatgcggacgtcgccccggatctgcgcctcgcagaagagcgtatagtccgtcatgtccgtagtcgtgcggcagagattgtcgtcccggtccacataatagaaatagccgccgtattccacggccagcgcgtcatagggcgcgagatatactacggtttccggcccctcccacacaggcgggtccgtctccacgggcgccggatcggaggactcctcttcgccggcccagtcctgctcaccggtgtcttctgcattttccatgttctgcgtgtcttcggtgtccgtttgcgatcctgtggtcgcaggctccgtggtgtggggtttgtcgcccccactgacgatcggggcaagtttgctgcagccgaaaagtccggctgcaagggcgagggccagcagcagagcggctgctgtgcggatgcattttctcatgattttctttctcctcgttctgatttgcgggataccgcggctatgattatagcggaaaacaggagaaagaagaaagtacaggcgcatcatccgcgtttttttcggcataaacaacaaacgggccgacgaatgaatcgtcagcccgcctgatccggagatggcacgccggaagggactcgaacccccaaccctcagaaccggaatctgatgctctatccattgagccaccggcgcatttgcatccattattatagcagatagtttggacaaagtaaagaagaaaaatgggaaaacttgccgggcaggggagagaacatccgtcaaatttccgtggaatgtattgtttttcgccgttccgcgtgctataatgagaaaaaactcccgaatcgggagagaatcgggaggaatggcaatggcagcgacgacggatagcttccgcagctccctgcacggcttcaaccgcatggatgtggtgcagttcattcagaagacgacgagcgagcatgagctggagctgcgccgcctggcggaggagcgcacccgccagcaggaggagctggagcagcagaagaaggagcttgccgctcggcaggaggagtcggagcggcagaagcaggagctttcgcagcttcgcgccgagcttgccgagctgcgtgaacagaacgctgcgctccggcaggcgcaggagcctgcagagcggcctgcagcggccgttcagaagccgcgctatgatgagatggagctgacggcttaccgccgtgcagagcagacagagcgcatggcgcgcgagcgtgccgcggcgtctgccgtccggatgcgcagcgcgtttgagcaggccgaggaaaagctcaaggccagacggcaggacattacaggcctgtccgatcggttccacgcggattatgagcgcctgaagcaggcgcttgacagtgtgcaggacgtattccgcgagtcctctgagcggctgcatgcggcagcggagctctgctcggagaaaaagccggaagaaaaataaaagatcgaaatgaaaatcacgcaggctgacaatcggcctgcgtgatttgctgtttcagaggggacttcagcagccgaacagggctgcggccttttccatccgctccgcaatgggcacgccgaacgggcagcgggactcacaggagcggcagccgatgcaggccgaggcggtgtgctccagcgcctcgtagtgcgagcgcacggtggcggggacctccggctgcatggtggcgagatcgtagaatttgttgatcatgccgatgtcgaggccggcagggcagggcttgcagtgcccgcagtaggtgcactggccacgataggcgtggagcggcgcgttggcgatgaccgaagcgaagtccttttcctcgtgcgaggcgttctcgtaggcaacggcctgattgacctgttccttcgtgtcatagccgcataggaccgagctgacggcagggcgggtcagggcatagtggatgcactgcaccggcgtcaggcttacgccgaatggggagcgcttcgcgtcgaatagcctgcctccggcgaagggcttcatcaccgtgatgccgacgtcgtgctgctcgcagatgctgtagagcgctgcgtgctcgggatcgatccccttgagctctgcgctgaattcctccgcgaacaacgtgtcgctatcctcactggcgggcagcatatcgaaggcggggttgatgctgaacaggatcatctcgacatagccggactccgcagccagctttgcgaccttcgggttatgcgagctgatgccgatatggcggatgacaccggcctttttgaggcccatgatgtaatccagataatccgagtgctggatctgggcccaatcctgctcggagtccacatagtggatcatgccgagatcgatgtagtccgtctgcaggcgctgcagaaggtcttcgaacgccgggcgcacgtattgtatgtctcggcttcggaaatattgaccgtccttccaggtggagccgatatggccctggatataccagtggctgcggttgtcccggatgcctttgccgatgatatcccgggatgtcgggtctgccatccagcagtcgagaatgttgatcccctgtgcggcggcgtggtggatcagctcaatgccctctgcctcggggtgccgctccagccattccccaccgaagccaatctcactgacctgcagcccggtctttcccaatcttctgtacctcatgatggttactcctcccactatatttgcttcattataccatgggaaatgcgtggtatcaactgtaaaaaaacctgcgcaggagcttgtcctgcgcaggggagtatgttccgctttagccgacgatgcggcgggcaccgatgtaacgggctgcgtaccagctttccgagaggctcgagatcttgacgccggagcgggaattggccgcatggacgaattcgccgccgccgatgtacatgccgacgtgggaagcggacgagccgctgccgaagaagacgagatcaccgggaatcaggctgtcataggagacgtagtagccgtttgcgagctgagcggtcgcggtgcggttgatgctgtagccgaactggcggtagatgtactgcacaaagccggagcagtcaaagccggagggagaagtgccgccgtagacgtaaggataaccgacgaacgacatgccgtaattcgcgatctgcgtgccaagtgaggtgctgctcgaggagctgctgcccgaggaataggaatcgtcatagccggtggcggaggagtagctcgagccgctgctcgaggaaccgctgttgcagtagggcttttccagcagggtgacgaggtcgctgcggatgtagccgatctggccgttgtacttcaccttgtaccagccgcagttgaagccgaagatgaagaccttcgcgccgctgcctgcctgatcaacaagaccggaggaagtggacgggccgctgcggatattggcgagatagggatcgacggagccgtagcccagctcgatgttctcgcgctccttgaaggtgatatagtcggagtgcatgtagccgatcttcagattgtagttgaccagataccagtctccgacctgacggatgactacgacgttgtctccgttgtgcgccgtcgagagaatatcggagctggtagaagcctgagagcgaaggcgaaggccgccgctcgcttcgacaatgccaatgccggttttcagctccgtggcgcctgccgtgatcgcaagcgctgcaacagcggcgaccgtggcggcaaggatcaacaggaccttgatcatccgtttcatgtaaaagtacctcccaaacagaaattgtgcttattttgcgttcagtgcacgttccagccacacacagccaacatccaaagccgtgtagaagccgtccttttccgtcttcttcaccacgcggtcgcgcgccttggcggcgggatccgtgcgctggagctggacggagacctttgttgcaagctcgagatcgtcgagcttttttgtttcgaggatctgcagcatgacgatgaattcgtctgccatggaaccgtaataaaccagattgtccttccgcatcagggggtggcccttgtaggtgaggacttcatttttttcggacattcgggaacctccaaataaaatgtaaccgaattgtaacacatagaaaccgaattgtcaatagcaaattcggaatttctgccgatttgtaatcattgcggcggaaagcgttacaatggtccgggaatgcgatgctggaactgtcggatgttttttgcttgggagggcagaaaaagaggggaggcctctacttgccgcagaagcctccccgggcggggaactaatcaaacaggtagtgccggacaagctcctgaagaagctcgtcgcgatcgagcttgcagatgaggctgcgagcgttattgtggttggtgatgtaggtcggatcctcggaaagaagatagcccacgatctgattgatcggattatagcccttttccgtgagggagcgatagacctccgtgaggatctgcttcatctccgcactgttgtcgaccggcacgctgaatttgatcgtgttatgatccaattacgtccgcctcctttcttcctttcctctatcatatccgaaattcgggataaagtaaaggaaaaatgcgtaaacaaattggaaacaaaacggtgctcagcggagcttggcgttcagctctttttccagagcggccagaacggcggacacgacgccgtcggaatcggcatccgtcagcgtgcggtcgtctgcacggagcgtcaggcggaaggccgcgctcttcgagccggaagcgatgcccttgccgcggtagatatcgaacagctccacgctgcgcagcagcttgccgcctgcggtgcggatgcagtcggacagggcggcgaccgttacggcctcgtcgcagacgacggcgatgtcgcgggtgacggccgggtactttggcagcggcgtataggtcttttccggcagctgcagggacagcagggccgtgaagttcagctctgcggcaaaaatctcgccgtcaatgccgtagctgcgggccacgagcggatggatctggccgaagcagccgaggtcgacgccgcccacgctgacgcgggcgcagcggccgggatggaacgtcgggtcgtgcttctcggcggtatagcgggcctcggggacattcatgccgcgcaggaaggcctcgatctcgcccttcatcttgaagaagtcctcgtgctcgccgtaggtgccgagcaccagatgcttcggttcgtccggcaggatctggccgggcttcggcaggtagaccttcgccagctcatagagcttgacggcatcgttgtgataggcgttgttgcgcgccaaaatggcgagcatggacggcagtgcgacggtgcgcatgatggaggcgtcctcgccgagcgggttctggatgcgcatggcattgcgcagggaagagtcctccggcaggcggatctgatcgaagatggacggggagacgaaggaatacgtcaggatctcgctgtagccgaggctgcggcacagggaaccggcgcggttctccagcttcatggcctccgtatagccgccctccgtggcagcgccgcggaacgtcgtcgtggggatgttgttgtagccgaacaggcggccgacctcctcggcgatgtccgccatgccgaccagatcgggacgccacgacggcacgcggatcatgcggccctcgacgggaatctccagacggcgcagatattcgaccatgtcggcctcggagatgtccgtgccgagcagggcattgatgcggtccggctccagctcgatggtgcgcggctcggggatgtcgttgagcacgtcgatgacgccgtccatgacctcaccggcgcccagcagctcgacgagctcgcaggcgcggtccacggcggagagcgtcagcagcggatcgatgttcttttcaaacttgccggaggcctccgtgcgcatgccgagggcaagggccgtctggcggatggaggtgccgttgaagttcgcggattcaaagacgacgtcgaccgtatcgtccatgatctcgctgttctcgccgcccatgatgccggcaaggccgatgggcttcgtctcgtcggcgatgacgagcatgccgggcgtcagggtgcggacattgccgtcgagcgtcgtcaggacctcgcccggttcgctgcggcggacgacgatcttgccggagccgacatagcggtagtcaaaggcatgcatcggctggccgtattccagcatgacatagtttgtgatatcgacgatgttattgatcgggcggacgccgttggcgcgcaggcgctggcgcagccacttcggcgacggggcgatcttcacattgcgcaccatgcgcgcggtgtagcggcggcacaggtcctctgcgggaacctcgacctccagcagctcggaaagctcgcccgcagcgccgccgcgcacgaccgggtcgtgatggcgcatcggcttgttgaaggcggcagcggcctcgcgggccagaccgaggatggaatagcagtccgggcggttgttcgtgatctcaaagtccacaacggtgtcatcgttgccgatgacggtgttgatgtcgtcgccgggcttgcagtcctcctgcaggatccagatgccgtcctcaatggcataggggaagtcgttgagcgtcaggccgagctccttcagggagcagagcatgccgttcgatacttcgccgcgcagcttgccctttgtgatgtgcacgccgccgggcagccaggaattgtgctgggccacggggacaaggtcgccctcgtgtacgttctgcgcgccggtgacgatctgcacgggctcgcccgcgccgacgtcgatctggcagacccacatgtggtcggagttcgtatggcgcgtgatggacacgacgcggccgacgacgacattgcgcagctcggcatcgagccgctcataggtctcgaccttctgaccggcgatggtcatggtctcgacaaactcccgatccggcacgccggagagatccacgaattcttcgttgagccattttctgttcagtttcattgctctacctcctcagaactgcgaaaggaaccgcacgtcgttgtcaaagatcaggcgcaggtcgttgatgcgcagacggcccatggccatgcgctccagaccgatgccgaaggcaaagccggagtacttcttcgggtcaatgccgcagccctcgagcaccttcgggtgcaccataccggcgcccagcagctcgatccaaccctcgccatggcaggtggagcagacctgaccggccgtctcgcccgtgccgtggcacttgaagcactgcatgtcgacctcgcagcttggctccgtgaacgggaaatgatgcgggcggaagcgcacgacggcgtcctcgccgtacaggcgcttgatgagcgtctccagcgcgcccttcaggtcgcccatcgtgatgccctcgtcgacgacgaggccttcgatctgatggaacatcggggagtgcgtggcgtcggcctcatccttgcggaacacgcggccgggggccagcatgcggatgggcggcttctgctgctccatcacgcggatctgcatggggctggtctgcgtgcgcagcaggacggaatcgtcgtcgtcaaaatagaaggtgtcggagcggtcgcgggagggatggccctcttcgatgttcagcttcgtgaagttgtaggcggcctcctcgatctccggcccgtcgacgatctgatagcccatgccgatgaagatctccttgacctcctgcagcacgcggttcatcgggtgctggtggcccatttccacgggcttgcctgggatggtgacatccacggcctcggcctcgagctttgcctcgagcgcggcggcatccagcgcggcgcggcgcttctccagtgcctcctccagcttggcgcggacggcgtttgccatctggcccatgacggggcgctcctcggcagacagcttgcccatctgcttcaggacggcagtcagctcgccctttttgccaagcacgcgcacgcgcacggcatccagcgcggacatatctgccgccgctgcgaggtcagccagtgctttcgccttgatctgttccagttgttctttcatgttggctctcctttttgcaaagaaatgttgcagggaaaagaaaaagtcctccgtccgaaaggggacgaaagacagaacttccgcggtaccacccgccattcgccgctgacacggcgcactcaaaccgataacggagcgacccgtccgtgcctaattgccgcggagcacatgctccgcagggcgttcagccggaagctcacgggggaaggcctgcactgcctgcggggagtgctcacagcaacgcaccctctctgagcccgcattctgcagccggcggcccggtcacagcttttcttctgtatcgccaaaattttaacatatttcttcaaaggttgcaagggaaatccgccggggatttgactatttttttgcggtacattataataatagcgaaaaaagctgcattgc

SEQ ID NO: 11151 - DNA, 10231 bp, Unknown
  gut microbiota DNA sequence
cccatcatcacgaccgatatggccgtctatgctgcaggcaacgccgacgtctacatcagtcagggcacggcctcctatgactccgcggcccgcgccattcactggacggtcggcaatgtcagcgagcaggataagcccgtcatgaagtaccgggtcaccatcaagtccggttataacccgtccactggtgaaacgcttctcacaaatgagcaggccatcttctcttacatcgactacctcggccgcaatgccgaagccgaatttccgaagcccgaggtcaccgtgggcggcggtaagctgctcgtgcactggtatcaggtaaacgagaagggccagcctgtcaacgcgcagggcaccgtggtcgagtcccccgccctcgcccatcaggtccagcctgcacagtaccacaacgcgaacggttcgaccggtctgcgctataacactccctataccgtggaccacaagatcttcgacggctacacctactacggcagttatatcctgaatgacggcagcctgaccgaaggcgacagcgccaccgtcacgctgacggccgtgagctccaaccaggacctctggttcgcctatgggcgtgatttcaaggtcgcgcatgtgcagaacggcaccgtcgttcagaccgacacccacgccgtgacggagcattttgatctcacggcgcaggtactcaccgggcatctctatggcggcgcattctctgccgaagcctgtggcgcagacagtgtccagagctttgccgccgggcagaatgctatggacttcaccccggaggccggagccacctactatatctgggaaccgagtgatgtttatctcgcgccgcgtaactataacgtctggcagcatgtctacggcggctcgaacggcgagcgcggcgtcatcgcaacgtatctgctgacgaccattgaccgcacgctctatcaggaggtcggcttcctgtccggcggcagcagctatgtgtccgaaaaggacggcgcgtcgattgcctacggcgtcgtgaatgcaaacaagggcagcaagctttaccagcagctctttgtccgcgacggcagcttaaacgcgactgagggaatcgaggccacgagccgcgacgacggctacattggcctgtatcgctggacggacggcgcgttctatcagaaggacgccgcattctccttccagccctattggatcacgcttgacggcatccgtgtcaccggcacgagcgtgcgcacctgcacctatcgcggcaccggcacaacggatgatcatcagagtcttggcatctcagctaaaacgaccggctcggcctgcacggtagtctctgctgccgaaaccaccatccgcttcgccgagacctattcccttgacgctgcgacggacgcccctgtcgctccgcccgagccggagcccaaaactgtcacgctgaccctgcacgagggcacagacacccgcagcatcaccgtcctgacaggcgatcagcgcggcaaggtcgccccggccgagcttggcggcaaggtcttcgcaggctggtatacagacgacgcctaccgcacgcctgccgatctttccaatgtgcaggagaaccgcacgctctacggcaagtacgtcagctataattacctgcgcgtggaatatcagcgcaacagcttcctgcagggcaacagcatcacgctgctctccgccgtcgacgggcgcggctttgcagagacgggctttgtcatcaacggaaagcgcgtcgccgtaccgcagctgacggagcgcttccgcgtctttacggcgcagatggtctttggccgcagcgtcagccgtgacgctctgctgatgacgatgccctactccctgcagggcctgcagcgcggcgctgcgatcgagatcacgccgtactgggtcacgccggacggaacgaccgtctacggcgaggcgcgcacgctgatctacgagtacttcaccctccgtgggtaagaacaggaggcaatcacaatggatgatattatgaatgcagagctgacagacattctgaaagccaataatattgaaattcccgtttcgggcggcggcggtctgcagagcatcggccccggcatgtatctcttcaccatgcctgacggcaggcagatcacgttcaatgacgcaggcgagatcaccaatattcagtaagcattcccggggaggagattcctccccggcaaaggagacaaaatggagctgaccgtcgagctggccgggattccgatccgtctatccctgcgcagcgcagcttatgcgccgtttctgcagccgttccggacggaggctgacccggtcgcagccgtccgggtcccggaggatgcgctcaaagaggccgcaccgcactacgaggccggtaccacgccggagcaggtcgaatatctggagctcggtcctcgtgtctgcgatgccctgctcccctacggccgcatacttttccacggtgctgccattctctggcgcgggcgcgtatgggtttttaccgcaaacagcgggaccggaaaaacgacgcagtacatgctctggaagctgtgcttcggcagcgaaataaaaattctgaacggagataagcccctgctggaattccgcgagggtggcattctcatccatccctcgccctggcgcggaaaggagggcctcggctctctggatgctgccccgctcggcggcatcattctgctggagcagagcgaagagaaccgcatgcgccgtctgctcccggctgaggcagccgggccgctgctgacgcagctgctgtttacccgcaagaacgcggacgatgtccgcgcagcctgtgcgctggaggagcgcctgctggcgcaggtgcccgtctggctgctgcaaaaccgcggcgacgcggcctcggccgctctgtgccgcgataccctgatggaggcgcaaacatgacatacaccttacagaaagatgtggcgctcgtgaccgtgtgcgacgagcattttctggttgccgccgggcaggcccgcggcaaggtccctgccgtgaagggcatcaaccggccgggagcctatttctggaaccttctgcagcagaagctgccggagaacgacattctccgccacacagtagcggattatcacattcccatcgagaaggccgcactggcactgcgccgcttcgccgcgctgctggccgccgagggctatctgaccatggcaggttgattctgaaacgctccgacttcgctgtcggggcgttttttgtgggaaaaagcttgtaatatgggcacgattcgagtataatagattgcaaatcgaattcagcgcaacgcttcggcggaccctgaaacacaagagaggttgaagtcattatggagctcgtaactgttcgagacctgttcaagcacaccgcagactacgccgggaagacggtctccgtcggcggctgggtgcgctccgtccgcgcgtccaagacgttcggctttatcgtcctgagtgacggcacgttcttccagccgctgcaggtcgtctatcatgatacgatggataattttgccgccatttccaagacgaacgtcggtgctgctctcatcgtccgcggcacactcgtcgagacgccggacgcccgtcagccctttgagctgcaggccgaggaggtcacggtcgagggcgcttccacgccggactatcccctgcagaaaaagcgccacacgctggaatatctgcgcacgatgacgcacctgcgcccgcgcacgaacaccttccaggccgtgttccgcgtccgcagcctcgctgcctatgccatccaccagttcttccaggagcgcggcttcgtctatgtccatacgccgctcatcaccggctccgactgtgagggcgcaggcgaaatgttccaggtcacgacgctggacctcaacaacgtacctcttacggaggacggcaaggtcgactacacgaaggactttttcaacaagccgacgaacctgaccgtctccggccagctcaacggcgagacctatgccatggccttccgcaacatctacacgttcggtccgacgttccgcgccgagaattccaacacgacgcgccacgccgccgagttctggatgatcgagccggagatcgcatttgccgacctgagcgatgatatgcgccttgccgaagacatgatcaagtatatcatctcctatgtgctcgaaaacgcaccggaggaaatgaacttcttcaaccagtttgtggacaagggcctgctggagcgcctgcaccacgtcatgacgtccgacttcggccatgtgacctacaccgaggccattgccctgctcgagccgcacaatgaccagttcgagtatccggtccattggggcagcgacctgcagaccgagcatgagcgctacctcaccgaggtcgtgttccagcgccccgttttcgtcacggactacccgaaggagatcaaggccttctacatgaagctgaacccggacggcaagaccgtcgctgccatggactgcctcgtccccggcatcggcgagatcatcggcggcagccagcgtgaggacgacctcgagacgctgcgcaaccgcatgcatgagcttggcctgaaggaagaggactacggcttctatcttgacctgcgcaagtacggctctgcccgccacgccggcttcggcctcggcttcgagcgctgcgtcatgtacctgaccggcatgggcaacatccgcgacgtcatccccttcccgcgcacggtcaataactgcgatctttgatcgtgatctcaataaagcagccgcaggcccgttaccggacctgcggcctcttttcgtcaaaaacgccgctgcagaaggcctgcagcggcgtttggttattcagcagtaaaaatcgcggatcttcttggcgcggctcgggtgacgcagctttcggatcgccttgttctcgatctggcggatgcgctcgcgcgtgacgccgaagatctggccgacctcctcgagcgtgtgtgtcttgccgtcgtacatgccgaagcgcaggcgcaggacgtctgcctcacgctctgtcagcgtgttgaggatctcgctgagcgcctcggccagcagcgtgttgctcgtggcatccgccgggcccggcgtgttgtcatcctcaacgaaggagccgatggtcgtatcctcctcgtcgccgaccggcgtatcgagcgacagcgtgtccgccgccgtgcgattcgcctcgatgatcttctcgatagggaggttcaactcctcggcgatctcctcaagcgtcggctcgcggccgagctcctgcacgagcttgcggttgcagcgcgtggccttgttgatgacctccaccatatgcaccggaacgcggatcgttcttgcctgatcggcaatggcgcgcgtgatcgcctgccggatccaccaggtcgcatatgtagagaatttatttccctttgtatagtcgaacttgtccaccgcgcggatcaggcccgtgttgccctcctgaatgaggtcgaggatatgcaggccgcggccggaatacttcttcgcaatggagacgacaaggcgcaggttcgcctcggtcagcttgttcttggcctcctgatcgccctcggcgacgcggcgggcaagatcctgctcctcctctgcggagagcagcggtacctgaccgatctccttcagatacatgcggacgggatcgtccagattatattctgctgccagctcgaccggatcaaccaatgattcttcctcatccaggtccgcgccggtcatgtcgaggtcatccagcaggccctgcatcggatcggaatcgctctcggtgtccccgctcacgatctgaatgccgatggattcaaacgtgtcgtagacctgttcgatcttatccacggaaagatccattttttccagcgcggccatcagctccgaggagctgagcataccgtcgcggcggcccttgctgatgagcgcgttcagaggagccatcagttcctctgtcgattttccgtttttcttcgaggtagccatagcgcacttccttgcagcttgataagatgcgctctttcgggcgcatcggaactcattataccgcgttttctgcgtcaaagcaagagtttttcagaatttttatcgaaaaaacgcagaaatattcccgttctgccgcagcccgtagcgcatggccatttccgtccggctatttcacaggattcccggttcgatctcacaatatacccgtctgctcgtctttttctgcgggctccggatcgggcaggacgccatggttaatgagctcgcagcggttgatgggcgtgccgagcgcgtagaatttttcctcgtagcccgtcatgatgccgacggggccgttctcgtgcagattgcgagtcaggttgcggatctccagcccgcaggcctcaaattcgccgagcgaccactcaaacagcggcgcattgtccgtcttgaagtggatttccccgttcaggcgcagcacgcgctggtagctcttcaggaaggtgtggaacgtcaggcggcgcttggcgttcttcttgcgcggccacgggtcgcagaagttcaggtagatcaggtccacctcgcccggcgcgaagtactcctccagtttggcggcatcgatgctcaggaaatagacgtttttcagtcccatggaaagggccttctccatcgccagcaccagtgcctcctgcacgcgctccacggcgacgaacagaacgtccggctccagcgcagccgtctcgaccgtgaactttcccttgccgcagccgatctccagccgcagctcgcgcgcctgaggcatcagcgagcgccagttgccgcgcagataagccgcgtcctccagccataccgaccggcaggcctccatccgcggcgcaagattctgtctttttctcattctcatggtgattctctcccggatccattctcgttttcctgcattataccagattttcgcacgcccgtaaagggaattgtgatctcagccgtagaaaagcttgcatttctcccccgtcccgtgtataatattagggcaatatccccgggcgtagctcagtttggtagagcgctagctttgggagctagatgccgcaggttcgaatcctgtcgcccggaccatttttcgaaaaaagccgccaaaacgtgttgtatttgggggcagaatgaactgcaaccgctttgcgatctgaggcggtaagaaaaagcggaagaaaacatcatgccagacgcttagacgcggagcaggatctgatgaggaatcggatttgctctgcgtcttttttgtcaaaattctctgaaatacagggcagagccgcgccgttctggctatgaggccatcaaaatcccgatataagcaccggccgtgcttttcccggatcaaaggaggaatcacagatgaactatattcggatcacaaaggaaaatattgacagggaacatatctgctgcgccatgtccggcaagcagagcattgcgaaaaaggaatggctcaggcagcgctttgaggaggggcttgttttttaccgcagtgaggaacggggcaaatgctttatcgaatacatcccggcagaaaacgcatgggtgccaattatggctgacggctggctctatatcaactgtctgtgggtatccggctccatgaagggccacggatactccaacgatctgctggaggagtgcatccgcgatgccagggcgcatgggaaaaacgggatctgtattctgtgcgccgagggccggaaacgggaattcctcgctgacccgaaattccttgcccacaagggattccgggttgcagacatctccgactgcgggatcgatctgatggttttgccgcttgtgcccaatgcggaaccgccgaggttccgggaatgcgcaaagcatccggcaattgcagaagccggtttcgtcctgtattacaccgatcagtgcccttacacctattactgggttccaagggtgcaggaggcggcaaaagaacacgatatcccgttcaaggtcatccacatcacggacaaagaatccgcgcagaacgttcccgcgccggtcacgacctatgcgctgttccgggaaggcaagtttttgacgcagagcattcagtcagacaaaaaatttctggcgctggctgggatccgggactgagtcatcgtacatcggaaagtcgtcgattcatgtgcggatacgcggagcttatccccgctcccggcgatccgcctcgatccttctcttccagtccgccgtcagcggctcgcaggcgcggacgctgcacacggcatcgccgatgacctcatagttcagcgccgtgcctgcccggtcgcaccgatagtttaccgcccggtcgggccggataccgaagcgcgccgcctcccgtgccgcgtcgatgttcgcgccgaggaacagaaactcccagccgtaccgttccttctgccgctcgatcatccgacgcaccgccgcataatcatagcgccggctggcgttctccagtccgtccgttgtgatgacgaacagcgtccgctccggcacgtcctcgcggcgggcgtatttgtggacgtttccgatgtggtggatggcaccgccgacggcgtcgagcagcgccgtgcagccgcgggggaaatactcccgctccgtcatgggcggcacgcggtcgagcggcagccggtcgtggatgacctcgctctcattggaaaagagcaccgtggagacaagcgctgcgcccggctcgcacttctgcttttcgatcatggcgttgaagccgccgatggtgtctgcctccagccccgacatggacccgctgcggtccagaataaaaaccagttctgtcatgggaaaaccctccttcgtttgatcacgctgttatcatagcgcattcgaaggagggtttggtcgcctgtggggcgacatttttattgcagctattttctctgaatttttccaaaccgctccaaacgggaatcgatcgctccggaggtgcggccgaaatgggcacagagctctttttttgtcattccgctgtcaaacaggctgcacagctcctgatccgctttctctgtccacggctttccattgttcgccgggagaggcttcttctgcccacgaggcaatgcttccagcacgcaatgcagagcgcgcacgatatcgcccttattgcacacatggtcgctaggcaggacctcaccggtcaggggatcgagcccgtctgccaaagccgtcagcagctcttttgcacgttgaatgtccatcgtcttcctcccttatacggcatcgctgccagatcacgcccccaacagactctggtcaaaggcgaacagcgcttcgttgatcgcaaaaatatcgtagttcctctgtctgataaaatactcaacaatgacgtcgaatttgctgctggcactgagggcatagcccgcgcgggcaagcaggtccttcgtctcctccagatccagctcaagcgcaatggcaaaggcgagcgccgtcggcttcgagggcttgtagttcgggttattccggatcttcgagaacagcttgcggtccacgttggcctttttatagacctcagagtcctttttcctgctgcggtcgatgagccgcagcagcgtctccgaaaagcccgcattgagatgctccagcagatcgtccagcgccggggctgccatgggcgtgcacatcggcacggccatttcgcgatgcagtgctcccctgcgcaggcgctccgcgccaaggtctgtgtgtgcctcgacatagtggtcatcgatgtattccgcgatgtccgcgaacagtttgccgctgatctgataggccctgcggtcaaaaatgacgagatagaccgtcatgtcatgctccagcagaaaggccccaatggtatccaccgccacgcggagggcttgatccttcggatagccgaagatgccggacgaaatgagcgggaacgccacggtctcgcagccgtgctcctgcgccagcaggaggctcgcccggtagcaggagacgagctgttcccgctcgccatgcccgccgccgcgccagaccgggccgacggtgtggatgacgtacctgcagggcagccgataggcccccgtgagctttgcctccccgatccggcagccgccgagcctgcggcactccgccagaagctccggtcccgccgcgcgatggatgcagccgtccacgccgcccccgccgaggaggctctcgtttgccgcattgacgatggcatccacgggcatttttgtgatgtcgttgcggatgaaaagcaggggcatggtatcacctcaaattattttt

SEQ ID NO: 11152 - DNA, 4952 bp, Unknown
  gut microbiota DNA sequence
gctgcgcagtgagcgccgctacaggccccgtcggggcagttaccattttaacggcagcctgtgcgaatcgtttgtgcagtgccgggaggggcatgcccctcccctacaatggcgggtaccacgaaacggcggccggtacgggacggcagtgccttcccgagattgccacgtcggccgttggcctcctcgcaatgacaaattcgggggcctcacgccataaaatcaatgccgcaaatgctgccagcctgcacaagccgtaagcacgccgccgggccgtccccgtccctaatgattcattcttcagtcttcagtattcattcttcatttcgcgcgcggagcgcgcgcttttcatcctccgcaatagggacaggcggtatagccccgcgcgatggcgaggttgatgctgtaggcccagtagctctgctttttgaagtaggagcagctgtaattgtgataataatccgtgccgtcgttctccacaaaggcgacgtgcgcgtcgaaaaacgcagatttctgctgcagggccgcgttgctgtcctgcagggtgctcacgcggctgttcagcttgctgagctgggcgttcagcgcgtcgatctgcgtggcgtaatcggcgttctcgtcgacgaggcggagattttcctcctgcagctcgcgcagggactgctcgttctgcgcgccctgcatctgataggtgttgacctgctgctcgagccggtcgatgctgcgggcctgactggccagctcctcctgcgcggcggcaaggtcgtcctgcgcctcggcaagctccgtggccgtctgggcggcggatgcagcctgccggtccagctcctcggcctgcacgcgaaggcggttgcggtcgcgctggtagtgcgtcaggtagtagtaaacgccgaacgcgcagcacccggccagcaccgcgcacacgagcgcgagcgaaacgatcgcccgcaccatgcggtggtagcggcgggagcgcggctttttcttttcgggctgctcgaccggcttgcgcgcgggccgcggctggtccgtccgcttcggcagagcgatgtgcaggctcgtgtagggggagtcgggcagcggctcgcgcacgaccccggcgcattcgtcgcagaaggtcttcccctcggcaatgcgccgcccgcagcggatacagttcatagctccatcccccttttcgacatatcctctctattttacaccaaaatcccccggctgtaaatagggaatatggcgcgcgggggcgcacgctccgcgtgctaaatgaagaatgaatcctgaaaactgaagaatgaatcattcgctggcctccggccgtgcgctgtagagggagcggacagccgggcccggcgcaatgctgccgaccagtgcaggctatcgataaaacggtgaaagccaaaggtttgtcattgcgaggagcgaagcgacgtggcgccctgagcgcgaagcgcgaggaagtgcccttggggtgcaatctcggaaaggcacttccagttcgtaccggctgtcgttaaatggtgtgcaccactgtaggggagcggcatgccgctcccggctgcgcacttccgacccgtacagtctgccgtgaaaacggcaaacgccaaagtatggggtgtagcggcgctccctgcgcagccgttggcggctttgccgctttacggatgcggcgtgccccttgcgggtagtgaccgccttgtacagagccattcaacggcaggagggcactggtgcaccacggcactcgcctaaattgtcattgcgaggagcgaagcgacgtggcaatctcggggaggcagttgcagcccgtacaagccatcgccgaccgcacgcgctgccaaatttgactgtagcggcgttccctgcgcagccgttggcggctttgccgccttacggatgcggcgtgccctttacgggcggtgagcgccttgtacagagccattcaacggcaggagggcactggtgcaccgccgcactacctgatgtgtcattgcgaggagcaaagcgacgtggcaatctcgggaaggcacttccagttcgtgcaaggtgtcgataaaaacgcaccgaccgattgcgtctgtagcggcgctcagcgagcgccatgcaggctggcaatattggtggcatgaattcaatggcgcaatgctcccagatttgtcattgcgaggccccgaaggggccgtggcgccctgagcgcgaagcgcgaggaagtgcccttggggtgcaatctcgggaaagcagttacgttttcgccggagctttcgtgatatccaacatagtactgcgagattgccacgtcgcttcgctcctcgcaatgacaagtcgggagcgtttgccattttgacggcggtttgtacagattacaagtgcgtcgccgggcccggctgtccgctcccctacattggccgctacgggccggcgagattgccatgggcgcaaacgccctcgcaatgacaagtcgggagcgtttgccattttaacggcggcttgtacgggctgcccctcccctgcaacgcgttaaccctgcttctccccgcgctcgacggaccttacgcgcggcagaatctgaaagcgcggcttcatgacctcgtggccgcagccggtgcagcgcaggcgcaggtccgcgccggtgcgcaggacgagccagcgcgccgcaccgcaggggtgcggctttttcatcacgagaatatcaccgacctgaatttccatcactgcctcctttgatcgcgtcccaatagtgccgggcggcctgctcgaccttgttgtcgccgtagtgatagtagaccgtgccctttaacaggtctggcaggtactgctgcgggacccagtggttcgggaaattgtgcgggtagagatagccctgctcgcgttcctgcccggcgctgtcggcgtggacgttctgcagctcgcgcgggatgacgcccgttttgccgcgccggacgtccgccagcgcggcgtcgatggcgagcacgccggaattggacttcggggccgtcgccagcaggaggacggcgtcggccagcggcaggcgcgcctccggcatgccgagctgcagggcgctgtcgacgcaggccttgacgatggatatggcctgcgggtaggcaaggccgatgtcttctgcggcggagcacagcaggcggcggcagcaggcgggcaggtcgccgacctcgagaaagcgcgccagatagtggatggcggcgtcggggtccgagccgcggatggacttcatgagggccgaaaggcagtcatagtgattgtcgccctcgcggtcgtagcgcatggccgagcgctgcgtgacggccttcgcatcctcgagacggatatgcaggctcgtgtcgccggtcttggcgacgaggaacagggcctcgacggcgttgagcgccttgcggatatcgccgccgcaggagcttgcgatgtgctcgagcgcgcccggctccgccgtgacggcgagctgctccttttttgccagatagtccacggcgcggcggacggccttctcagcggccgcgggcgagatgggcttgaactcgaagaccgtgcagcggctgagaatggcgttgaaaatatagaaatacggattttcggtcgtggaggcgatgagcgtgatcttgccgttttcgatgtgctcgagcagggactgctgctgctttttgttgaacgactggatctcgtcgaggtagagcagaacgccgttcggggccataaaggtgtcgagctgggagacgatctcccggatgtcggccgtggaggccgtcgtggcgttgagcttatagagggtgcgctgcgtggccgcagcgatgatgttggcgacggtcgtcttgcccgtgccgctcgggccgtagaagatcaggttcggcacgcggccggactcgatcatccggcggagcatcctgccctcgccgagaatttcctcctgcccgtaaacgtcgtcgagcgtcgtcggccgcagctcgtctgccagcggctggtacatgcgatcacctcagattcccgaaagcttgttcctgatattataccgcattttgaggagaatgtccagaacggagagggcaatgctgcagggcggcgcacgacggactggcttttccccgcaaactatgctataattgccgcaaacgaaacggagggatcggcatggaggaaaaggtcgcggcgatcattgcggcgctgcgggagcggtatccggacgcgctttgcgcgctgcactatgggaaggactacgagctgatgatctcggtgcgcctttcggcgcagtgcacggacgcgcgcgtcaatcaggtcacgcccgcgctgtttgcgcgctatccgacgctcgacgcctttgcggaggcggatgtggcggaggtcgaggagtatgttcgctcgtgcggcttcttccaccacaaggcgcaggacatcgtggcggcctgccggatgctccgcgacgagtacggcgggcgcgtgccggacacgatggagcagctcctgcgactgccgggcgtcgggcggaagacggccaacctgctgctgggcgacctctacggcaagccggccgtcgtgtgcgacacgcactgcatccgcatcgcaaaccgcctcgggctggcccgcggcaaggagccggagaaggtcgagcggcagctgcgcgccatcctcccgccggaagaaagctcggatttctgccaccggatcgtcctgttcggccgcgaggtgtgcacggcgcgcagtccgcactgcgaccggtgcgagctgcggccgtattgcagagagttcagcggggaatgaggaattcgaaatcgggagatagcccccgacttgtcattgcgagggcgctccgcgcccgtgacgatctcgggaaggcagtcacgttgatcgcacccgccattgcaggggagcggacagccgggcccggcggcgcgctgccgggccgaacaggccatcgttaaaatggcaaacgcttccgatttgtcattgcgagg

SEQ ID NO: 11153 - DNA, 1049 bp, Unknown
  gut microbiota DNA sequence
ctggggataacaggctgatctcccccaagcgtccacagcgacggggaggtttggcacctcgatgtcggctcgtcacatcctggggctgtattcggtcccaagggttcggctgttcgccgattaaagtggcacgcgagctgggttcagaacgtcgtgagacagttcggtccctatctgttgcgggcgtcggagatttgaagggagctgtccttagtacgagaggaccgggatggacatacctctggtgcaccagttgttctgccaagggcacagctgggtagctacgtatggacgagataaacgctgaaggcatctaagcgtgaaactccccctaagatgagatctcccctccctcgaggagtaaggctcgacgtagactatgtcgttgataggtcaggggtgtaagtgctgtaaggcatgtagctgactgatactaataagccgaaagcttgacctacaaaagaaggaagcaggctcggttgcaagacataacgcttcccattcattcttgttcagttttcagggtgtgtccgaccaccggaagaaaaaattgcgagcatgcacctttagctcagttggtacactcgccgcagcgagcgtcccaaacgcaaccgcgaagcggcgcttggcgtttgggtgagcaactgattgcgagcagaagagctgagcggtaagatgcgtgcgagatcaggaaagcgaatatgcacctttagctcagttggtagagcaactgactcttaatcagtgggtccccggttcgagtccgtgaaggtgcaccatggccccatggtcaagtggttaagacagcggcctctcacgccgttaacgtgggttcgaatcccgctggggtcaccaaaaaagcgcttgacaagggagtcgagcggtggtataataatgaatgttctcgggcagaagcctgaagacagataaatagttggtgttgattgcggtgagggtacacctgttcccatcccgaacacagaagttaagctcatttgcgccgacaatactttgcgggtgactgcacgggaagataggtaacgccaaca

SEQ ID NO: 11154 - DNA, 156001 bp, Unknown
  gut microbiota DNA sequence
aagctcggagtaaattggcgtaagttgtggcgtaagcaccgacaattttaggtcaatcaatagagctttgcgcctgccggaatgtgaggatccaccatcagcagatgcagtctttcctcgccgttttcgtgatgcacggcggagatgagcataccgcaggagtcgatacccatcatcgctctcggaggcagattggtgattgcaatgcaggtcttaccgaccagttcttccggctcataatactcgtgaattccgctcaaaatgaccctatctacgccggttccgtcgtccaaaacgaactttaagagctttttggacttcttcacagcttcgcattccttaaccttcacggcacgaaaatcgctcttggagaaagtgtcaaaatccacctgatcctggaacagcggctcgatctgaacattagaaaaatcaattttttcttccacaacgggagccgtctgagtagcctccgcaggagccgaagcttccttggaacacttcttgtcggagtccaacggcttcattgtggggaagagcaaaacatcgcggatggaggcactgtcggtcaggagcatcacgaggcggtcgatgccgaagccgaggccgcctgtaggcggcatgccgtactccagcgcattgatgaagtcatagtccacctgcgcacggcaatccggctcaatggacttgcgctcggcgacctgacgctcgaagcggccgcgctggtcgatcgggtcgttcagctcggagaaggcgttgccgaactccgtggcattgatgaagtactcaaagcgctccgtgaacgcggggtcatccggtttgcgcttggcaagcgggctgatctccaccggataatcatagataaacgtcggctggatgagcttttcttcgacgaatgcatcgaagaactccgccagaatggcacccttcgtcgggacctcgggcagagtgacattgtgcgccttcgcgctggcgatggcgtcctcgtccgtcttccagtcgcggaagtccacgccgctgtacttcttcacggcgtcgatcatggtcaggcgctcccagtggcccagatcgatctcgtggccctggtacggcacgacgaggctgccgcagacattctgcgcgacctgcttcatcatgtcctcgacaaggtccatcatgccatggaaatccgtataggcctgataaagctcgatggtggtgaactcggggttgtgcttcgggtccatgccctcattacggaagatacggccgacctcatacacgcggtccatgccgccgacaatgaggcgcttgaggtacagctccgtctcgatgcggaggaccatatccatatccagcgtgttgtggtgggtatagaacgggcgcgcagacgcgccgatctcaaacggcgtcaggatcggggtatcgacctcgagaaagccgcgcccatcgaggaagctgcgcagctcgcgcaggataaggctgcgcttcacgaacgtgtccttaacgtcggggttcacgatgaggtccacatagcgctggcgatagcgggtctcaagattcgtcaggccatggaacttgtccggcagcggcagcagagccttggcaagcaggacgacctcgtgcgcgcgcacggagatctcgccgcgctgcgtgcggaacacatcgccatgcacaccgacgatatcgccgatgtcgagcttgcggcagcgctcgaacgtcgcttcgtccatctcgtcgatcttcagatagatctggatccggccggcagcgtcctgcagatcgcagaacatgaccttgcccatgccgcgcttcgtcatcaggcggccgctgacggagacttcctttccctccatctgctcgaagtttttcttgatctcggcgctgttgctggtaaattcaaactttgtctgtgcgaagggattctgcccctcctgctgaagctgtgcgagcttttcccgtcggatacggacctgatcgaccatggaaagctcgggctgctgggtattcttagccacggtattcctcctgtgttatcgttctacggaaaggatctcaaagcggatcgtgccgaccggagcttcgacctcgacggtctggccaatgtgcttgccaagcatggcgcggccgaacggagagtcgtccgaaatgcgagactccatggggttggcctcctgcgagccgacgatagcatacgtcgcctcttcctccagatcaaggtcgcggaccttcacggtgcagccaaggccgacgacaccggcgcgctcctgctcggcgctctcatcgatcacgacagcatgggacaggatgttctcgacctctgcgatgcggccatacagcttggcctgctcatttttcgcttcatcatattcactgttctcggaaaggtcgccgaaggagcgggcttccttgatctgctccgcgacttccttttcgcgcgtggttttcagataattgagctcttcctcgagctccttcagacgttctctggtcagcttaaattcttttgccattccatgttcctcccaaaatcaggcaaagcccgttcattcgttgtgattatagaggattgccgccgcacttgtcaagggtttccttgcgtcagggccgcgatggccgcctgcagctgcgcatcctcgcttttttcgagcgcattggagtaaattttcaggtaggtgtcgtcatcgacctcgacggggatatccggcgtgatgccgacgcccgccagcgtgacgccgtgcggggtctgataatggccggtcgaaacggcgacagcagagccgtcgctcaggacgaaggtctgctgataatttgccttgccgaccgtctgcgtgccgacgacggtgccgacgccgtattcctgcagcgccgcagcaaaaaactcggcggcagaataggaatctccgttcatgagaacggccatcggcagctcgacgcaggacgcatcggaataatcgatatcctcgttgcccttatagtccacggagcggaacagtgggccctccggcaggagataatccagcagctccacaagctcatccttgtggccacccggattgaagcggacgtcaaacagcagagacgttgcgccctgctcccgcagggactcgatcgcagcaatggacttttcggcgcagccggaatcgaaattgttgatcttcagatagccgacatttccgtccagcagctcagcccggacgacctccacctcgatggtcgcgcgcgtaaccgtgacgtcgaacgtctcgccgccgcgctgcaccgtgagcgtcaggctcgtgccctcctcgccgcggacgcgattgcgggcctcctccatgccgagctccttcatattggcgccgtctatggcaaggagcatatcgtcgatctgcagcccggctgcctcggctgggccgcccggtgtgacggaggcaacggtgaatccggcatcgtcctcattttccagacggatggtcacgccaatgccgacataggcgttggcattctgctcctgataggcggcaagctcatcggcgctgatgtagtagctccagcggtcgcccgtcgcggtcacggcagcggacgcaagctgatcgccgagcttcgaatggtccagcccgtcgacatagcgtgcgtcgagcagggccacgacctcctgcaccttggcaagatagtcatcgcccgacgtactcttctgtctgctctgcaggagcgtcatgcccgcaagcgtcagtgcaaacacgacgacggccgtggccaggcagcagacgacatagggcaggagtcttttcttctttggtttttggggttcgggacggagctcctccggtcccatgggggtctcgttgggttccataggtcctcctttacggccgacaccccgccgaagcggggtgagagtgtcggagaaattgatttaggctgattcgccgccggcaggcggcgaattctgcgaggctttttcacgcggattccgccggagcggggtcagcatccgatctcagcggatgctgacatagtccatcgggttgacggtggcaccgttgtagaacatcgtgaaatgcaggtgcgggccggtggagtaaccggtcgagccgacatagccgatgaggtcgccctgattgacatagtcgccggacgagacggtatagtgcgtcatgtggccgtagagcgacgagaagccgtcgccgtggttgatcgtgacatagtaaccatagccggatgagaacgttgcggtcgtgaccgtaccgctcttcgtggcatagacgggcgtaccctgcgcaacggcaaggtcaacgccgttatggaagcgatagccgccgtcgatcgggtgataacggtaaccgtacggggatgtaatgacgacgccgctgcctgcgggaagcgggaagaggaagccgccagcgtttgtgccgccattgccgccgccgttgttgccgccgttgttgccaccgttattgccgccgccattgttgttattgccgccgttattgttgttcttggcggcttcttcctcagcacgcttggcatcggtgtattccttttctttttcggcaatctgctccgtcagatcctcgagcatggcctcataggtctcgtttgtctcgcgcagcaggtctgcatcggagacaagctcctgcagcagctcgtcggaatcggcgcgcttggccgtgagcgtctcctgcgcgctggcaagctcagtcttcttctcctcgagagagaccttctcccctgccagctcctccttggcggagaggacctccgtggcgatctggcgcatgttctcgagcatacgctggtcgctctgagcgatctcctcgaccatggaaacgcggttgagcatttcggagaacgtctttgcgccgaagatgatggaccagtacgacacgtcgccctgctcctgcatggcgcggatgcgctgcttatagcggtcgagcaggtcgttctgatcggtctggagctggtcaagctccgcctgcttttcggcgatgagcagattgtactgacggatctgctcgttcagattctcgacctcctgccgcgtcagctcgatctcctgatcgatctgcgccttctgctccacgacattgagcgtctgagtgttgtttgcggcgatctgtgcctcgagctcctgcttcttctggtcaagctcatcctgcttcgattccaggccgctgatctccgtgcggatatccgcggaattggccgcgaagaccgtaacaagcagacctgtcaggatcgcagcggccagcagcagcgcgatgacggagatgatgactcttctgtacttatacatagtataccctcctgtgcgcgtatttcagaccttcaggaatttccggatggacatcaggctgcccacgacgccgatcagcaggcccgtgaccacgcacaccagcgcgaccggcagagcgaccgtgctgaacgagacgacgtggaggaagctgagctgaccggagctggcaatggcgccgcggatggcctcgtacaggccccactcgaggaagaacgagcacacggcgcccagcaggccgaggatgaagccctcgaccacaaacggcagacggataaagccgttcgtggcgccgaccatgcgcatgatggcgatctcctcgcggcggtcgaacatggcaagcttgatcgtattggaaataataatgagcgacacgatgagcagcacggcagcgatgcaggccgaaacaatggacagcacgttgcggatcgtggacatggcgttggcgaccgtcggatcggaatagatggtcgcaacgccgggcacctgcttcagcgcgtcgatggtctcctgcagcttggagttgtcctccagcgtgacgatgtactggtcgcgcatggtctcggcggtcacgccgtcgtacatgacggcgtcatattccttgacgaacgtctgcagagcctcctcgcgggagatgaagcgggcatccgcgacattgtcgatcagattgatgcgggagccgacgctcttggcctcggcctcggtgtagctctcgtcgatgcagatgaggacctcgttctccttctgcagatcatcgacgatcaggccaatattataggtaatgaggccgaagctcgtgacgatcacgaggcaggccacggtgatgcagactgcggcaaaggacatgaagccgtgcttgaagatcgccttcgtgccctcgccaacgagaaagctgaaattattgtgcttcatagctgtaatacccgtccattccgtcgctgacgactctgccctcgtcgatggcgactacgcgcttggtgaagcggtccaccaggcccttttcgtgcgtaacgaccatgaccgtcgtgccgagcgcattgatctgctcgagcaggagcatgatctcaaacgaacgctgcgggtcgaggttgccggtcggctcatcggcgatgatcatcgtcggattgttgatgagcgcgcgggcaatggccacacgctgctgctcgccgccggacagctcgttcggcagacggcggcccttgttctccagcccgaccagctccagcacatagggcacgcgctttttgatctccttcggcgctgcgccgatgacgcgcatggcgaacgcgacgttctcatagaccgtcttgttctcaatgaggcggaagtcctggaaaataacgccgagcgtgcggcgcatataggggatggacgcgcgcttgatggactcgagctgatagccgttaaccagcaccgagccggacgtcggtttgagctccgccgtcagcaacttgatgatggtagacttgccggagccggacggaccgaccagaaacacgaactcgccgtcatcaatgtgcatatcgatgccgttgagcgcgtgcgtgccggtctcatatgtttttgtgacgtttaccaaatcgatcataaatcacaccagtttcttactcaactattaaataaatattgaaatgtccgtaccaacggcgctgcagccgtgcagcgttccgcggaagatcagatcatacggttgtcgcgggaggccagatacttcttgaccatgagggcgaccttgaagatgatggcgtcgtcgaactcgcgcaggtcgaggcccgtgagcttcttgatcttctccagacggtagaccagcgtattgcggtggacgaacagcttgcgggaggtctcggagacattcaggctgttctcaaagaacatgttgatggtgaacaacgtctcctgatcgagcgactcgatggaattcttgcggaagacctcggaaaggaagatctcgcacagtgtggtcggcagctgatagatcaggcggccgatgccaaggttttcataattgatgacggtcttttcggtatcgaagaccttgccgacctcgatggcgacctgcgcctccttataggaatcggccagctcgcgcagatgctcggagatcgtgccgatgccgatggtcgtgcgcacgaacagctcggacttcagccgctcctcaatggtgcggccgacgcgggtcagctcctcgcccgtcgtgtccgccgggacctgacgcacgagcgcgatatccgtctcgttgacgttgatgacaaagtcctgctgcgtgtcggggtacatgctctgcagcagctccacgacggccacgtccgaacggccgacctgccggacgagatagaccgcgcgcggcagctccgtcgggaaatgcagctccttcgcgcggatatagatgtcgcccggaaggatattgtccgtgatgatgttcttgacgaaggtccccttatcatgcttttcttcatagtaggcctttgcggaattcagggagacctgcgtcatgcgcacaagcatctcggcctgtgcgtccgttccaagcacaaaggcggagtagccataggcagggttccagcccttgagcgcgtagaacgtatacggctcctcacgcaccgggttctccagcatggcggccaccgccgtggcggcatccggccacttttcgccgatgagcgtggtatcgctgcaggagatgacattcccttctgcatcgatcacaccgatggtggtctgtgcggcttcgctgagctggagcagtacgccctgaaacatacgacttgacataagccgtcctccttacgccaaagacaaagtgtcgatattcggcaaaattatgctagtatcatactatttttttcggcagaatgcaataggttttcggcattttatttcaaatcataggtacttttttatggaagattccgactttttcgttaaattatccagtttttcagagcatatttctaattttttgtacaagtttttccagataggcttcgtcaaaatccacagtttccaaaagtcgaatttcgccgcatgtcagctcgcgtgtcattcccattgggagcgctccaagctcgagtccgccctcggcaattcgacgaagcgccgtgaccggcatgccgcggctggccagcatccggcgcacctgatggtactttccctcgcacacggccacaaggctgcggccggggccgagcgggcggagataagccgggcggcagaccgttccgtcgcgcagcgtgagcccggcgcggaaggcggcgcagtccgcctccccggcctcgccctcgtggacggcatcataaattttccagaccgcatggcgcggcgagatgagccggtgcgccagctgtccgtcgtccgtcagaagcagcaggccggacgtatccttgtccagccgcccgacgggtgcaaggccgcggtactgcggcggcaaaagctccatcacggtgcggtcgcggggatcgtccgtcgaggtcacatagccagtcggcttatgcagcagcagaacgaccggcccgcgcgggccgaccgcctcgccgtcgagcgtgacccggtccgatgtttcgtcgatcttctgctccggggccgaagcgggaacgtcgttgacgcgcacccgcccggcgcggatgatggcccgcagctcgcggcgcgaggccacaccggcctccgataaaaacctgtccagacgctgcatccgtctgcctccttccggcataaccgtcccctgtgggacatacattggagtgaccataaaaacctgtttaagggggagctacatcatgtttgtcatgactgcaaagctgtcaaagccgcggctgatcgccgcaggcgtcctgatcctggccgttgtgatcctggtcgttgcgctcgtctccggcggcggaggcggatcggcggacgcgcccgacggagcgacgaacgacgcgcgccttgcctatctcgcgggcttcggctggagcgtgaacggtacgccgaagcagacgcagcaggtccgcattcccaagtcggccgacgaccgcgtcttctcgcgctacaacgcgctgcagaaaagtcagggcttcgatctcacggcgcacgcgggcaaggaggccacgcgctatgtctatgagatcctgaattacccggacgcctccgcgccggtatacgccagcgtgctcgtgctcgacgggcacatcatcggcggggacatcacggacactgcgcccggcggcgccatccacggcttctgcaagcccggcaccacggcaccgaacgccgagccgtctgaggcaacggaggccggaacggagaccgaggcaggaacggaagaaccgacggagccctccgacgagccttcaaccacatcctaaaaaacacttgcattttcgcttcgtcgtgctataatgacagcagccaatcgaatacgactcttcagggcagggtgaaattcccgaccggcggtaaagtccgcgagcgcgctgcgcatgatccggtgagattccgggaccgacagtacagtctggatgaaagaagaatcggctggcgcacctgtccgtgtttcctgccgtttacccgagggatcgtatccttcgggtgtatttttttctcaggaggcaaccatgaaacacgaaaaaatgaaaaaactgaccgttctggccatgctgagcgccattgcctatgtcgcagtcgcgctgctgcgcttcccggtcgtcctgttcctcagctatgagccgaaggacgtcgtcatcgccatcggcggcttcctctacggcccgctggccgcactgggcatctcgcttgtcgtctcgttcatcgagatgctgaccatcagctccacgggctggatcggctttgtgatgaacttcctcagctccgccgcctttgcgggcacggccgccctgctctaccgcaaaaagcgcacgcagggcagcgccattgcgggcctgttcggcggcgcgctgcttatgaccgtgctcatgctgctgtggaattatatcatcacgccgctgtacatgcacacggcccgcgccgacgtcgccgcgatgctcgtgccggtgttcctgccgttcaacctgctcaagggctgcctgaacgccacgatcaccgtgctgctctacaagcccgtcgtgcagggactgcgccatgcgcacctgctgccgccgagcaaaacgcccggccgcatgccggtcaagcgccgtctggccgtgtggctcggcgcactggccgttctggccgtgtgcatcgtgctcattctgatcctgcacggaacgatctgagtctcagaggcgcagcagatcggtaaaatgatcgatgcgcttatcccagtgcgcgggcttgccgaagccgtaggccgcccacacgaacggcaggcccgcctgctcggacgcttccatgtcgccctgcgtgtcgccgacgtagaccgcgtcgcggacattgcagcgctcacacagcaggcgcagcgtctgccccttcggcaggcccgtgttcccgaagcagtcgaagtcgctgatcaggccgccgaggccgcccttttccatcagcagctcgatatagccctgctggcagttgctgacgatgaacaggcggtgcgttttgtgcagctccgtgagcgtttccttgacgccggggtagaaaatatggcacggatcgcggcgcaggcgcgccatctcgccgtccatgcagcggtccatgacctccatggcctgctcctgcgggacgccgggcaccacgacctgcgcgatctccgtcatggtcttgccgaacagcgggcggatgctctgctccgtgcagtgcggcgcaaagcccatgttctgcagaccgtcgttccagccctctgctacgagggccacggcatcccagagcgtgccgtcgacatcaaaaatcaagctttccattgctgatactccctattgtgacgttttctcctattgtaccgattttcggtgctcccgtcaacccatagataaagcccggtgcgaagcagcgttctgttccgcaccgggccgttttttatgcgttgctctgctccgttttttcgggcagcaggttcgtcatgctgcgcaggctgatgccgagcgtcgacatgttgtgcagcagggcggaaagcgtcggctggatgacgcccgtcacgcccaggataataagcatgaggttgaagctgacgatgaaccggtaattccggtcgatgcgtcccataagggcctcgctcaggcggcgcagcgtcacaagctcgaacaggtcctgcgacgagatcgtgatatcggcgatctcgcgggcaatggccgcacccgtgttgatggcgatgccggcatccgcctcggacagggccggggtgtcgttcacgccgtcgccgatcatgatgaccgtgtggcccccggcgcggcgggcgcggatgtaggccgccttgtcctccggcaggactcccgcgtggtattcgtccacgccgacggcgcgcgccacggcggcagccgtcttttcattgtcgcccgtcatcatgacgatgtgcgcgatcccctgctcatgcagagcgcggacggcatccgccgcctcggcccggagcgggtcggagatgcacacgacggcggcaagttcgccggaaatggccagatacagatgggagtaggcatcggaaagaccgtcgaatttttcctcgtcgccctccggcacccggcatccctcatcctcaaacacgaagtgatagctgccgatgatgaccttcttgccctcgacggtgctcgagatgccgtgcgccacgacatactccacgctggagtgatattcctcgtggttcaggccgcgcacgcgcgcctcctctacgacggcattggccagcgagtgcggatagtgctcctcgaggcaggcagccagacgcagcatatcgtcctcgcggcggccgccgaacgtaacgacctccgccacgcgcggctgcgcataggtcagcgtgcccgtcttatcgaacacgatcgtatccgctttggcaacggcttcgaggaagcgcccgcccttgacggacatgtgccgggcattgctctcgcgcatggcagacagcacggcgatcggcatggcaagcttcagtgcgcaggagaagtccaccatcagaacggcaagcgtcttggtgatattccgggtaaacagccacacgagggccgttccgccgagcgtatagggcacgagccggtccgccagacgggaggcgcggtcctccgccgtggatttcagcttttcggactcctcgatcatgcggacgatgcggtcatagcggccaccgcccatggtcttttcgaccgtgatgaggcactcgccctcctccacgaccgttccggcataggcatagctgcccggcgtcttgcgcacggggagcgactcgcccgtcatggacgactggttcaccatggcctcgccgccggtcacgcggccgtcgagcgggatcatgttgccggtacggacgacgacgcagtcgcccgcgtggatgtccttcacggagacaagcagctcctgcccgtctgcgccgcgcacccacgcgcggtcgacgttcagcgccatggcccccgccagatcggcgatggactttttgtgcgtccagtcctccagcagctcgccgaggccgagcatgaacatcacggagcctgccgtatcgaagtcgcggcggaccagtgagaccgtcacggccgttgcatcgagcacggagacagaaagcttcccgtgcagcagggcggagagcccggccttgagatagcgcacggagcgcacgatggcgatgcccgcccgcacataggcaggcaggaacagcttgcaggcatagtggagtgccgttctccagacgagtttgtcctcaaattcgcggttcagcgcacggccggtgtgctccgggacgagcccggcctcctcagccgccgcgaatgaaaacgaggaaagcgccgcaagcacggcgctgcgcacctcgcgatattcaatgacggcgtcctgcgtgcggtcatagaccttgaccgacgccacgccgtccacggcgcgcatggaatactccagcaggtctgcctgccggagcgtcatccgcccgatgcacagatgcacacgcaggcggcccttggtttcatgtaaaattctgcacttcataggattctcctgcccgcagccgggaagggttttcctccccggctgcacatgattcaggcctcggcaggctctgcagcgggctcctccgcagtatcggcgatctcctcgcaggcagcggcggcacgctcttcattgatggccttcgcatctgccagaatgtccccgcagttttcacggagcgtcgtaaccgtcgtcatcacgtcttccttcgcacggagcacggcagccgtcgcgtgggtatagacctttttcgcgtcacggctgctgaggatccggatcccagccgttccgaacagaacgccgcctgcaaacaggccaagctttgctgcaatacgcatattgatttcctccagttttcgtaacttcagaaaaagtaaggtttggctaacatttgaccgcactcgcttttcccgtgcccgtatgatacaccgcagggccataaatgtcaatgctttcccgccccacttttcgagaaaaatccgcaattcttgacaaacgcaggccgcccgttataatgaaagcagaaaaaggaggagaccgcatgaaacgcttatttacccgccggaccgccgggacggatgcaaaagttgaccggctcgtcatggaatacgcccgccgcagtgcggcctctcccctgctgcagcatacggagcggctcgtgcttgacaggcgcgagggcatcgcacacctcagctccgtcggcaagcacaccgccgagcgccgctgctcgctcccgtccgcggcggcccgcctgctcgacacgctcccgcaggggctgctatcgccgcctcttgcctccgggacggacgatgccgcggcgcgctatgcgctcacgctgcgctggtcggacggcgcgtcgcagcgcattaccggccgctatgactgcacgggccttccggacggctgggcagagcttgccgccgaggcagataccctgctgcgtttctatacggagggcgagctgttcgacccgtcgcgcgcagccgccgcgccggggccgctgttttactgcgccgtggaattcgaaccgcacggcacgcgctattcctaccgctccgaggaccgaacgctggaggccggtgagcttgtagtcgttccggccgggccggatgcgcacgagctgctgggcaggatcgtcgcggtgcaggcctgcacggccgaggacgcgccctacccgcccgcgcagacaaagccggtcctccgccgcgccacaccgcaggatattctggagctcggcgaactcgtgtaaagataaagcaggacccgatgcggctttccggtgccgcatcgggtcctttttacgatttacgattcttctgccgggacgatccagtccggcgtctggctcaggatcttgagcgtatccgtggcggagacctgcgcaacggccagaacctcccccggactgagcgacgtatccgccgctgccagcgtttgctcgtcgatatactccgtcggcacctgctcgccgtcgaccagaatgacgctgtacggcgtgaagttcgtgccgtggacggtcaggccgccgtcgctgctgctcacgccggtgagcgtgatctcgtcgacgccgaagtgcagctccatcggctgcaccgccatctccccgcccgtcgcatagtgcttgccatatagcatgtcatactccagcatgcacaggccgttctggaaggtctcgctgccggtctcatcgtagccgtggctctgatgatagcgcaggatcgtgccgtcgtggacgccgaagcggtcgagcaccatggcggccagctgataggcctgcacgtcgcggtcgacctttttggcgtggaaattcgtccagatgacatattccgtggactgcacggtgccgcagctcagctcgtcctgcgtgatgccgaagctcggcagatgatcgccgtagaatacgacgaccgtcggctcgctgaacgtggagagccggcgcacaaggcgcgcgacaaaggcatccgtctgcttgagctggtagaggtaatactccagcccggcgcggcgggattcggcctcctcccccgagaccctgatggttcgcgcgccttccagcggcgccgtgggatacttgccgtggggctgcacggagaccgtgaaaacaagatcacggtcctcggtggagcgcagcgccttcaaaatttcctccgtcagaacgaaatcctttgcccagccgagcggattccgctcgacgtcgtgcatgtattccagcgacgtgaacgtctcgaagccgaaattggcatagacgcggtcgcggctgtagaacgtggcgttattattatggatggcgtgggtggaatagcccgcgctctgcagcgcataggccatggattcgcaggtccggttcttgacgacggtcttgtagggatactccccgacgccgaaatggtcgagattcatgccggaaagcacctcgaactcggtgttcgccgtgcccgcgccgatggacggcacatagaacaggccgctggagcacgtctccttcagccgctcaaaatttgggaccggattttcgccgtacgtcaggtccttcagataattcgcgtcaaagaatgactcgagctgcacaaaaatgaagttcggcgtgcgcacccggtcggcaggcaggtcgtcctgctcgctgaggagcacgtcgatcgcttcctgcgaatagccgtccggctcgctgatgccctgtgtcaccgcactggcggagaagcagtaggcaaagccgttggagtcgtaggcatccggcagattggggaaatgcgaggccagcgtcccgctgcggaggaaggcgaccgtaaagcccgcgaggatcacgccgcagagcagaacctgcacggcagcgaaataataggacgggcgcgtcttcttcgcgcgcagccacaggaggacgatcacgccgatgagggccgcgatgcccagcatcaggaggatcagcaccggctggctcatatagatctcgatgatgtcccgcacggacgacagcagccagatatccggcgcagtcagcggcgtggcgcggaagccgagcaggatgcagttggcaaggccaagcccgatccaaacagcggcgaacagcaggaagcagaagctgcgcttgcggaacagcagtgagagagacagcgtgaataaaataatgagagagtcataaaaaaactgccacggtcgcgtcaccatatagtgcaggccatcgccgagggatctgcgcgacaggcattcaagcgccaaattgatgacgaacgcagcaaggatatagcccaaaaaacggagaatattttcacggttccattcctttcccactcggcggagcgaaaagggacgcttcattttcatcaccccagaagtcataattctgcgctaacagtataacacttaccccgaaaaaagcaaggatttttccggttcttttccaaaattcaaagtttcgccacaattgaaaacagtttgtaacgaaaaagcggagcctatgtgaatttccggtcaaaaaatcgaaaatttcttgcaggggctttacacgggtgatataatataggatgaaataacagccgaatgccgctttgcggccttcgtttggaaaggaagcagaaaattcatgactaccattgacatttactccggattcctcggtgcgggcaagaccacgctcattaaaaagatgatccgcgaggcctatcagggtgaaaagatcgtcctcatcgaaaacgagttcggtgagatcggcattgacggcggcttcatgcaggacgccggcattcaggtcaacgagatgaactccggctgcatctgctgctcgctcgtcggcgacttcggccgcgcgctgaagcaggtcatctccgactatcatcccgaccgcatcctcatcgagccgtccggcgtcggcaagctcagcgatgtcatcggtgctgtagagcgcgttgcggacgagagcgtcacgctcggcagcttcatcaccgtggcagatgccacgaagtgcaaggtctatctgaagaatttcggtgaattctacacgaaccagatcgagaccgcctccgccatcattctcagccgcaccggctccatctccgaggagaagctggccgccgccgtggccctgctgcgtgagcacaaccagaacgccgtcatcatcacgacgccgtgggaccagctctccggcgcacagatcctcgaagccatgcagaagcagcacacgctcaccgaagagctggctgacatgatccgcagcgcccagtccgaggaggacgaggaggacgaagaggaagagcaccatcatcaccatcatcatgacgatgccaacgaggatgacgagcacgagcatcattgctgccaccatcatgatcatgatgacgaggatgagcatcactgccatcaccatcatgaccacgatgaagacgatgatgagcatgagcaccattgctgccatcatcacgatcatgacgaccatgacgaggatgaggacgagcatcactgctgccatcatcaccatcatcacggccacgacgccgacgaggttttccagagctggggcgtcgagacgccgaagaagttcaccgaggaagaaatccgcaatgccctcgccgcactggacaacggcgagacctatggcatcgtgctgcgcgccaagggcatcgttccgacggcggacggcacctggctgcactttgaccatgtgcccggcgagatcgacgtccgcaccggcacggccgctgtgacgggccgtctgtgcgtcatcggctcgaagctggacgaaaaggcactcgccgccctgttcggcgtgtaaggaggctgccatggccattcccgtctatgccttcaccggctttctggacgccggaaaaacgaaattcattcaggagacgctggaggacgaacgcttcaacgcaggcgagcgcacgctgctgctcatctgcgaggagggcgaggaggaatatgacctctccgcctatccctaccagcatgtctaccccgaggtgatcgatcaggaggccgttacgaccgaagagctttcacagctgttcaaaaagcaccactgcgagcgcgtcgtcgtcgagctcaacggcatgctgcaggtcggcccgttctaccagaaaatgccggaggactggcagatcgcgcaggaggtcatgtttgccgacggcacgagcattctcgcctacaatgccaacatgcgctctcttgtggtggacaagctcacgggctgtgagatggtcgtgttcaatcgtcttgcaccgggcacggacatcatgccgctgcacaagctcgcccgcgcgctgaaccgccgcgtcggcatcctctatgaatacaccgacggaacgacgcagcccgacgagatcgaggacccgctcccctttgacatcaacgccccggtcgtggagatcggcgacgatgattttgcgctctggtaccgcgacatcacggaggagccgaagaagtacgacggcaagaccgtccgcttcaagggacaggtcgcccgcctgaaaaaggaccgcgacggctactttgcgcccggccgctttgtcatgacgtgctgcgtggaggacatcgccttcatgggtctgccgtgcaaatacgccgacgccgcttccctgcacgcccgcgagtgggtcatggttgaggcgacggtctctgtccgcttccatgcgctctaccgcggcaccggccccatcctgacggccatccgcgtaacgcccgccgaacccgcgaagaacgaggtcgcgacattctgaatcaagccctcatatagcgaaatcctgccggagtcagccactccggcaggatttttttggctcagttttcgtccgcagctgctcccatggtcgcagcgaaggccgctgcggcattctggaccgtttctgcgacgatgttctccgccacctgatgcagatccgtctgcaggacgcgctccacataaggggcgtattctttttccggcacgcagtagatgcggaagcagcacgaaagatagcggcggatcttccgctccatcgtgaagtacatatcgcacgggacggacatatagctccgcgtgacaccggcggaggccagctctagctcaaacagctcgctgtcgtccgcgcgcttcatccagcgggagaagatctggcgcagccggggcgtcatgctccggttgatgaaatcggacgtcgacggcagcgaatacgccgtgacatacaggtcgcgcagcggctcggagcattccgagatatggagctgcagccccgtctccatggcgtacagcagcagcggcgactgatccgccgggagcatcttctccgcgcgggaaaactgtgagcggaacatgatctgcgtcaggcgcagcagcagcgcctccttattttcaaacgcggcgaagaacgacgccggagacatcccggccttgcgggcgatctgcgccgtcgtcgtgcgcccgtagccctgctcaagaaagagcgtcatccccgcatagatcatcttctgttcgcgtgcaattcctctggcctgcagcccatgacccggcatggcactcgctcctttcaactgaatatatgaatcaaaaataaactccggtcaaatgatatcacatgctgtcgaattttgcaagcgggaatttgtggattttcttggtattctcctagaattatcaacttttctcattgtctgcataaagcgatccccggccttccggtcggggatcacagcattatacattttccaccgcagccgggtgccagaagccgacggcatcacggacgaggacacagctgcgcgtcagctccgcttctccggcggcatcgggcgtcacgccccatgctgcagcgctgtcctccgggacatggagcctgcagcggaacgtgaagcgcaggcggttgccgcagagcgattcgactccgctgctcgcaccgtcgcgggcctcgtgggcgctcaggctctgcaccatggctccggcagcactctgggcgatggtctcgtcctcagcggacccggtcacgccgacggcgtagaggctgcgcggataggcatcctgctgctccagcccctgcagggctgcagcgaggtccgcaccctccggctggtccagccagacacggccgccgggtgcatccatacacagggcggagacgcccttccagagcgtgagcagcgtgccgccgcccgctggcgagctgagcgtcacatagctgtcaaacgagaattcctgcacgcccggcgctttgcgctcgacccactgcgcagcattggcggcatcgagcaccgcagcgaccgcagcggcgtccagcatgccgctgtgctccagctccccgctgcgcgaccactggcacaggcacagggccgcgccgtcgtctgccagagcggccagcgtcccggcattgggcagctcgaccagctcgggcggctgcgtggggttggtcggtgcggcggtcggctcttccgttgcgggcgggtccgtcgggtcaagcggcagcagcccgccgtgctccgccgggcctcgggaacaggcggcaagcgaaacggccagcatcagcgcgcacagcgcggagatcagctttttcatctccatcatcctttcgtcaaaaatcgtaaaatatgtcagcgagtgtatttgctcaaaaccgttctatctattcagacgcgatttccgcgcatccgttccgcagattttgcgtttctttttctgggcagcaccgcacaattgcagcttcggccttcaccgaatgctctcgctgaattatgcggtgctgcccttgttttaaccgaaagattctattataataagggtatgttttggaaacacctgtacggagaggatgactgccgtgtatttttcccgggaaaaactgaatgcgctcgtgccgcccgccgggctggagggcgcggccgagctgctgaacggactggagtatgatcggagcagcgtatgctccgccgtcgtgaccgccctgcgcccgctgctggcgcgccttgcgccggagccggaggccggatggctgcccgcgctgtatgcgtggctggacaacggtctgttccccgatcccgcctatcaggccccgcccgaggcaccggtgcttgccgcgctggccgagctgctggacggcgtgctcgcctgcgaggacgcgccgtttgatatgctgaccgatctggctgcgcacggcccggaggacggaagccgtgtcgccgatgagctgcccgccttccacgccgcactgcacgcctcgcattttgtgaccatgctgcgcatcggccgggagcttctgccgtttgacgccgcttcgcacaccatcggcgtgcacaacatcgccacgctgaccgcccagtgcgcgaaggaagccgggcttcctgtcgacgtcccgctcgtcagcgcggccgccctgtgccacgatatcggcaagttcggctgccgcggcgcggatgcaaagcgcatcccctatctgcactattattatacctggcagtggctgtccggccacggcatggagcacatcgcgcatatctccgcgaaccactccacctgggacctcgaatttgagaatctgcccgtggagtccctgctgctcatctatgcggacttccgcgtgcgcggcacgcgcgagggcgggcgcgagaccgtgcgcatttattcactggcagaggcctatgcgatgatcctttcaaagctggcggacgtcacgccggaaaaggagcgccgttaccgcacggtctatacgaagctgcgcgattttgaggactatctgcacagccgcggcgtcgctacggagtccggtcctgcgccggagtgcaacgggcgcgaccctgccctgctcacgcagcaggaggcgttggacgctctgcgcgctttgacgttcgaccacgccatccgcctgatgcacaccgtcagcacggacgcgtcgttcgatcagctgctcgagcaggcgcgcggcgagaagaacacgctgcgcatccgcacctacctcgagctgtttcaggaataccacacctatatgtccagcggaaacaagcgcaagctgctcgccttcctctatgagctgctgctgtatcccgagggcgacgttcgccgtctggccgggcagctcatgggcagcgtgctggccaacagcgggccgaaataccgcaaggagctgccctccgccgcgccgcaggacgcagccgcgcccgcgatgctctccgtgctggaggaatcgctcggcctgtgggagcagaccgtggcgcagtgcctgcaccccgaccacaaaatctccccgaagcacgcccagcgcatctccaactcgctgaaggccgttgccgaaacgcttctggccgagacggaggacgcggcgcggctggcgcagccgctgctctcgcgcctgccggatgccacggacgaggacagcttcgtgctgctcgacgccctctaccacaccccgccgcatgccgtctccacgctcgccccggcggcggaccggctgcgcgccctgctgtgcggtccggaccagagccgccgcattgcggccctgcgctgcctgcggcgcttccgtgccgccgcgccggaggacctgctgcaggaggccgctgtgccgcttgcggacgaccttcccgccgtgcgtgccctgcgcggccgcctgaccggcaaaacgccggccccgctctcggaatccgaggcctcgctgctctacctcagcaatctgaagactgccgtgccgtgggtcgtgaaaaacgcccagatcgacctgctgcaggccgatgcgctgcagcacacgggcaacacattccacacggcgacgcatctttccaatctgctgtccgtcagcgagcaccttcccgtgcgcgagcacgccgggcgcgcgcttctgaccatcagcacgcgcctgagcgtcgaccagcgcaacgagatcatcgtcgacctcatgcgcgagctggaaaacgggcaggagcagatcgcacgcttcatcccccgttatctcgggcggctgctgagcaccatgccggaaaaggagatccgcgaaagcatcgattttctcgacggcctgctgcgcagcggcagcgcccgcgccgcttcgacctcgctccggacgctcggcagcctgatctccgccctgccggaaaacagcgtgctgacggagcactgccttggcctgctgctgacgggtgtgtcgcactatgacgagtccgtgcaccgcagtgccatgaccgttctgtgccacgatgtcatcggcagcgaacgcctgccgttctccctgcgggcgcactgctttgcccgcgtgagcaaaaagctcctgtgcctgctggccgagcctgcaccgggcaagctgacgttcttcaaccgggctgccatgctgaatcacctgtaccgcttccttgtgcaggcggaggtcgtgcagggcgggctgcgctttcccgcgccgctgccggcggcgttctttcccggcacgtttgacccgttttccgccggacacaagcgcatcgtgcaggaaatccgggcgctcggctatgaggtctacctcgccgtggacgaattctcctggagcaagcgcacgctggcgcggctgctgcgccgccggatcgtcaacatgtccgtggccgatcagtgggatacctatgtgttcccgaacgccatccccatcaacatcgccatgccggaggacatcgcgcagctgcgtgcgtgcttccccggccggagcgtgacgctcgtggcgggctgcgacgtcgtgtgcggagcctcggcctaccgctcgctccgccccggcggtgtacaggagctggatcacctgctcatccgccgcggagagacggacgaaacggacatccgcacccgtctgcagggccgcgtgacgtttctggagctcccgccccagctcgagggcatcagctccacgcgtatccgcgaatccatcgatcaggacgtcgatatctccatgcttgtcgacccgatcgtccagtcctatatctatgaatacgacctctatctccgttccccgcagcacaagaacgtgctgcaggcgcaggagctggaattccgcatcgtgacggggacggaggacgacctcccacctgccctgttcgagcggctgcgcagcacgccggagccgctggccatcctgctgcgcagccgtaggcgtcatgcggccgtcggctggtgctgcggccataccgtgcgcccggcgagcctgtttgcggagctcggctccgtcgaggccgcctcggccgtccgccgcctgacctccggcaagctgctgaagctcgaccatgtggaggcggacgacgcgcagacgcggcgcatgcttgtcaatgagctgctcgcccgcagtctggcgtccgaccacacgtttgcgctggcccgctgcgagggcgaatggctggaggagctcggcttcttccccgtcgaggatgccgagggactgctgtgcgtcgacatgcgcgcccccattgtcctcattcaggacgtgctgctgtgcatcaaaaagccgcaccacgatgagccgcaggtgcgcgccgccgtggaggccgcccggccccggctgcgccgcgcgctgtgcgcgctgtatcccggcaggctcgtgctgagcttcgacgcggaactgctcaaccagtcgctcatgtaccgcgtgcagaagctcggcggtgtactcggcgcaccggccgggcagctcggccgggccatgtgcgtgccctacggcaagattctctccgacgagatcgtgccgaacaccgtcacaaagacgctgcatgtggacaagacattcgcgccggacggcagctcgttctccgtcccggcctaccccggctacgacaccgtgcgcaatcaggtccgcaccatcaaggccttccgccgcccggtcatcctcgtggacgatctgctgcacaacggttaccgcctcgacaagctcagcccggtctttgccgcggaggagctggagatccgcaccgtcgtcgtcggcattctctcggcgcgcggccgcgacctcatggaggtgcaggggcggcaggtcgagtgcgaatacttcatcccgaatctgcactactgggtcacggagagcctgctgtatcccttcctcggcggcgacagcgtcggcacgcctgcgccggggcggatgctgccctccatcaacctgatcctgccctattactacccgcgccactatgttggaacgacggatgccgccatccgcgacctcagccgcactgcgctggagaacacgctctccatcctgcacgcgctcgaacaggcgcatcaggaacagttcagcacggcgctgacgctgcgccgcctcggcgaggccctctaccgcccgcgcctgccggaccgcggacgatccctgcgctatgacctgtcgcttcccgcctccgcctgtctggaggacgatctgctgcggcttgaccgcatccgtatgcgaggaggaatgatccatggagcttaaacaatggcacggcttctgcctgtgcccgctgggcggagcctgtccgccggatgccgtgcccgcagacgcgccgttttccccgctggtgtttcttgtccggcgcgatccgctgcgctcccgcggcctgtttgccgttaccgtgctggacgaggtcttcgaggccgagacggccggtgtgctgctgccgccggcgcaggggacgacgcctgccgagccgctgcgcgaatttgtggcggctaacggcgcctgcgtgctgaacacggcgttttccgccgcattctccgttctggagcgctggcaccggaagcgcacacagccgctgcgcgtcacactcgtcgggcttggcgacgtcggcggcacactgctgctggcgctgaagctgctcggccgggagctgggcgagctgcgcatctatgacccgaacgccgcgcagtgtcggcgctacgagctggagctgaatcaggtccttccgctggaccacccgctgccgcccgtcaccgtctgcacggaggacacgctgttcgactgcgacctgctgctgttcacggcctcgcgcggcgtgccgcccgtcggctccggcgtggcggacgtacggctggcgcaatacgaaaaaaaccgcgccatgctgcgcagctatgcagccatggcgcgcaaaacgcactttaccggtctgttctgccagatctccgaccccgtcgatccgctggcctgcgccgttttccgcgaaagcaaccgcaacgccgccggggaatttgacggctgcggcctgctgccggagcaggtgcagggctttggcctcggcgtgatggaggcgcgcgcccgctggtgcgcgcaggaggacggcatcgacttttcgaacggccgcgtctacggcccgcacggcggcggccttgtcgcggcaaacgatcccgcagcctacgacaaagcggtctccgcccggctgacggagcgggccgtgcatgccaatctcgaggtgcgggcgctcggcttcaaaccgtatctcgcccccgccctctcctctgccgccgtgagcattctgtcccttgtgcgcgggcagccatatgatgccgctctgccgctcggcggtgtgtggctcggcgcacagcggcgcatgacgccgctcgggccgctgcagcgccgtgagccgctccaccccgcgctgcttgcccgcatcgaggccgcgcggctggagctggaggccttctgccatgatgcctgagccgctgcttctcgtctgcccgtcggccgggccgcgcctgcgggacgtgattgaaacagccctatgcgatctgccggtccgcaatgcgcagggcgacttgcgcggcgcgcgcattctgttcgcgctcgatgccggctccgccgggatggatgagccgacgctccgtctgctccggcggctgcggagcgagccgggctgtctggagggctccgtctgcggcttcgttgtcgacggagagacggagctctacaccaaggcgctggcgcaggatctggcgctcgccgcgaatctcgccggagcggccctgcccggcaagccgctcgtggagggcacaggctccctctataaccagcacattctcgccgcgcggcgcggcatgagctgggaggagacgtaccgtgaacgcacgagggagctgggagaacgcctgctcgccttttccccgaagcgcgtcgggcggccgaagctgctcgtgctgcatgcctccgaaagcggccgctcgagcacgctctggatgggccgcgagctgagccgccgcctgagcggctgctgcagcattgcggaaatttcactgcgcaacggcacgatccacgactgccgcggctgctcctacagcgcgtgcctgcattttgcgcgcagcggcagctgcttttacggcggagccatctccgagaccgtcctgcccgcgatccgcgagtgcgacgccatgctgttcctctgtccgaactacaacgatgccgccggcgcaaatttcacggccctgttcaaccgcctgacgagcctgctgctgcagtgcgacctgtcggaaaagcagctctacagcgtcatcgtctccggctactccggcggcgatctcgtcgcgcgccagctgctcggtgcgatgtgcctgaacaagaccgtctcgctgccgccgcgcttctgcctgctggaaacggcgaacgacctgccaacggcgcaggctctgccgggcatcgccgggcggctggacgcctttgccgctgccatgcagcgctccctgtgtcagcccgccgggaacagctcggaaatttcaccgaacgaatagcccatctcctcccagcgcgtgagcagactgtcgaggatggccgcgtttgtctgggacgtgctgtgcagcagcacaacggctccgttgtggatgcgcgggatgagcttggcataggcctgctccgacgtcggctgatcgtcctgcagccagtccacataggcaaggctccagaacacggtgtgatagccgagctgctgcgccatttcgagatttttctcggaatagatgccctgcggcgggcggtagaattttgcaagctcctgcccggtcgtgtcacggtagagcatctcgagggactcgagctcctgccggaactgctccatctccccgatcttcgacatgtcccagtggtggtaggtgtgattgccgaccgtatgcccctcctgcgccatgcgccggacgaggtctggatttcgctcgatgtagttgccgaccaggaagaatgccgccggagcatggtgcttctgcagcgcatcgaggatctgcgccgtgcagccgttctcatagcccgcgtcgaacgtgagatagatgcgcttctgcgccgtatcgccaaggaaggccgcatcatactgccgcagccggtccgccgtggtgtttcccacgggcggctggccctcctgctggaagctcaggccccacgagcctgccgggagcgccgctgcctgcttggccgcgcccgcgcccgcaagggccagaatgatgcccagcacgagcaggacgggcagattccgccggtaaaagtttcgcatgtccatcacctcgcctcagcttatgccgccgctgccgggaaatatgcagggcgcgaatttcccggctgtcaagttttttctcttgacaagcgcacatccgtctgctataatacccaaggtcaaggggggcggtatcatgaaacaggaagcctttaccatgtccctgctcttcgacacctacggcgcgctgctgaccgaaaagcagcaaacctattttgacctctattacaatcaggatctctcgctggcagagatcgccgagcaggagggcatttcccgtcagggcgttcacgacgccatctcccgcagtgaggcgctgctcgctgcgttcgagcgcgtgaccggctgcgtcgcccgggagcaaaagctccgccatgccctcgccgcgatcaccgccgaggcccagcccctgctgcaggccggggatcccgccacccggcaaggcgcccagcgcatccttgccgccgttgattccctgaaggagtagccatggcatttgaaggtctgaccgcaaaactgaacgccgcgttcaaaaagctgcgcggcaagggccgcctgtccgaatccgatatcaaggaggccatgcgcgagatccgtcttgcgcttctggaggcggacgtcagctataaagtcgtcaaggacttcgtcaagtccgtttcggagcgatgctccgggcaggacgtgatggagagcctgacccctgcacagacgatcgtcaagatcgtcaacgaagagctcatccgtctgatgggcagcgaaaaccagcgtatttccatctcccccaagccgccgacggtcgttatgctcgtcggtctgcagggcgcaggcaaaaccacgaacggtgcaaagctcgccggtctattcaaaaagcagggcaagcgcccgctgctcgtcgcctgcgatatttaccgccccgccgccatcaagcagctggaggtcgtcggcggtcagctcggcatcccggtgttccagatggggcaggaaaaccccgtgaagatcgccaaggccgccatccgccatgcgcagcagcacggcaacgacatggtcttcctcgacacggccggccgcctgcatgtggacgaggccctgatgaacgagctgaagtccatcaaggctgaggtccagccgaatgaaattctgctcgtcgtggacgccatgaccggtcaggacgccgtgaacgccgcccagtcgttcaacgaatggctggacatcgacggcgtgatgctcacgaagctcgacggcgatgcccgcggcggcgctgcgctgtccgtcaaggccgtcaccggcaagcccatcaagttcatcggcaccggcgaaaagctcgacatgatcgagccgttccacccggagcgcatggcttcgcgtattctcggcatgggcgacgtgctcacgctgatcgaaaaggccgagcaggccctcgaccagaagaaggccgccgagctcgaacagaagatgcgggccaacaagttcacgctcgccgatttctacgatcagctcctgcagatccgcaagatgggtcccatgcaggacctgctcggcatgattcccggcatgggcagcatgaagaatgtgcaggtcgacgaatcggccctcggccgcgtcgaagccatcattctctccatgacgccctatgagcgtgagaatcccgcgtgcctgaattcctcgcgcaagcgccgcatcgcgcttggctgcggccagaaggtcgaggacgtcaaccgtctgctcaagcagtttgaccagatgcagcagcttatgaagcagatgaacggcaagggcaaaaagcgcaagctgcccggcaaaatgggaggctttcccggcttccccggtatgtgatcattggaccgcaaccaggtctgacgatatattttgaattctatttggaggtgaaaccccatggttaaaatcagactgagaagaatgggtgcgaagaaggctccttactaccgcatcatcgttgccgattcccgcagcccgcgcgacggccgctgcatcgaagagatcggcacctatgatcccctgaccgagccggccaccatcgctgtcgacgccgagaaggcccagcagtggatcaagaacggcgctcagccgaccgacaccgtgaaggcgcttttgaaaaaggctaacgtcctttgatcgagagggactgcacgatgaaggaactcttgctctatgtggcaaagcagcttgttgacgatcccgaggccgtgacggtcacggagcgcgaggacggcgagagcaccgttctggagcttcacgttgcgccggaggatatgggcaaggtcatcggccgccagggacgcatcgcaaaagagatccggaccatcatcaaggccgtctcccagcgtgacggcaagcgcgtcaccgttgacattgtggactgatgcaaattcgctcgctgcatccctgcagcgggcattttgcatttctccccttttttggccccgccggcccgcgtgcatgccgctgtcgtgcacacagacctgtcatggaggaaccgctgttatgaaatctgaacagacccgcgcccgggcgctgcgcaggcagctgaccgcgacgttctatcgaaaaaataaagccacattctttgtcacagcaggagcaatgctcctgctcggcggcgcgctgctggccgttgcctggatcctgcagcagatcatcgacattgcctccggcgacagcgttgccccgctcgttcgcatgtgctggctgtgtctcggtgttctggtaagcgtgacgacgatctatgtggtgcaatgctatacctaccccgcctttctgcggcgcgccatgaagcagtataaagaatacgccttcacggagctgacgaagaaaagcatcagcacgttctcggacgagaatacgagccgctatatctccgccctgacgaatgatgccgtctgcatcgagacaaattaccttgcgaagatctttacacttctgacaaagagcgtctcctttgtgggcggcctggtcatgatgctgctctacagtcccctgctcaccggctttgccctgctgctgtcgctcgtgccgctggctgtttccgtcctgtgcggcaacaggctggcgcggatggagacggaggtctcgcggcagaacgagtcgttcgtcgccatgacgaaggaccttctgtccggcttctccgttgtcaagagcttcaaggcagaggccgaggtcgttgcccgcttctgccgccgtaacgaggagctggaggagacgaagggccgtcgccgccgcatggaggaggtcatcaccatgctcggtaccggcgcagggatcgtagcccaactcggcgtattcctgttcggcgcctatcttgccgtaacgaaacagggcgttacgcccggcgtcgtcatcgtatttctgccgctcatgagcttcgtggtcgatcccatcggctctgtgccgcccattctggccaaccgccgtgccgccgttgccctcatcgacaagctggccgatgccgtgggcaaaaacgtccgcgagagcggcgagcagatggacccggtcctgcgcgacggtatcaccatcgatcacctgacctacggctatcacgagagtgcgcccgtcctgaacgatgtttccgtccgctttgaggccggaaaaagctatgccatcgtcggcacatccggcagcggcaagtccacgctcgtgaacctgctcatgggcagcagcaacgactatcagggcagcatccgcttcgatcagcgcgagctgcgcaccatcgcagcggaatcgctctacggccttgtttccgtcgtgcagcagaacgtgtttatcttcgacgataccatccgcaacaatatcacgatgttccgccactttgacgagaatcttgtgcagcaggccacggagaaggccggtctgactccccttttggccgagcgtggcgaggactatatctgcggtgagggcggctccggcctctccggcggcgagcggcagcgcatctccatcgcgcgctgcctgctgcggcagacgcccgtcctgctcatcgacgaggccacggcagcactggatgccgccacggcctattctgtcagtgccgccattctggccattgagggcctgacgcgtattgttgttacgcaccggctcgaggagccgctgctgcggaaatatgatgaaattctcgttctgaaaaacggcgagatctgcgaacgcggcagctttgatgccctgatggcacgccgcgagcagttctattccctgttcaacgtagcaaacggctgacccttggcaaaacacggagccctcgctctgaaagcggaggctccgattttttacgcctgttttgttcagaagccaagctcctcgccgacgaggatgacatggatgcgcccggcggggcggcaatttcgcgtgatgaggatctgattgcagatgcattcctcaccgtggcagtcggcgcagcagccggtctgcgcgcacggcgttttgccgaggaagcgctgctcatttttcggcgcggcgatcgttcgggcacggtgcacggcctcgtcgagcgtatcgacgaccttgttcatcccggcgatcacgatgatctcgcgcggaccgaacacgatggcagcaacgcggtttcccttgccgtcgatattcaccagttctcccgtaaggctgacggcattcgcgcccgtcaggaagaaatcggcagagaggcagtcgtgggccgcctgctcccgctcggcatccgtctgcatgctctcgcggtcgatgacgcgccacgggccgtcccgcagggcctgctgcaggccgatctggtccgcagaacgtgcgccgccccagccgacgagggcatcgtgcggaatcagccgcagcgcagcagccagcgcagaggtccggttcgggcagtagcatgcatcaaaatgccgggcgcgcagattcttcagcaggagctgcgcgcgcttttcataaaacagcgaaacaggttccatcgatttagcctccgttttttctttcattttatcgcgccggaggcgaaaatgcaagggagcaaattgggacaaccgggcagcagcatatcaaatagcctcgcagagttcgccgcccgcaggcggcgaataaaatgggatcattttctccggcggcgtgcacgtcggagaaaatacagctcagtccgtaagtgtgcgaatcgcccgtcaaaggcgggcgattcgtgcgcgcaatggactgcaatcttttatcagaaaagcctttcggcttttctgatagtcttgccgccctgtcccgggggacagggcggccggtatttgcttattttccagcgggggcgatagtcagaccgttgaggtccagaccgccgccgacggtgtcgatcagcgtgatcgcgccggtctcatcgaaggagtagaggcgatgcgccgagtcggtcacatagaacaggccggtcgtcggatcgtagtccatttcgttgaggcggttttcgaccatgaggtcgacctctgcaagcttcgtgaatgtggtgagatccacatccgcgcggatgagctcggtattgccatagcctctggcgaggacatagacattgccgtccttgcaggcaacggtacgcggagacgggatgttcgtcatgccagacatatcgcggtaggccgtccagtagttcagctgcgtgggatccatacgggacggattgaactggaacaggtagaagcccgcgacaacatacagcaccttatttaccgggtcatacgcgatatcgttggcatcggagaaggtgtagacctggcccttcagcgtggtctgcttcgacgtgaggtcgtagtagtagatgtagggcaggccgccttcgttgacgacatagtacaggccgccttcgtagtcataggcaagacccgtgatgttcgtgccgccgctgaaggtcgcgacctcagtcgccgtggagtccggcagctcggggttgaagctgtagagagcatcgtgcttggcggagaccgtgtaagccgtggaaacaggcttgccggtcatgtcgaccacagtcagcgtgcaggtggcagtaacgccggtctcaacgctcgtggcggtgatgacgacgttgcctgcggcaacggacgtgaccagaccgcttgcatcgaccttcgcaacgttctcatcggaggagctccaggtgatggcctggttcgccgcgttggacgggcggaccttgccggtaagctggaaggactcgccaagggccagacggccgacagtcttgttcagcaggatgccgttgaccttgccgacaggcgtctgctccgccgtggggatggagcacaggaggccgagataggcatcgccctgcttcgtcgtacggccgggagcggtctggacggagatcttgccgaggttcacgagctcaggcgtgccctcgcccagcatgaacatgtacatgccgctgctcatagccagcagcttcgtgtgatacgttgcatgcaggtacagacgatccgtgccaaagtcataggtcatctgtgcgttgtaggacatgctgccgtagtaggtgctgccggtgccaacctgagcgcccgggatatccatgacgaaggtgcaggcagctgtcttcggatcgacggtgtagagcttcgcctccacgccgatggcagtgcttccggctgcgtagaggacgcctctcttgtcgattgcaagagccgtgaccttctcggaggtcgccgcgatctcggtgacggcgccgttatcaaggtcgatcgtcacaagcttgccgctgagcgtcaggccgtacatggtgccggtcgtgtagtccatggccatgccggtgacctgatcggtctccacgtcgaggttgacgctgccaaggttcgtgtaggacgaaacgtccgaagcatcgaagcggtagaagtcgcccttggagttgtaggcgtagacacagccgtcgtagtaagcgccggtgcgcagggagtaagtaccgatggcagaggtcgtcaccgggcaggttctcaggttgttgtccgggacctgcagccagaagtcatagtagccgctgccgccgttctggtcgtcgttcaggaacgagaggaacgtgcctgcggaggcgtagaccgtgacgtcgatgctgtccgtgaacgggccgccctcgacctcgggattcttgttcgtgatggagaccgtgacggtcgccgtgccgacgccgtggaacgtggcaacaccaaagcggtcaacggtgacgacatcggggttgttgctggtccaggtgcgagtacggacagtcgggcggaccggggtcgtgacggtatcgagctgcagcgtgccgccgacaaggccggtgacactgtcgccgttcgtaatctcgatgccctcaacggggatgtgcttcgtctccggctcattctccggaatggtgaacattgcggtggactcaacgccagacttcgtggagacgttgccgatcttcacgatcgtcgcttcgagcttgtcgggatcccattcctgcgggtcgatgcggacgaggcacagcggagaagaaccggcattcatgcaggggttccagtagatgtttccagtgttgtagtcatacatcatagaagcatagtaccaggtatcctgaccgagggagccgagcttcgtcgtgctcagggtgtcggcattgaccatgtagaggttgccggacatatccgagacgatgatgtagccttctgcagtgacggtcatggcgggggtgatcgccgggccgccgatctcgccggagtaggtgccgagcaggtcgatcgcgccggtgtcgaggtcgacaatggcgaggccgcggttcgtaagatcgaccgcatacatacgaccggtgttgtaatcgaagcccatgttgccgagctcgacgcctgcggtgaagccgatgaactcgatatcgccgaacgtggtcttatccggggtttcgcccttgttgaccttgaagcggtagagggacgtgccgacgccgaacgtgctgtcatccatagcgcgggcttccttcacgacagcgtagacatagccgttgtagtaggcagcaccctgccacatggcatcggtcgtgctctcctcgccgtcgatgccgacgaccgtaagcttctgctttgcgatctgcgtgagctgcgtgggcgttttgtcggagaacgtaacccaggtaaagccattggcggcgttcttgtagtccgccacaatataggtgtagatggcatctgcggagccaacgacgcggaccgtagcggtcgcggtgtaatcgacccactgcgggacggtggagctggtttcttcatcccagtgccaaggatcccagaccttgccagtcgcggtgatctcggtctcgccctcgcctacggcggtgacgaagccctgctgtgtgacggtggcgatggtctcgtccgcggaggcccaggtcagttcgcttgccttagcgttccacggattccactcgacctcaaagcgcttgcgctggccctgcgtcatggtaagctgatacggggaaagctggaagcgctcttgcggatccacgccgatggtgaacaggtcggacgtcttgtcggtcggaacgaacagggacgtctggccgccggggccgtaggtgccgacctctgtgcacttgccggtggcaaggtcgaccttgtaggtcatgcagacattgatgtaggtgttgcctgcagccgtctggctgtgtgcataccagtacatcgtgtcggtgttgtgatcatagcccatggactggatgacattgcaaccggagtagttggcgtagtttacgaaatcggtcgtgccgatgtaggtgcacacgccgtcgcgctcgaggctgtagagcttaccggcggtagaaatgccgtaaagctggccttccgtcgtgcagccgagggtcaggatctcaccgtcggagccggtgatgtcggcgatcttctcaagggagatggagccgttggagtagaagctgatctggaagagagcgttgcttccgtcatccttgccgtcgccgtcgcggtcgccttcatagttccagccgacagcgtagagatggttgctgaccgtatccgaatcgctcttgcccttgtcagaatagtcgagtgccatgtcgtacaggaccttgaagccgctgtcgccgaccttgctggactgagtgacgagggtctgagaaccccagtaggtgttgtacggggtaacaagcacgaccgcgccgtccgttgcgcgctgggccacgaggtagccgttgacgtactctgcagaataatagcggttcgagctgtcgaacgtctcgttgcggtagtcgctcatgtctgccttgttggcgctgaaccagccgccttcaacggcagcgcggtcaaacgtctcgcagccatacaggcggtcggagctcagcttctgcatggcaggcttctgatcggccattgcgccgaggtcgagggagacatcgatttccgtctcattgcaggcgtagtccgccacaacgatggtgaagtcggggccgaagccggtgatgtcgtagtcctgggtaaaggtcttgcccggctcattcttgacttcatacttgcccataatgatgccgtcgttgttgacgaagatcagggccgcgatgtgctggttgtcgttgagcttcagcggaagaaggaccttgccgttctcgatcttgagatcctgctggagggtcgcctcattctccacaacgggagccttgtcgtccagcgtgacatcaaaggagaaggaatcgtccatcacgtcgtcgccgtcatcgagccatgcactggcagtgtaggtgacggtcgtgccgtcgggcagcttgttgtcgttcttgtcaaggccgttccagacctcgccttcctctgccagaacatacagcgggatgatctggccgtagccggagttatagtaggactttgccatatactcgccggtcaggtcgaagtagacctcgttcgtgaccttatccttaacctggaagttgatcttcttcaggttgcggagcaggccgacgtcgatctcggcaagcgggttggcataggagaaggcattgtactcgtcgccggaagcgccggtacggatgtacgggttcgtgccgatggcggcattgttcgtgaaaatgctgagcggatacaggctggcttcgtcttcgtcagcagagtcgaacgcaggagcctgagaccagtcgccgtagaagccgaggaacggcatctcgaggtcggtcgtgtcatccgtggcggacttcacataaaggaagccttcgacatacatgccgttctcgaaggatgcgtcgagataggccttgtcttccgcggtcagcgtgatggtggctgtcagggtgacggactcgccagccggaacggtgacgctctcgagcgcttccgtgccggaaatgacggcattctccgtcagatcggtgctgacctcaagctctgcgcagtaggccgtgatgacatcgacatcatccttgttgacggtgccgtcgccattgacgtccagataggcatagtgcacattgtcctcagcgatgggagcatcatcggtgacatgcagcagcaggacgcgggcgtcggccgtcgtgatctcgccgtcgtcattgaagtcatacttcatgatgttcgactcggtcgcaccggccacggtcagggaagcgcccagcgcatagggagcgtggccgatgaacgtgccgttggtgtaggtcacgacggtttcggtgagaatggaggcattgaacgtataggtcagatccttctcaccggacatgttgttgatagtgaacgggaacgtgtagacaccgtttttggcgtcgtcgtcgcccagctccgccttggcgcggttctcataagcctgcgcgttggacagataggcaagggagcttgttgccttgacaaggttggcaagaccggcgccctggcctctcggggagacctcgaggccgttggaatcgaggatgggatccgccgtgctcatcaggaggttcgcagcgacctgacggagctctgcttcctgatactgcggatagttctggcgcagatactgcatgagaacagccatcgcaccggtgatctgcggggtcgccatggacgtaccgctcataaggccgtagttggagcctgcgatgctcggatcacgggtggaatagatgttgccgccaacaccggcgatctccggcttcagcttcaggtccggggtgacgccccaggaggagaagtcgctgagggtgcggtcgcgcttgacctgcacgaggtcgccgttgcagcatgtcagggtcttgacgccctcggcgaactgcgccttcatgtactcgccgtctgccttggagacaaagactgcggggatgttatcgccgccgtcattgatctgcatgttgagcatgccggaagcattgttgtagaccacgatgccgatcgcacctgcagcctgtgcagcggcctgcttgtcggggaaggagctggagccgcgggaaaccagggcgatcttacctctgacatccacattctcatagtcgctcgcctcgccgtaaccgccgatcggaacgaactccacagactggcccttgaagttactcaggaacttcgtggcgttcgtcgttgcggtgtcgttgtagccgatggtacggccgttcacggtgaagtacagggattctgcgccgtcgttgtcgatggaggcaacggacagagcggcagaaagcgtactcggggtaccgacgacgccgtcatcggggttgccggaacgggagagattccatccggtgcggttctgatatgcagcgttcgtttcgttgcccgcagcgatcaggacctcgatatcggtgctctcgaacagctcgagcgttttgctcatgtcgccggtcgtaaagccgccggctgcaccaagggagaggttgcaggcatcgacatctagacggacgcaatcttcaaggccggccatgatggtgtcccagccggcgccgccgcccgcggagaagacctgcatgacgatgatctgggcatccggcgcaacaccgatgacactgctgccttcgatcttattagcagccgtgataccggcgacatgcgtgccgtggtcatgctttgccgttgcgtgcgatacatcgaaatcatgcgtgtagtagttgaagatgaacggaagcttgctattataataggagcgattgcgcaggctcgtcatctggcccgcattcagcgtgttccagatggcatcgacgccttccttcgtcagggagctctcggtgagcttatcctcggacagagcgccgaagttcggatgatcgaccacgatgccggtgtccagaatggcgaccttcatgcccttgccggtgaagcccgttgcattgagctgatcggcgccgatcatggtggtggcattgctggtcatgggctgcagctcaccgtcagacgtcagggcggactcctcctcgggcagggagaacgtcggggcgacgtagacatgatccacaccgggaagcgcctcgagggcttccttattgccgtactccgtctttacggccacgccggtcgtagcgatggtgtaggtgtaacccagctcaaactgtgcgtcattgcggaacttctgcgtgaggtttgccttgagcgcattgagctcgagacggagcgcggcctcataggcaacagccttcggcgcgcgggtggcgatgtcgtccttcgtgaagcctgccacgagcagcgggctcttctgcatgacgacgatgaacgtgacaacctcgtccgccttgggctcgctctcggcaagctgtgcggagaagcggtcttcgccgttctgcacgagcttcggctcaccagcctcaacgggctgctgcgcgtcggtctcgacaatcggttcttcagcgatattgctgctcgggagctgcaccgggccgtccgtggagatctccgggacgttgccgtctgcaaagccgctctccgtggcaaaggccatgggaacgcccgtcagaacaagtgccagcgcaaggagcagagacaggatccttttcttcattgcggctcctccctttctcagtgctgcaccagcgtggcataccgcacgatgacggtggccacctgaccgcgggtggaattaccggtgggatcgagcttattctcgcccacgcccttgatgaggccggcctcaacggcccacgtcatcgcgggaacggcataggcgctgacgctggaggcatctgcaaaggccttcagatcgccctttgccgtggtgtcgacaccggcaagcttggcatagcgcgcaaagaacgcgaccatctgctcacgggtgacattttcctccggagcaaactccgttgcactcacgccgttggtgacgttgttctgataagcccagatgacagcgttcgtgtaccagctgttcttctcgacatcgcggaacggtgcagtgcccttgacggagggctcccctgcgatgcggtacagcacggtgacgagcatggcgcggctcatctcggtatcgggctggaacttcgcgccgcccatgccgatcatgtaaccgcggctgacgacgaagtcgatgccctcgtgataatactcgttccgatcgacgtccgtgaagcgggaagccgggcactcgacgagcagcgtagcggtggactgcagctttgcatccttcgcgccgctgatgtagccgccctgcaggacgacctgcgttctgcattcctgcagagcctcaaacttgagggtcaggacggtgccggccttggcagccttcgcaccggcaaatgccgcaacgacggcgtccttcttgccggagttgaccttcaggctgagctccgtgcctgcgggccaggcctctcctgcctctgcgccgacgaacttcaggctcttgctgtcgtaggcaaaggtcagctttccgtctgccacgacgccctctgcctccgtgttcacggcgacgcagacctcatcgccgcggatcacatgctgggatgtgacctgaagcgtgaggagagagctctcgatcgcagcgacgctggtcagacccaggccgagcaccagggcgactgccagcagcagcgaaaagagccggcgaacgttacttctcataatctctgttcctccttctttttgatgcacccgagccgggtacgcgggcccgccgttcctgccgagtcggcagtattgcagcggcaagctgcaatttttgcagctcttacccaatgttaccataaacacaggaaaatcgcaagcatttatttttaatatttgtctcataaatagtcgtatagtcctgacggcgtaaaaatttggtaaaaaatacccgtccggcaccggtcaggtaccgaacgggccatatcttacttctgttcgctgacgtattccagtacccagcggaacaggcgttcgagcgcatcgggccgcgtgatgtaattcacgcgctcaccgtcgccgcgcgtctccagatagccgagcttgtaaagcccgtagacgttccgggagaccgtgccggagttcaggttcatcgaggccgcaagctgcgccgccgaaaacggctctgcggcacagcgccgcaggatctccagcttgtccttaccggtcaaggcgcgcatcatggcgcacagtgtctcggcatccggccggacctgatgtgccgccgcaaattcaaagctgaggttcgcgccgagataggcaatacgcacggtcttgccgccgctctcgaaccactccgtccagaagccgaccatgttgaagttccacagcgcgatccagacctcatccggctgcatctcctgcgtgaagagatacgacgcgcggaacatctcctgctggaacgtgtcgacggagtgcgtctgaaagtacttttcccagatggccagctgcgcgcggttccgctcggtcaatgcctgcatttcggccgccagctgctcggcgaccgggcggagcagctccgtcagctcgcgcagataggtctcgaactccgtcagcacgcgcaggatctcccatcgtgcctccatggagcatggcagccgttccagctgcacctgcagcggctccggctcctcctgcggatcaagcggctccagaacgaggcccatggtgttcatgtcgttgatcttgaagccaatgcccgacatataccggaacatgcgcagcagctcggcggcaaacgagtcaatatcggtgcagttgagcggcgtggccacgagcatggtgtgcgcaagacagcagcaggtcttctcatccgttcccggcagcttttcaaaaaaatagcgcagccgcgcctgatgcgggtcgagcgtctgcgtgacggctgcggagatacgatccagctcctgcgccagctgcaggccctgatcctccttctcgagcaagtagcggccgaattttcggtttacacgctcatagtctcttgtatatgctattccatttatataatagtataaaagatagacggtttccgcaaaaaggcagggtttatcgatcacacgaaccctcacaagatcactcctttgcggctattgtagtatacgcccgcgcaatttgtcaacacccgtttcggaaaaaacttgtatattttgctggaatctgccgcataaaaatcggtcgttcctgtcattgtcacaaagcgctcccctgccggagttgacaaatttctgcctttccggtatgataaaccaaacggcatatccgaaaaacggagctgccgcaggagggactatgaaatatgattttatcacggtgctcgaccgcaccggcgcggattccattgccgcaaacatcgatccctggggcgtgagccctgctccggcgcagcgcatccccatgtgggtcgcggacatgagcttcccgaccgcgccgccgatcctcgaggcgatgcataagcgtctcgcttttccgaacttcggttatttttccatgccggatgaatattttgactgcattctccgctggcaggagacgcgcaacggcctgaccggcctgaagcgcgcggacatcggctatgaaaacggcgtgcttggcggcgtcagctcggccgtgcaggccctgaccgtccccggcgaggccgtgctgctgcacgccccggcctacatcggctttacccatgttctggataatctcggccgcaaagcggagctttctcccctgcgccgcgatgaaaacggagtctggcgcatggattacgaggacatggaccgccgcctgaaggagcattccatccgccttgccatcctctgctcgccgcataacccgacgggccgcgtctgggagcgctgggagctggaaaaggccatggcggtctatgctgcaaacgactgctttgtcctctcagacgagatctggtccgatctcatcctgccgggctatcggcacatccccacgctttccgtctcggacgatgcacgccgccgtacggccgcattttatgccccgagcaagacgttctcgctggcgggtctcatcggctcgtatcacatcatccccgacccatggctgcgcgaccgcgtgacgcggcagggcgacctcagccattacaattcctgcaatgtgctctcgctgcacgccctgctcggagcctattcggacgagggcgcacagtggctcgacgagctgcgccccgtgctggcagacaacatccgctatgcctgcgatttcatcgccgctcacttccccggcgtgcaggtcatgcagccgcaggggacctatatgctgtttctggactgcgccgcatggctgcaggagcaccatatgacgctgcgggaactggaggagcgcggagcgcgtgccggtgtcatctggcaggacggcgcggcgtttgcgtggccggactccatccggatgaatctggccctgccgcacagcaggctcgtcgaagccatggagcaccttcgtgtccatgccttctgctgaagtgctggcgggcttcctccgcgcgcacggtctgcagctcaatgcgcagcagcaggcagccgtcggagcggtcgagggggccgtcctgctgctggccgtccccggcagcggcaagacgaccgtactcgtgacgcggctgggctatctcgtgcagtgctgcaacgtccgcccggaggagatcctcaccatgacctataccgtcgcggccacccgcgacatgcgaagccgcttctcttccctgttcggtgaggagcttggcagccagatggagtttcgcaccatcaacggcgtctctgcgcgcatcatccgcgcctatgagcagcggatgggacggaccgccttttccctgctctcgagcgaggcagagcagaccgccctgctgcgcgtgctgtatttccggtgcaagggcgaatacccgacggacgccgagctcaagcaggcccgcacgctcatcgcctatgcaaaaaatcagatgctgggcaaggaggagctggacctgctgtggaaggagctggactgcttccccgcgctctaccgcgcctatcagcaggcactgcgcaataccaggcagatggactatgacgaccagatggtctatgccctgcgcatcctgcggcaggtcccggagatcctgcacgaatttcaggcacgctatcactatttctgcgtcgacgaggcgcaggatacctcgcgcatccagcatgcgatcgtctcgctgctggccggtgcatgcggcaatctgtttctcgtcggtgacgaggatcagagcatctatggcttccgcgccgcctgtccggatatgctgctgcactttgaggcggaccaccccggcgcaaaggtcctgttcctcgaacaaaactaccgctccacgccgcagatcgtcgaggcggccgaccgcttcatccgccagaacgtctcccgccgggacaagcacatgcagcccgtccgctccggcggcgcggccatccgccagatcccgctgaaccgccgcgagcggcagtacacctacctgctcgaggtcgcgcgcgatctgccggagaataccgccgtgctgtaccgcgaccacgactccgccctgccgctcatcgatctgctggagcgaaacggcgttccctaccgggcgaagcagacggacggcacgtttttctccagccggatcgtgcgggacatcacggatatcatccgctttgcgcagtccccgtgggacggcgcgctgttccgccgcatttattacaaattctgtgccgggattccgaaggccatcgccgagcgtgccgccgcccataatcccaccgcagagccgctcctgctggccgtagcggatgatgaggtctctccctacacgcggcggcagtgccgcgtgctgcagacgcatctgcagaacctgctgcaggaaaaggccagccgcgccgtctatcgcatcgtcgccttcatgggctacggcgactacctggaccaatgtggggccgacaagagccgcgcggaaattctggaagcactgggtgcgcaggagccggatcctctgcgcctgctggagcgtctggacgagctgcaggccctgctgcggcagccgaagtccgaggtgcgcggcctgatcctctccacagtgcactcgagcaagggcctggagtatgaccgggtctttctgctcgacgtcatcgacggcgtgtttccaaaggagggcgaggacgtcgaccgtgacgaagagcggcggctgttctatgtcgccatgacccgcgcccgcaacgagcttgccgtcttcaccttcccgccggaaaaaacgtcctcggccttttcgcagttcctgttccgaccaaagcgccgcatcccgcgcaagtcaaagaaaaagactgcggcagacagctttctccccggcacgccggtgcagcacagcgcctatggcgcggggcgcattctggcgcgggagggcgaccgtgtccgcatccgcttttccagcggcagcgagcgggtgttttcgctggccgccgccgttccgaacgggcttctcagcctgcggcaggaatccggcggaaataccgcaaaagccgattgacacggtaggcaattcgttgtatcataatttgaacggccctgcgccgtcaatccacagtgcggaggacatctcaccatgctcaattctttctcccgaaccgaactgctgcttggccacccggccatggaggccctgaggcacgcacgcgtggcggtcttcggcattggcggcgtcggcggctatgcctgcgaggcccttgtccgcagcggcgtcggcgcctttgacctcattgacgacgacaaggtctgcctgacgaacatcaaccgccagatcatcgccacgcggaagaccgtcggccagtataaggccgacgtcatgcgcgaccgtatgctcgacatcaatccgcaggccgatatccgcgtacaccgctgcttcttcctgccggaaaacgccgcagagttcccgttttcggaatatgattatattctcgacgccgtcgacaccgtcagtgccaagctctcgcttgccgtgcaggcgcaggcagccggtgtaccgatcatcagcgccatgggggcgggcaacaagctcgacggcagccgcttccgcatctccgatatctccgagacgcgtgtatgcccgctggcacgtgtgatgcgccgcgagctcaaaaagcgcggcgtgcgccgcctgaaggtcgtctggtctgacgagcagccgacccgtccgctcgaagacatggccaacagctgccgctaccactgcatctgcccgccgggcgccgcacataagtgcacggatcgccgcgatatccccggcagcacggcctttgtgccgccgatcgtcggccttctgatggcaggcgaggtcatcaaggacctgacggcttccgtcagacaggagggcacatggaactgacgctcgaagaattggaggcgctggagcctggcagctataccctgctcgacctccgctcggagcaggagaccgcctacggcaccattcccggctccgttccggccaacgccgccgccctgccggaggggcttccggcagagcccggccgcatcgtgctgttctgcacacgcggcaagctcagccttgaaacggctgaacgcctgcgcgacgaaggcttcgatgcctgcagcctcaagggcggctatcttgcctggctcatgcggcagatgcagcggcaggaggcagaggagctgtgcagccgcgtggaaaacagtctgcgcaagcgcttccgcctgaagctgtggtgcaactttaccaaggccatccggcagtatgagcttgtcaagccgaacgaccgtatcgccgtgtgcatgtccggcggcaaggactccatgctcatggcaaagctttttcaggagctgcagcgttatacgaagtttcccttctcggtggaatatctcgtcatggaccccggctacagcccggagaatcgccgcgtcattgaagaaaatgcacgaaaactgaatattcccattcatattttcgagtcgaacatctttgactatgtctataacgtggacaagtccccctgctatctctgcgcgcgcatgcgccgtgggcacctttatgactatgcccgccagctcggctgcaacaaaattgcactggggcatcactatgacgacgtcattgaaaccattcttatgggcatgctctacggcgcgcaggtacagaccatgatgccgaagctccacagcacgaattttcccggtatggagctgatccggccgctgtatctgatccgcgaggacgatatcaaggcctggcgggacgcaaacgagctgcacttcatccagtgcgcctgccactttaccgacacctgcacaacctgctccaatcaagagacgcgctcgaagcggcaggagatcaaggatctgatccgcacgctgaagcagcgcaatccggatgtggaggcgcacatcttccgctccgtggagaatgtgaacctcgacaccgtcattggctggaaggccagcggaaaaaaatacagcttcctcgaccgctatgatgaagaagcctagaataaatccctctgctagacgcgcagagggattcattctatgttacattggaatcagcagcagcgttccggccgggacctcgtctgcctgcaggtcatttgccgccgtgaccgtctccggcgcagtgcggcaggcctttgcgatatcccagacctgctccggctgctccgtgcgccgcaggatgacgcccggacgccgcgcatcgtccgtctccggctccgtcgtgccgccgcacacggccttgagcgcatgccgcgccgtgctggcaagcgtcacctgcaccgggcagcgcagtgtcacgccgtccgcccctgccgcacagaacagctcgcccggcgtgatctccgtgacgcggcaatccgcctgcggcgcaagcgccgtttccagcagcacgttcgtccgcagcgtctggccctgcagcttccctgccgggtcggtgaaaaggacgttcgcagcaagcggcagttcgatttttgccatgccgttctcctgccgccgcaccggctcccctgccagtacccagccgtccgcgatggcggaggcgggctcccgcccggccgcctgcgccgtctcgcggaacgtctggacatcgaggatgccctccatctcccacgtctcccactgcggcttcagctcggcatcgaggcagtaggcatcctcgatcagctctaccggctgctcgccgcagaccgtgcactgcgccagaatgcccgcgctcagcagcaggcggcggcagtcgagctggccgtctggctccgtctcggccgaggtcagggcgaggaataccgtcaggtctccctcatccaggtcctgctccagctccgcaaactgcgagaacggaagctccgtctcctgccgctgcaggctgccgtccggggcctcatagaggatatggaccgtcagccgccccttgaacaccgccttgttcccgatcgtcttccgctcagccgtatccagcgcatagacgcatttgagcagccgctcgaccggcggcttcgacgccgggatctcgatctcctcattgagcgaaaagctcttttcgccgaggccgcgcggcagacgaagcggcaggcgcttgcgccggagctgcagcgtcggcgccggctccggaaagtcgtgcagcgtccgcgtgaacgcggcatagaccgtcagcgtgcaggagacgccgaccctcacgagcagcttgcgcgagtgcacgagccgtgcatccacgctgcacaggcggcagacgcattgcaggcggcagtcgctctgctccccctcccagccgcgccgggcgctgaacgggatcacggtcaccagccgctcgagccgtccgtcctctgtgacgaacaaaatacccgcctgcacctccccgctgaccgacgcacttcccgcggtacactcctccgcgcggacgagcagcgtgccgaacgcatcgacgacgcggtccgcatccgcgcagctgtccggtacgatgacctcggctgtcagctcctgcgtgaccgtctgatcgagcacgcggccgagatagtccagctgcttttcctgaaagacaagctccatcgtcttccctccttcttgttctgggaaaatcatatgcaggccgcgcgcgcaatatttgccgattaccgctgccgcgcaaggcaaagccctgcgaccagaagcgcgatgccgagcacgaccagcacaaattccgagctgaacagcagcgagagcagcagccccgcgccgagcgccatcatcaccgagcccagaagctccatttttctgcacataaaaaaccgccccctgccagcctatgcgcagagggcggttttatgcaggaagatcgggcagcagcgtgttccgcaccgcaagaaatcgatctatccctcctgtttgcttgattggcatgtcaacgcttcggagcagaaaaggaaacatgcagatgctcctccgggccaaagcgatcccacaaggagtgcagcagcgtcaattttccaagaggccactgctcccaccggcagtcctctcgctcttctgcttcggcaggcggtccgtacgctcttctcaaagcagctgaccgctccgcataagaagcggcagcgtcatagcccttccgctgctccggcggaatgacccgaaaaaactccagaaattggatgcggccagccttaaaatggacaccaatattcagcagaatatcacaatgaaacgcttttcccggaaacacaagatatccgggtgctgccatatgataatgcacttcagcagcaagcagctgccgcagaagaggcttcatacgggaagaaatacacagcttcggttcgtccagcatcaatacattgctctgacagcgaaacaagcgtttcatatagcagcctctctttccgcgcagcaagcccaaccggatgcacgaagcagccattgttaccgtgcagctgctccggaacagatcagccagcacaggccctcgcggatacggagcctgaccgtcggttcgatccactcattgctgatggtcagcgagtcgccccggcgcgcttctgcgtcgcagagcgggtatttcgcgccctcgatcgtcacgccgcgcagaacggcgtcgatgggaagcagagaaaaataaaaatattccgtgcgcggcaggacatactcccccggtccgatgcacgtcacgcgattatcggggtcgagcaggatcgcctccacgccatcggcccgcgccgtttccagcagctgcagattggcaagggcatggtccagccgcccgccggtgcaggccgtgaggtacaggcgcgtacagccatgcgcccgcgccatcgtataggccgcctgcaggtcggactcgtccttctccgggcgcagcaggatattttccgctccggccacagccgtgccgccggagtctccgtccccgacatagcagtccggggcaaaaccggccgccgcggcgcagtgcacgccgccgtccgcgcagatcacaagcggtttctccgcgcgcagcgcatcgagatgcccccagctgcggcagggcatcgcgccaaaaatcagggctgtttgtgttcccaaagccggatctcctttgctgcttcatagagccttgcatagcttgcatgacgggtcggctccagctcgcctgccgcaagcgcctcgagcacggcacagcccggctcggacagatgcgcgcagtcgtgatagcggcagcggccgagatacggggcaaaatccgggaaggaatactggaggttttccttcaggatcagctccatctgctccgtgtcaaatgaggagaagcccggcgtatcgatgacgcaggtgccgtccgccagcgggaacagctccacatggcgcgtcgtatggcggccgcggccgagcttttccgagacctcgcccgtctccacggagaagccgaggcagttcaggatgctgctcttgccgacgccggaattgcccgtgaaggcgacggtcttgccgcgcacggcctcgtgcagggcggcaacgccctcgccgctggccgcgctcgtcggaaagaccgggaacccggcatggcggtagatgcgcgtgagcgactccccgctctcgaggtccgtcttgttgacgcacagcacgaccggcacattctggtttcccgcaatggccgcgacgcggtcgatgagaaacgggtccgtcacgggattcgcgccggacgccagcacgacgagggcgtcgaggttactgacggccgggcggatgaagctgttgcggcgcggctcgatctcctcgaccatgccctgtgcgccggagccggaaaagcggacccagtcaccgacgagcggcgacatccgctccttgcggaagcggccgcgggcgcggcactgcgtgagtgtgccgttcccgctgtctacatagtaaaatccgctgagcgccttgacgatgcgtccacgctccatgctcagtctcccgattcagaggattccgtcgtcggctccggctccgtcggcgcggtggtcggcgcttccgtcggggcctccgtcggctcggggccgtccgagacctcgagcgtcacgatcgtgtccttggcgaccttggaatttgccgcctcgctctgacgcacgacgcggtccttctcgtccgtgtcactgtagacgcgcttaatctcatatttcaggccgttttccgtcagcagatcgatggcgtcgcggacgctcaggccggtgacgggcggaacggtgaccttgccgctgcccttgctcacatagaccgtgacctgctggccgcggctgagctggctgtccgaggcggggacggtgcgcgtgacattgccggaagcgatatcgtcgctctcctcctcgagataggtgatgcgcagattcaggttcatggcatcgaggatgctcttggcattttccttggactgattcttgagctccggcatttttcccgagccgaggctgacatacaccgtcacgctctggccctcctgcagctcggtctcggctgcgggatccgtgcgcgtcacgctgcccgcgggcacggtatcgctcgattcttcctcgcggcggacattcagtccgagattcatggccttgagctgggacatggcgtttgcctccgactgaccggccagatccggcatgaggttgttctccttgccgaggctgaccttcagcgagatcgtgcgcacgcggccgcccttgaccatttcgcctgccttgggggtctgctcatagacatagcccttttcgtattcgtcgttatagtcgtaggtcacgccgttcaggtcgatcttcagctcgggatagtcgtcggggttgatgtcctcgagcttcatgccgacgagcttcggcacctcgacctcaggcgtatcgggcttgtcgttcgtgccggagccgcggagcagcacaacgccgagcacaacgagcagcacaacggctgccgctgcggcgcagacgacgccgatgacggtgcggcgctttttctcctgctcgcggcgggcacgctcggctgcgcggcgctcatccggctgacgcgcagcacggttcgcggcgcgggcagcggcatagcgctccgcctcggagcgggtcatgccgccgtgctgcggctgctggggctgctgcggggcctgcggcgcctgccgcagcgtctgaccaccgggcccgtacacgaacgtcaggctcggattcttgcggaattcctccatatcgcgcagcatctccgtcgcggaggaatagcgctcgtcggcattggaggccatggcgtgcatcgtgatctgctcgaggccgcgcgggataccggtgacgagcgtgctgggcagcggcgcgccgccgttgatgtgctggatggcgacggagacgggcgtctcgccgtcatagggcgtgcggcccgtgagcatctcatacatgacgacgccgagggaatagagatcggaccggtcgtccacccacgcgcccttggcctgctccggcgagatatagtgcacggagccgagcgcctcgcgcgtcagcgtgctctgtgccgaggcgatgcgcgcgatgccgaagtcggcgaccttgatgctgccgtccttcaggatcatgatattgtgcggcttgatatcgcgatggacaatgccgcggctgtgggcgtgctcgagcgccttggcgatctgcatggcgaaatgcagcgtctcgcgccagttgaggcagcccttcttctccagatactgcttgagcgtgatgccctcgatcagctccatgacgatatagtccacgtcgccggagcgggacacgtcgtaaacgctgacgatattcgggtgcgacagcatggcgacggcctgcgactccgcatggaagcggcggcggaactcctgattgcgcgagaactcatccttgaggatcttcacggcgaccaagcggttcagacggtgatccagtgctttatatacaactgccatcccgcctgtcccgatgacctcgaggatctcatagcggttatccagcagccttcctaagtaattttccatggcaactccttccgcgtgcgcggcccgttctcagcggcgaacggaagccggattcaatctcagataccgcagagcggccttttttgttacagtgcaatgagcacagaggtcacgttatcgggcgcgccccggctttttgcgatatccagcaggcgctggcagcagtctgccttctgtgcgccgtgcacgacttcaaataagatctcctgatcggccatctggttcgaaaggccgtccgagcacagcagcaggcagtcgcccggctccgccgtgagggagaacacatcggcggcgacctgcttttccgtgccgaccgcgcgggtgatgagattcttgctcgggtggttcttggcctgttcgtgcgtcagctcaccacgctgcaccatcagctccacaagggagtgatccacggtgacgcagcggatgccgtccgccccgagatgataggcccggctgtcgccgatgttcacgatctccacgcgcaggccgcggacgagggcagccacgagcgtcgtgcccatgccgcggaactcctcactgagctgcgcatgctcatagacagaaatattggccagctttgccgccgtgcacagcacgtcctgctcctccgcctcggtcatcccgtcgcgcagagagcggcagacctcgccgcagaagacctcgcaggcaaggcggctggccacattcccggcacgcgcgccgcccatgccgtcgcacacgacggcgagcagcgtctccgggccaaggcgctccatgcggtaaaagtcctgattttcctcacgcacgtttcccgtgtccgtcagtccccatgcttccatccattccgctcccttcttttggtttttccgcctcgtaatttctgcggagctggccgcaggaggcgttgatgtcgctgccgagcgtccgccgcactgtggcggggatgccgctggcctccagcgttttctggaagcgcagcaccgtctccggcaggctcggcttcagcgggctttccgccacgtcattcagcgggatgaggttcacatgcgccgcgatcccgcgcaggcggcggatgagctgctttgccatctctggcgtgtcgttgacatcgcggatcatggcatattcaaaggagattcttctcccggtcttttcaaagtaacggcggcaggcatccagaagcccctgcaccggccagcgccggttcacaggcatgatgctgctgcggacctcgtccaccggcgcgtgcagcgacacggagagcgtcagctgcaggtcctccccggccagccggtcgatctgatcgaccagcccgcaggtggaaaggctgatgtgccgcatgccgatgttcagcccctcgggcgaattgacgagctcgaggaagcggcgcacattgtcataattatccagcggctcgccgatgcccatgagcacgatgtgcgagatgggcaggccggaatccagctgcgaaaacagcacctgatccagcatttccgacggctcgaggcggcggaccagtccgccgcgcgtcgaggcacagaaggcgcagcccatgcggcagccgacctcggaggaaatgcagatcgtattgccgtaatggtagcgcatgagcacgctttccacgcagtttccgtccattaggcgccagaggtatttgatggttccgtccttctgcgactgcagccgccgcgcgaccgtcggcgagacgagcgtatattccgccgcgagccgctcgcgcaggctgcgggagatatccgtcatctccgaaaaatcgcgcacaccgcggtgcatccagcggtagatctgcttggcgcggaaggcaggctcaccaagcactttcagctcggcccccagctccgccagcgtcatggatttgatgtctttcaaggtttcctcctgaatttgcagataaagaagccgtcggtctcacgctgccccggaagcagcgtgaccatcgctcccggcgcgatgccggagccctctggccacggcgcgttttccgggacgaagtccggatgcgtgcgcaggaagtcctccgccacagcctcgttttcccggcgcaggatcgtgcaggtgctgtagagcagcacgccgccggggcggacatattccgcctgctgcgcaagaatggcgcgctgcagggcgggcagctccgccgagggctcgtgatagcggatatccggctttttccggatgacgccgagtccggagcacggcacatcggccagcacgacgtccatcgcgctgcgccatgcgggcacgggctgcgaggcatcctgcagatgcgtctccagaatagaaatgcccagccgctctgcgccgcgctcgataaggtcgagacggtgcgggtggatatcgcaggaatacagcgtgccgcggtcctgcatctgcagggcagcggcaaagctcttgccgcccggcgccgcacagcagtcaagcgcgcgcatacccggctcgatgccggaaacggccacggccagatgagccgccgcgtcctgcacatacacgcgcccctcatggaaggcagccgtctgctccacagggccggagaccgtcaggcagcccggcagccacggatgcggctgcgcaccgggcagctcctccggcagcgcagcggcatcgccgcgcagcggattgacctgcagcacggtctgcggcgcttcgttgtcggtttgcagaatgcgctccgtctcctcccggccgaactgcgccagaaacaggcgcacgatgggctccgggtggctgtagcgcaggctcaggtcgtccggcagcgccagcggcatggcccgcagcaaattgcgcagcacgccgttgaccagacgggccgcctgctggttggccagacggcgcgtctgctccacggcctcgttcaccgcagccgagggcgggattcgatccagaaagcagagctgataggcggccagccgcaggatatcgcgcacgacgggctgcagcttgccgcgcacgaagccgctcagccagtagtcgagcagcatgcggttctgcagcacgccgttgcacagccgggtagccagcgccgcctcgcggcggtccatcccgcgcagcgcgtccttcagggcgctctccggccatgcaccgtcgcggcggaaggcgatgagcgcccgcagcgccgcgtctcttgcgcccgccatctcagagttcgatggggtggccgcggaaataatccggcgcagccatgcgcttcccgccgggagcctgcagctgcgtcagcagcacaagctcgccgttcccgcaggcgacggtcaggccctgcttcgtgagggcgaccggcgtgccgggggccttgtccgtatgaccgggcgcgggctgcgccccgtaaatcttgaaatgcgtgccgttcaggtccgccgtggcgacgggccacggatcaaggccgcgcacctgatcgacgatgtgccggacagacttcgtccagtcgatgggcgaaagttccttcgagagcatcggggccagcgttgctttggacggatcctgcggcgtgcgggtcgccgtacccgcctcgatggcatgcagcgtatcggacagcagcggcgcaccgatggcggccagccgcgccagcagggccgtggaattctccagcggctcgatgggcgttttgcggatttcgataatgtcgccctcgtccattccggccgagaggtacatcgccgtcacgccggtctcgtccagaccgttcagaatggcccactgcgccggggcggagccgcgcagcgcaggcaggatgctcgtgtggatgttgatgcagccgagcttcgggatgtccagcacgcgctgcggcagaattttgccataggccacgacggcaatgacgtccgggcgcagggcgcgaagctcctccacggcggcatcatcgcggaacgtcgcgggctgatagaccggcagccccgcagccagcgcgacctccttgacctcggacatggcgagcttcataccgcggttcttcggcatatccggcttcgtgtagacgccgacgaggtcaaagccgtccgcgatcaggcgggacaggcagtccgccgcgatctgcggcgtgcccatgaagacgactctcatgcttcctcctccagctcggccatttcctcatccgtgagcatgtgataggctctttccgtatagatatgcccgtcgaggtggtcgcattcatgggcgaagcagcgcgccgtcaggccctcgccctccgcctcgaaccagttgccgtcgcggtcctgcgcgcgcagacgcacaaattccggacgcttgaccataccgtagcggccggggacgctcaggcagccctccatgccgtcctgctcgccggaggtctccaaaatctccggattgacgagctcgatcagctcgccgtcgtcatcgactacgacgacgcggcgcaggatgccgatctgcggcgcggcaaggccgacgcctcccgcattggtcagcgtctgcctcatatcgtcaagcagctcgccgaggtgggcgtcaaagcgcgtcacgggccgtgccgtcttgtgcagcacaggctcctctacggtcaaaatattcctcagtgccatcgtgattcccctttattctctgccgttgacatccacaaacgcgccgacgccccggaagctgcgatcctttgcgaattcgcgcacaaggaacgccagaagctcccgcagccgtcgcgtattgacgcagctgagcgtcaggcggcagcgataatgataattgatccgcgcaacggaggccggggccgggccaagcacggcagcggtctccccgcggtagaattcggaatgcagcaggccgtccagccgcgcacggaatgccagcgccgcctgccagacgcgctcctcctcccggccgtggaacgtcacggtgagcaggtcgcgatagggcgggcagccgcgcagctggcgcagcggcagctctgcctcgaaaaaggcgtcatagttctgctccgcagcaaagcggatggtctggttctgcggcgtcatggtctgcaggatcgccctgccgcccaattttccgcgtccggcccggcccgcgacctgcgcgatcaggctgaacgtcgtctccgcggcgcgatagtcggacgcatagagcgagaggtcggcgtccagcacggccgagagcgtgacgttttcaaaatccagtccctttgccaccatctgcgtgccgagcaggatggggatgcgctcctcgcggaagcgccggaacagcttttcatgggtattgactgccgagacggtgtctgcatccatgcgcagcacgccgacgccgggcagcaaattctgcagctgctcctcgacccgctgcgtgccgcagccgatctggcgcagatgcccgccgcagacgggacagcgcgcaggcaccggctcgctgtggccgcagatgtggcacatgagccgcccgttcgcatggtgatacgtcagcggcaggctgcagcccggacacatcgggacgctgccgcattcgacacaggccagcatccggctcgtgccgcggcggttgagatacaggatggactgctgcccgaggcggagattttcgcgcagggccagcagcagcggctcgctgatgatcgaggcattgccctcgcgcagctcgcgcttcatgtcgacgatctcgacgggcggcagcggtctgccgttatagcgctccgttatgcggcacaggccaaaagcgcccgtaacggcacggtacatgctctcgaccgtcggcgtggcggagccgagcaccgtcagcgcatgctcctgcgcgccgcggtagatcgcgacctcgcgggcatggtagcgcggtgcattttcggattggtaggtgtgctcctgctcctcgtccacaatgagcagaccgaggtcccgcaccggcgcgaacacggctgagcgggtaccgagcaccacgtcggcatcgccggagcggatgcgcttccacgtctcatagcgctcgctgatgcgcagggcgctgtggagcacggcgacgcgcgcgccgtagcgtgcggaaaactgccgcaggagctgcggcgtcagggcgatctccggcacaaggacgatcgcaccgcgcccggcggcaaggcaatcatcgatcaggcggagatacgcgaccgttttgccgctgcccgtcacgccgtagagaagcgccgtgccgggagaggcatcctgcaggcgggcagacaaactgtcataggctgcctgctgctgcggcgtgagcaggagcggcttcggatcggccgctgcggccgggggaggcggaggcaggacctcctgctcccggagcgtcagcagctccagcttttccagcctgcggagcgtggcagacgtcgcgcctgcgtaatagcccaactccttacaggcgcactcaccgagcgtggcgagcagctccatggccgccgcctgcacgggagcggacgcctgatgcgactgggcaaaacgccgcgcctcctcggccgggacggccagaacggcaatgcgctccgttttatcgttcacgcggcggcgatgggacgtctcgcaggtgacgagctttttctgccgcagatactgcagcgcccgctgcagggcctccgcctcaaactgggcgcgcagcgcggattcctccgcggcaccgccgagcgtctgcagcgtttggaatacggcctgcgccgccggattgcgccagcggtcgtcccatgcggcgttctccgcaagggtatagcggtcacgcggctgaaaccagacgcctgccggtaaaatggcccgcacggcgtcatagaatgtgcagaaatagcgctcgcgcacaaaggccgccagatgcagcgcagcacgcgagagcagcggctccgggtcgagcgccgcctcgacgggcttgagcgccgggccgtccggccgctccgcgccatctggcatcacggcgagaacgatgccctccgtgcggcggttcgatgcgccgaacggtacgcgcacacgctggcccggctgcagcgtcagggagtccggaatgcggtaatcgaacggcttgtccatggagaacacggccgaagcgaccgcaatgcgggcgatcatgctgccgtcgccgggacagtccggcggaaaaaggcaaaagacgccggcagggtcacctctgcccgcgccttgttccggctcattccttcacgactgccgcgagcttgccgtccgcgacctcgtggatggcgatggtcacgggcttatcctccagcgggatgtgctccgtctctgcctcgatggagatctggcgcgcgcggcgcgcgatcacgttgacgagaagatagcggctgtcgatgtgcttgagcagatcggccatagcgggatacagcataattagtcttcctccttgagattgagtgggcgataggatgtgcggcaggcctccgcggtcaggactgcttccagctcctgcacggcgtgcccgacggaatcgttgatgatggtatattgatagtgctttgcctgacggcattcctccagcgcgatatgcaggcgtctggcggcaatgtcaggaggcgtgtcgccgcgcccggccagccggcgcttcagctcggcataggacggcggagcgatgaaaacggaaatggcgtccggccggcgctgcatgacctgcagcgcgccctgcacgtcgatctcgagaacgacgctttcgccgcgcgccagcgcttcctctacggggcgcaggggcgttccgtaatagttgcccgcatagcaggcgtgctccagaagctcccctgccgcgatcatctcttcaaagcgctcgcgcgagacgaaataatagctcacgccctcgcggtcctcgggccgcatggggcgggaagtagccgaaacggaatagtgcagcgactcgtgctgctgcatgaccgtccgaaggatggtgcccttgccgaccccggacgggccggaaacgatgatgattctgccctggctcatgcctattcctcctcctcgcgctccggctctgccgacggatcggccagacggcgggcaatggtctccggcgggatcgccgaaaggatcacatggtctgtgtccatcaggagcacggcgcgggtctttctgccatagctggcgtcaatgagcatggcgcggtcgcgcgcctcctggatcattcgcttgatcggggcggaatccgggccgacaatggtcagcagccgctccgaagagaccaggttcccaaatccgatgttgatcagccgcatcgcgctcactcgatgttctggatctgctcgcggatcttttccagctccgccttgatctccacgacggtgcgggcctgctcaagatcgttgcccttcgagccgatggtgttggcctcgcggttcatctcctgcagcaggaagtcgagcttgcggccgatggccccgccgcctgcaagcaggctgtcgagctgggccagatggctgcgcagacggacggtctcctcatcgacggcgatgcggtcggcaaagatggcggcctccgtcaggatgcggctctcgtcgatcgtcgtgctggcgagcacctcgcgcagcttgttctcgagccgggtgcggtattccgccagcgtgacggggctgcgctcctcgacgcggccgacaaggccgcggatggtctccgcacgggagctgaggtcggcagccatggccgcgccctccgtctcgcgcatggtctgatagacggcgatggcctccgccgcaacggcggtcaggtcggcaagattctgcttttcgtcctcctccggcttctccaccacgaagatgtcgggcagcgcggagagcgcggaagcgctgatatcgtcctgcacgccgtaatctgcgaccatggtacgcatggcgcgcagatacccctcgagcacggggcggttcaacgaaacggtagcctcctccgcgcccgccgcgttcacgctgacgaacacgtccaccttgccgcgctggacggcgtcctttacaagctgtttgatcgcatcctccgcgtaggagaacgcgcggggcaggcgcacggagcaatcgaggaagcgattgttgacggagcgtagctccaccgtgatctcccgcccatgcagggtcttgcaggcacggccatagccagtcatactgcggatcaaatgattcgtcccctttcgatcagatcagcggcagccgccgcaaaggcagttcaggcacatgagtgagctgcaaaggccgcagagctcgtccgagccgtcgctgtactgcgtctgccggtaggtatatgcgccgctgccaacgctgctgagtgcatttcggtattccagattctgaggctccatattgactgcgatgcggaagttctgcgcagcctcgtccatccagccgcggcgctgcgcaatgacaccgcgcagataataccactcggccgtgcgcgcggagaccgcattgagcccggcctccgcgccgtcgaggtcaccgagctggatgcgtcggcggatctcatagagcggcgacgacgtgcttcccgcactgctgcgctggccaccggtgctcccggcgtcggcctgctgccgcccgcccttcatgagcgtggcataggcctcgttgatctccttcattttttcctgtgccagatccgcaagcggattgttggcgtaattatcgggatggtatttccgcgcaagctcccggtaggcctttttgatttcatcctccgaggcgccgtgcggcacaccgagcacttcataggggtccttcatgttttcctcctgtttcccgccttgcggaacgttccctccgcgactgcatggagcacggcggggagtccgaaatataagatgttggaaagcagctcccggtcgcgccgcccatccagcagctccatggccgagcaggccatgctgatggaggcgtcgatcgtttcgagcagctgtgcccggtccgccggatcgagcgtcccgccgtccgcgccgtagcggtagcgaagcgggttatacgcacctgcccgcacatcgcgcggcaggtcctcgagcgcatcggccagatacagataccggccgacgtggtacaatagcagctgctccggccgacgctcccggccgtcatagtgggcggcgcagtcccgcagcagcgaggcaaaggcgtccgccgtgcggtcgatgctggggcttttttcgtcctcgagcgcctgcagccgggcaagctccgtgccgaatgcggcatcgagcgccggatgccgggctgaggcgcggcgatagctccggcgatagagcagcagggccgctttggcagccagacggcgcgggccgcggctgtcgcgccgggcgtcgagcagcttccaccacgaaagcagcacgctcaggtcggctgcatagcgcatggcgccgtcctccggcaggcaggccttgcggcaccacggccgggccgggcagaagcagcgccccgggcatgccggatctccctcccgcaggaggaagtagagaaatgtcatatcatagttgaccagaaaccgcgccgcaaagccgtattcgagcttcagcgcgcggcacaggccgcagtaggccgcatggtagcgcacctgcgcctcttcggagaggcggtcgcgccgcggcagcacatagccgaacatgctagtccaccctgcccgtgatgcggtactccatcggtctgcggcgcagatggcggttccagagcagggccgggatcagaccgacggcaaaggccgccgcaccgagcacagccatccaaacaccgccgagggactgcgccgcaaggcagaccgcaagcagcagcccgagcggcagcagatacaccagcgccgccgcgccgaggaccgcgccgctgcgggattcgacccacacgcgctcgcccggctcaaccggaaacggcgcgcgcgccgtcacctgtacgctctggccgacggctccacagccgccgcagtggccgcagtcgcccgtgcaggcgctcacacgctgcaccagcaggctgacgctcccgtccgggagcagggatccgaccgttgcacgctgccgcatcgtcaggactccgtattgccgccgtccgtctcgctcagcgagacctgcacggtgtatggcccgccgatgacaccggcggagacattcgcaggcagcgcgacctccagctcgacctgcttggccgctgcatcatagtggcggctgaagtcggccgtaacggtcaggtcctccatgcggagcgagctcatgacgctcgcgcggccgcggacggtgatcttgacattctggtcggcaaacgtcatgccggccggcgcctccttgcggaggatgttcgccgtgggaacggtgaattccttcgtcacgaggcccttgagcgtgaccgtgatcttcacggtctggctgtcggcgcggctcgtaacgccgctcggcagctccggcgtgacctcgaacgtctcggtcccggtgatctgggccagatcgatcgtgcggatggtcagctcgtccgccatggcatccagaacggccgtattgcccgtgacgcgcagggtggacggctcgatcgttacctccgcatcctcggacgtcgcgccgccgccggaaataagcgttgcattgagcttaatatccttatactgcagaatagggatcgttacacgaacggaatccgcggagcttgtcacatattggctcagcgacagctcgttgccgtccttgtccagcaggacgacgggacaatccgtgtcgatgagtgcatcggcatccgtcacatcgacgcgcacgacggcgcgagcgatcttgttgacctcctccgcagggccgcggacggagatggactgtgtgccgagggtcaggttggatttatcgatcatatagcctgtcatcggctcgccggtatattcgagctcgatgggaacctcaggattctccttgatgtcgctgaccgtgacggagatgcgtgacggtgcgcggctcgtttcgctgatatcgcccgttgccacggtgctgggccagacgacgctccagctgagctgatagctgccgctggcggcaatacgcgtgacgtccgcaatagcggtgaccgtctcgttgttcagctccttgagatcggatcggcggccggagaccttgatgctgaccttcgtggaatcgccgcccgtgagcatcaagccctgggacgtcagggcctccgtgccctcgaactgaacgctgatgccgctgatggtgatggtgtcgtcgggattcacgaccgtgacggcatagaaccagagcacgatggagacgacgagcgccagaagaaaggcaaggatcttacttttttgcatctttgttctccttttgcttccggcggaggagcttgagcgggttgcgtgtcttctcctcgcgctggggggccagctcgttgagcaggagcttttcgagcgtctgtggggcgagatggcgcttgagcatgccggagatcgccacagagatcgtgcctgtctcctcggagacgatgacgacgacggcatcggagacctcgctgatgccgatgcccgcgcgatggcgcgtgccgaggtcgctgctgatattgtggttctccgtcagcggcaagacgcagcccgccgccgcaatgcggtcattgcggatgatgaccgcgccgtcatggagcgacgccttggtgaaaaacaggttgcgcagcagctccgaggagacgcaggcatccacgacggtgccgctcttctggtattccagcagcgggatggagcgctcgaagacgataagcacgcccgtgcgctccttggccatgatctcgcaggcctgcacggtctgctcgatgacgcggtcgatctcgcgctgctcttccttgacggaaaggatctcgcggacatttttgctgccgagcttttcgagcatacgccgcagctccggctggaacacaacgatcagggccacaaggccgatctccaggatcttgtcgaggatatagttcagcagatacatgttgagcagctgcgtcacaccggcaaggatcaggatgatgagcacgctcttggcgatccgcgccgcactggtcgaccggaccatcatgatgaccttatagatgaggaaggctacgacgaggatatccacgatgtccatgaccttgatggtcgggagcatcgagctgaactccttaaagaaattgatcactgcatccatgagcaaaactccgcaaattccaagttactgcaattaccttacaggacccgatatgggccctatttttagattctattcattatatccgattttcgccgcaatagcaagtggaaaacgcgcgtttttccttcatcccggcaaaaatgccgttctgcacacctgcaggaactgccggacctccgcagacgtgttaaaagcagagaagctcacccggaccgttccggtctcgagcgttccgccgctgcggtgggccatcggcgcacagtgcagcccggcccgcacggcgatcccggcctccgccagacaggcggcggcctcctcgcagtcgaggtcccggcagcggaacgacagaacgccgctctgccccggccccgtgaacacctccacgcccggcagctgccgaaggccgcgcgccacaaggaccgtgagtgcgcgctcctccgccagcagctcttccggccgccgctcgcgcacaaagcgcaggccagccagcaggccgccgatgccgcagacgttgtgcgtgcccgcctcgtggcggtccggcaggaaatccggcatgctctgaccgagcgaattgctccccgtgccgccctgcagcagcggctcccccgcctcgccgcacagcagcaggcccgtcccctgcgggccatacagccccttgtgccccggcatggcaatgaaggccgcacccgtcccgcgcaggctgaccggcagcgttcccgcggactgcgaggcatcgatgacgagcgggacgccgcgttcccggcacagcgcggcaacggctgacacgggcagcacattgccgtagacatttgaaacatgcgtgcacaccgccgcatccgctccctgccgcagggcgcgcgcaaagccctcgagcagccgctccggcgcaaacggcggtgcgccggccgtttcaatctgcgccccgagcgccgcaagcggccgcgtgacggcattgtgctccatgccggacagcacgacgcgcccgcccggccggacaaggctgcgcagggcaatattcagaccgtgcgtcgcgttcatggtgaaaacgacctgctccggcgcggcgtcgaacagctccgccgccccggtgcggcaggcatagacgacccgcgccgccgcgtctgccgccgcatggccgccgcgcccgacgctggcgcaggcgcgcatcgtgcgctgcacggccgcatagacggactccggcttctgcagggtcgtcgcggcactgtcaaaatagatcatggctccgcctcctgccacgccccgtccgcgccgcggcgatacagccgccggaacgcgatgcgctcggccgtcagcagctgccggatggtctccggctcggcaggcgcacgcacgcagtagccgcagccctgctcctgcagcgcccgcggcgtgcggagcacctgcgcggggagccccgcctgctccagcgcccgcgccgcattctgcgccgccgtgatcgaacgaaatgtcacacagatctggctcattctgcttccctccctgccccagcatatgccggtccgggtgatccggcgcagaaccgcacgaatttttgccgcattttgccgcagaatacaaagcaccgggagcgctgtcgcgcccccggagcgtagcttgtcaaaaaagtgtttttgacaagctctcaaacgagacccgtttcactgggctctcgtttgaaaaggctgcggctcgctgcatcgcacgaagggcacgcctgcggcgcacccttcgcacgtttgcgagccgagcggtattttctccgacgtacacgccgccggagaaaatgatttccattttctttgcgcttgcgagcgcaaactctgcgaggctttttttcgacagtccaaaagctccgggagcgctgtcgcgcccccggagcaggtagcttttataaggatgtcaggccagcggctcggtgatggcattgcggatctgctcggattcctccatcatgcggtccacaaattctccggcgtagtcaaacaccatgtcctccagattcagcttgtccgtcagcttggcatccgccggtgcgtcgaccagataatccgcaacgctctttttcacctgctgatagcccagcacgatgacaacggcgaaaaccgccgtgagtgcaaggaccttgatccatgtcacccaccaatattttcccatggtcttcaccccctgatgctcattagacgggtcttctctgcatttgttccgcagcgggaacgattattttgccagatcctgcgcgatgaggagcttcatggcctcgacgccgacgcggacggcggcgctcgtgtcctcactcatgttctggtcgagaccggcagcctcgcgctcctgattccagataacatggaagcaggaaccgcagcggcagcccagcgcatctgccacgacgaacagcgcggcggactccatctcacttgccagaacaccgaggcgcttccaggcttcccatttctgcagcagctcataggagacgggcatcttcgccgggctgtgctggccgtagaatgcgtccttacactgcacgacgccgacatgcgtctgctttcccatggcgagcgaagcctgacgcagggcattggtcacatcaaggttggcaacggccggatactcgagcggcgcatattcctgagacgtgtgctcaaagcggatggctcccgtcgcaacgacgatatcgccggactggaccttcaggttgatgccgccgcaggtaccgacgcggatgaacgtgtccgcaccgatgttgtgcagctcctccatggcgatggaagcggacgggccgccgatgccggtggagcagacgctgaccttctcgccgaggagcgtgccggtgtagatattatactcacgattctgggcaacatgcacaggattgtcgaacagctttgcgatggactcgcagcggcccggatcgccgggcagcaggcaatagcggccaacatcgccttcgacacaatggatatggaactgcttatcaagcttctgcatggagaaaagctcccttcttttttgcagcactacacagcggtgctgcaatttagtagtttcgtgttgagttattatagcaggctttggtgaaaatggcaacctctttccgcggcgtgccgaacgcaattcaccgatcgcgaacgcatgctcagggaagctctgattcaatcagcaagagcggatggcgcgagattttttggcaagtcgaggtatggaaaacgcaggaatactttgtgtctttcaagtttttcataccgatggattgacgaaaaagatctggcatccgccgcagatgattgattcagagtttccttaaaaaagggtgatctggctcgtatccggcaggtcaccgaacgcgcccgcctgcttcaggttctcgatatgggtcttggacaccttgggacaggctgcagagaattcctcaatggagacgaagtgcttgccctcgcggccctccataatatcccaggcggcggactcgccgaggccggaaacagagacgaacggcgggaggagcctgccgtcccggatgaggaattttgtggcatgcgaggcgtaaaggtcaatattgtcgaacgtgaagccgcgcagatagaattcatagcagacttcgagcgtcgtcagcaaatcttcttccttgtcagaatggtccggatcggcgttgatgcgcttgatgtgctccttcacagtctcgatgccatgtgtcatcatcacggcgtcgaagccgtccttctgactgcggcggtagaaataggccgcataaaacgccagcgggtgatgtaccttgaaccacgcgatgcggaaggccatcatgacataggccgcagcgtgcgccttcgggaagaggtatttgatctttttgcaggattcgatgtaccattccggcacctgatgctcgcgcatctcctccacaatgccctccggccacgccttgcccttgtggatcgcgcccttacgaacggactccatgaatttgaaggcacgcttctccggcagaccgcacttgatgagatagagcatgatatcgtcgcggcagccgatggcctgattgacagaggccgtgccgctcaggatcaggtccttcgcgttgccgagccaaacatccgtgccgtgggagaagccggaaaggcggatgagcgtgtcgaactgcgtcggcttggtgtccatgagcatcccgcgggtgaagatcgtgccgaattccggaatgccgactgtgccgacctccgtcaggatcttgtcatgctcatagccgagcaccttgcttgaaacgaagatggacatcgtgtccttgtcgtcgagcgggatcttctgggcgtcgactcccgtcatatcctccatcatgcggatcatcgtcgggtcatcatgtccaagcatatcgagcttcagaaggttttcctccatggagtgatattcaaaatgcgtcgtgatgatatcggtgtggatgtcgtccgccgggtgctgcaccgggcagaaatcccagatctcattctcctgcgggatgacgacaaggccgcctggatgctgccccgtcgtgcggcgcacatcgacgcagccagctgcaaggcggttctcctccgcgcggctgacggtcaggtttcgctcggccagatattttttcacataaccgtaggccgttttctctgcgaccgcaccgatcgtgcccgcacggaacacatggctcgcgccgaacatttcgatacagtactgatgggcgcgtgactggtattcgcctgaaaagttcaggtcgatatccgggaccttgtcaccgccgaagccgaggaacgtctcaaacgggatgttgaagccgtccttatcgagcttcgcgccgcactgcgggcagacggcatccggcaagtcggccccgcagttgatgccatccggaacatcgaaggtgcagtatttgcattccgggcagcgataatgcggcggcagcgagttgacctcggtgatgccggacatgaaggccacgagcgacgagccaacggagccgcgggatccgacgaggtagccgtgctccagggaattctgtacgagcttctgcgcagacatgtaaatgacgtcgtaatggcagttgataatgtctcccagctcggtctcaacacgtttcgtaacgatctcgggcggattatcgccgtacaggcggtgcagcttgccgtagaccagcgatttcaggtcctcgacggagttcttgatcttcggcgcaaacaggttatgcggtacggggcggacggtttcgcacatgtcagcgatgtggttcgggttcttcacaacgacctcataggccttttccgggcccaggtaggagaattcctcgagcatctcgtccgtcgtacggaaatagagcggattttcgcggtcgcaatcctcaaagcccttcgtggccagcaggatccggcgatagatctcatcctccgggttcaggaagtggacgtctcccgtcgcgcagacgggctttcccagctcctcgcccagccggacaacggtgcggttgaactcgcgcagctcctcgtcgctctccgcgatacccttggccagcatgaagcggttgttgctcagaggctggatctcaaggaaatcgtagaacgaagcgatgcgtttgagctccgcgtgacttttatgggccacgatggcctggaacagctcgcctgcctcgcaggccgagccgataatgagaccctcacggaatcggataagctctgactttgggatgcgcggcgtgcgcttgaaatatttcaggttggaatccgagatcaggcgatacagattacgcaggcccatctgattcttggcaaacagcaggatgtggcgggcgtggcggttcgtgatgcggcttccggcacgcagggagagcatgtccgcattgatatcctgaatgtcgtgcaggccgcgctcctgcagcattttggcaaagcgcaggtagaggtagccgcatgtcagcgcatcgtccgaggcacggtgatggttgaaatccggcaggctgagcgcattggccacggtatcgagcttgtgattcgtcagctgcggcatcagattctgtgcaaagatgagcgtatcgagatacgtcggatcgaacggcagaccgagccgctcggccgccgccgtcaggaagccgacatcgaaatcggcattatgcgcacacagcacgcgcccaccgcagaaggccagaaattccggcagcacctgagaaatgggcggtgcatccgccaccatggcgtccgtgatgccggtaaggtcgacgatcttctgcgggatggagcggccggggttcacgaacgcctggaacgtatcgacgacctgcccgtcgcgcaggataacggcgccgatctccgtgatctcgtcgtgctgagccgaaaggcccgtggtctcaaggtcgaaggcgacgaactcgccgtccagcggcaggcttgccgtaccgtggacggcgatgcggtcgtccacgtcattgacataatagccctcgcagccatagaggatcttaatgttctgatccgtccccgccaccttgttcttcgaggcattcagggcagccgggaacgacgaggcaacgccgtggtccgtgatggcaatggcgcggtggccccagcgggcagccgtggcgacggcctcgcccgtctttgtcagggcgtccatcatggacattgtcgtgtgaaggtgcagctccacgcgcttctccggcgcggtatccacacggacgggcgcctccgcggcctgcacggccagcggctcgagcacgatgtcgttttcaaaccggctgaagctgatgaagccctgcacacgcagccacttgccgggcttctggatggcgtcgatgagtggctttgcctgatcggcttccataaagcggttcacgcggatggagccggtgtagtccgtcatgtcgaaattcacgacccacgcattgcgcttcttgagttccttgtggttcacggcgaacacgcggccctcgacaatgacgcggccgacgtcgctgtcctgcgacagctcgcgcatgggcgtgacgttcccgtggaacggcttgccatagatcgtctgcgacggtgcggcaggctttgcgtcctttccgccctgcggctttcccgccggagcagaggggaccggcacatcgcgcagcgcggcaaggcgcattttctccgtctcggcaaacagctcctcccccaccggctcgtggttcgagatcacgtcgatgcccatgcggacgccgaagcgctcagtcaggagccgctctgcagccggaagatgcggtgtgagctggtcgcggccgttggcgcgcaggtaaagctcggcccgctcccccgcaaacgaccatttgcaaccggccagaatggccgccgcgggagaataggcgtcgatgagcgcgcgcgtcagctcctgcccgtcgaactcggccagcgcctccggcggataatgcggctcaaagcgaacgcggcgcatgccgtagagcttactcagctccgcagccgccgtgttcagcacggattccgggacatagcgcggcagctccagccggagcagaacggaccgcgcctcgcggtcgatctcggcatggacgatgcttgcctgctccagtgcggcgcgctgcggctcatccggttcatattccaaaaacatcttcaaaaacggaactgccatgatgtgatgctcttcctctctcagcttgtcaaaaaagtcccatcgggctttttcgccaagctgctttcagaattgcaaaataaatttttgtatatatcctattttgcaattctgccgctgcggcgggttattggacgcgaaaggaacccctgacggtttcctttcactcttttcttccctccgatacttttggcttggcagttttttgacagtctgttctcttgtctttttctccaattatacctgttttcggcgcaatgcgcaagccttcgtgatggggaaaaaaggcccccacccggtgatgccgggtgggggccatggattcttcagatattacattgcgtcaatgtatcgcagcagggcaggaagcaactcgtcatagggcagcttttccttcagctcaccgtgcacgaacagcacgccgcagccgtcgccgcccgcgatgccaatgtccgcctcgcgcgcctcgcccggcccgttgacaacgcagcccatgacggcgaccgtcagctccttgtcacagtcctgcagggcctcctgcacgcggttggcaaggccgatgaggtcgatcttcgtgcggccgcacgtcgggcaggagatgagattcacgccctgcttccgcaggccggccgccttgaggatcgccttggccgcaacgacctcgcgcacggggtccgccgtcagggagacgcggatcgtgtcgccgatgccgaggcacagcaggccgccgatgcccatggcggatttgatggtgcccatatactccgtgccggtctccgtcacgccgacatgcagcggatagtcgctgcgctcgtgcatcaggcggtatgcctgcatcatgagcggcacattgctggacttcatggaaacgcagatatcgccgaagccgacgtcctcgagcatccggatatgggaaaacgcgctttcgaccagcgcctccggcgtgggatggccgtatttttccagcagggtcttctcgaggctgccgccgttcacgccgatgcggatgggaatatggtgggcgcggcagcagtctgccacggcgcgcacatgggcctcgccgccgatgttgccggggttgatgcggatcttggccgcaccgccctccgccgcagcgatggcaaggcgatagtcaaagtggatatccgccacaagcggaagcggggaccgggccgcaatagcggcaaagccctttgccgcggcctgatccggcacggcaaggcgcgccagctcacacccggccgccttgagcgcggtgatctgggcaaggctgccctccacgtccgttgtggcggtattcagcatggactggatcgagaccggcgcgccgccgccgatgcgcacgccgcccgcattgatctgtctggtcattccgggcctcctcaggtaaagagatggaaaatatccttgaacgtgatgaccgcgatcagcaggagcaggagcaccatgccgacgccgttgatccacgcctcatatttggggttgagctttttgcgcgtgatgcgctcgatgagcgtcgtgagcagcaggccgacgatgcggccgccgtccagcgccgggatgggcagcaggttcatcacaccgaggttgatggcgatgaaggagaagtaatacagcacgacagccagcccctcccaggcgctctcctgctggttggccgtctccgtgacctgctcgacgatgccgaccggtccgctcatgtccttcaggcccgcgcggcccgtaaacaggtccccgaggccgagccgtacgatgcggacaaagtcgacgcagctgttccacgagaagccgagcgtcccgccgagcgttttttcctgcacgtcgatcgtgaagccgtagagctgctcgccgccgaagtcgcggcgctcgacctgtgcattcggcaggcgcaccttttcgccgccgcgcagcaccacgatgtccgccgtgccgccctcgcagcggtcgagcagcatcgtgacgtcgcccgacgtgtagacacgctcaccgccgatggaatagaagctgtcgcccgcctgcagctgcccggcaaacacgctgtcagagtcgacggatgcgacggcgcgcgtggggatggcctgatagacggacgccacatagatcgtcatgataagcaggcccgccacgagattcataaacgaaccggccaccagaatgaggaggcgcttccagaccttcgcgcggccgaaggcgcgcggattgtcgctgtcgccgtcctcaccctccatggcgcaatagccgccgatggggatgcagcgcagagaatacagtgtctcgcccttctgctttttccagatcgccggacccataaacagggagaattcattgacctgcacgccggacagcttcgccgtcaggaaatggccgaactcatgcacgagcacgagcaggccgaacaggaggatcgctaccagaatataaacaacggtcaagctcatcacctcatccaggaatctgccgccgcgcgtgcggcgcggtcggcctgcagcacggtctcgagcgtgtctgctaccgcaaacgggacggtctgcagcgcgtggtcgaccatgcgcggaatgtcataaaagccgcactcgccgcgcaggtaatgcgccacggcggtctcattcgcaccgttgagcaccgcgcaggccgttccgccggtctgcgccgcctgctttgcaaggcggaagcacgggaaggcttcctcatccggcgcatcgaacgtcagggggccgcagcgcagcaggtcgagcggctcagccggattctccgcgcggttcgggtaggtcagcgccagccggatgggcacgcgcatatccggcacgccgagctgggccagcacggccccgtcgcggaactccacaagcgaatgcacgatgctctgccggtggatgacgacgtcgacctgcgaaagcggcaggccgtacagccgcatggcctcgatgacctcaaggcccttgttcataagcgtcgcgcagtcaatggtgatcttctcgcccattttccagttcgggtggcgcagggcgtcggccttcgtcacctgccgcagcttgtccggcgtcttgccgaagaacggcccgccggagcatgtcaggatcaggcggcggatctcgctgcggtcccggcagcccatcaggcactggaaaatggcggaatgctccgaatcgaccggcacaatctccgccccggacgccgcagcctcgcgcatgacaagctcgcccgcgcagacgagcgtctccttattggcaagggcaatgcgctttttcgcccggatggccgcgagcgtcggccgcaggccgagcatgccgacaacagccgtcacaacggtgtccgccagcgggtgctctgccgcggcgatgaggccgtccatgccggagcgaatttcaattttctcccctgccagcgcctcacgcaggcgctgcgcggcctcctccgtgcccatcacggcaagctgcggccggaagcggcggcactgctcggccatgcgctccacattctgcccggcagtcagcgcagcgacgcgcacgggcagctgctcaacgacctcgagcgtctgccgcccgatggagccggtcgaaccgaggatcgtcagattttttgtcatcatatcacttcaccgcaaacgggatgagcaggatcaggagctcggtcagcggcgcgacgagcatcgtgctgtcaaagcggtcgaggatgccgccgtggccggggatcagattaccgtagtccttgatgccgacctgccgcttcacgacggacagcgtcagatcgcccacgatggacgccgctgcgccgagcacgccgtagatcgcggcatagaaataattcacctgcgtaaagccgaagcacttgttcaggagcagcgtatacaggcacaggaacacgatgttgcaaacgacgccgccgactgcgccctccacggtcttcttcgggctgacgatgggtgccagcttatgtttgccgcaggcgcggccgacaaaataagcgccgctgtctgcgaccatggacaacaggaaggccaccagaatatagaacttgccgccgtccatgccgcgcaggcgcacgagcgcgccgatgaggaacggatagacgaagccgctgaacagcgccacgcacacggccgtgaagcgcagctccgtatgagccgcgagcagctcgcagaacagggcgcagaaatagacgaacaggcccagcagcgcgcacagccacagcgtctgctccgagacgatgctgcacgcacgcagccacgaccacatgacgttcgccatagcggcgacaaccgtatagaccagaatgcggcgatgcttcaggatgccggtgcgccaaagcatctcataggccgccacgccgcaggccagtgcaaacagaatcgccgttgccacaggcggcagaaacagaacgacggccaacagcagcggaagtccgacgcaggcggcaagaatgcgggtcagcatattatttcactcctccaaagcggcgatcgcgcgcgttgaaggcgtcgatcgctttgtccagctcctccgggccgaaatccggccagaggacatccgtaaaatagtattcggcataagccgactgccataacaggaaattggaaatgcgagtctctccgccggggcggatgacaagctccgggtccggcaccccggcagaatagagcagattggagaacatatcctccgtcagctcctccgggcggcgctctccggcggcgcactgcgcggcaaagcgctgtgccgcacggacgatctcatcgcggccgccgtagttcaggcagaaattcacctgtacgccctcgtatttcttcgagcgttccacagcctcctgcgcctcacgccgcagctccggcgacaggcgcgacaggtcgccgaaaaagcagaagcgcacacggttgcggtccatgtcgcggattgcctcgcggaggtatttctccagcaggtccataatggcgtccacttcgtcctccgggcgcttccagttctccgtggagaaggcgtagaccgtcaggtactgcagaccgatgctcttggcataatttgcgatcgtgcggaacgactccgcgcccgccttatgtcctgcaggacgcggcaggccacgctgctttgcccaacggccgttgccgtccatgacgatggcgatgtgggtcgggatccgccgcggctgcgccggagcagtcttttttcggaataatctcattgtaatttttccaatccgggcccaatcggcgcaaaagggaaccgtcacggtccccttttgcgaagcgggctctattctgggcgctcagagctccataagctccttttccttcacggcgcaggcctcgtctaccttcttgatatacttatcggtcaggtcctgcaggtccttctcggccttcttctggtcgtcctcggtgatctcggacttcttcttcagagccttgacatagtccatggcatcgcggcggatgttgcgcacggcgaccttggcttcctcgccatacttcttgacctgcttggtcagctcgcggcggcgctcctcggtgagctgcgggaacaccaggcggatcacgcggccgtcattctgcggattgatgccgaggtcggacgtctggatggccttctcgatcttcttgagcaggctgccgtcccacggctggatgacgagcgtgcgcgcatcaggtgaggcgatggtgccgacctgtccgatgggcgtatcgacgccgtagtactcgacgctgatgcggtcaagcacgcgggcattggcacggccggcgcggacggcgccgaagtcctcctggagcacctcgagcgtgcggtccattttgtaggtatagtccttaaagtcaaccatgttatttgtcctccttcactacggttccgatcttttcgcccatcacgacgcgcaggatgttctcggggtccttcagcgcgaagagaatgataggaatgtggttgtccatggaaagtgaggtcgccgtcgagtccatcaccatcaggtggcgggcaaggacctcgtcataggtgatctcgtcgaatttcacggcgtccggattcttcgcgggatcgtcggaatatacaccgtcgacgttcttggccagcagaatggcgtcggcgttgatctccgccgcacggagcaccgcgccggtatccgtcgagaagaacgggttgccggtgccgcagccgaagatcacgacgcggcccttctccagatggcggatggcacggccgcggatatagggctcggcgatgcgggtcatctcaatggcagtctgcacgcggacctcaacgccgcgctgctccagactgtcggccagagcgaggcagttgatgaccgtggcaagcatgcccatctggtcggcgcgggtgcgctccatccggtcgccgccgtccttgatgccgcgccagaaattgccgccgccgacgacgatgcccacctgcacaccggcttcgacgcactgcttgacgacgtcgcagacactgccgatcacatcaaaattcaggccgcggtgggcgtcgcccgccagggcctcgccgctgattttcagaagtacgcggcgatacttcggctcgttcatggggaacctctcctttaccttctgtttgtcttcgtctattctataataattttgccggattgacaaccgaaatctgcatattttcacaaattgtttttaaatttctttcccggacagatgaaatttcgcgatttgtatgcaaaggagttgcgattttgggcggactgcgctataatgaggagtacttttacctgagaggatgggaaacatggcagacgagctcaatcgcccggagatcaagaattttatcgaggcctttgtcgaagaggatatcggccccggcggccagtatgagggcatgcaggtgcacacgcgcttcccgcctgagccgaacggctatctgcacatcggtcactgcaaggcgctgtgcatcgatttcggcaccgccgaaaaattcggcggcatctgcaacctgcgcatggacgatacgaaccccacgaaagaagacacggaatacgtcgaagccatcaaagaggatatccgctggctcggctttacctgggacgaccgtttttactatgcatcccagtattttgataagatgtacgagtgcgcagaggacctcatccgcaagggtctggcctatgtctgcgagctgacgcccgagcagatgcgcgaataccgcggcgacctgacgacccctgcccgcagcccgtaccgcgaccgtcccatcgaggagtcgctcgacctcttccgccgcatgaaggccggtgagttcccgaacggcgccatgacgctgcgcgcgaagatcgaccttgcctccggcaacttcaacatgcgcgacccggccatctaccgcatcaaccatatgccgcaccacgccacgggcgacaagtggtgcatctatccgatgtacgattttgcccacccgatcgaggatgccatggagcacatcacgcattcgctgtgctcgctggagttcgaggcgcaccgcccgctctacaactgggtcgtggagcactgcgacctgccgtcgaagccgcgccagatcgagtttgcgcgcctcggcatcaactacaccgtcatgtccaagcgcaagctgcgcaagctggtcgaggacggccgcgtcgccggttgggacgacccccgcatgccgacgctgtgcggtctgcgccgccgcggctacacgccgcactccatccgcagcttctgtgagcgcatcggcgtggcaaaggccgcttccaccgtggaatacgctttcctcgagcactgcctgcgtgaggacctcaacgattccgccacgcgcaccatggccgtgctgcatcccctgcgcctgaccgtgacgaactatcccgaggggcagacggagatcttcgaggttgaaaatcacccgaaccatcccgagatgggcaagcgcgagatcccgttctcccgcgatctttggatcgagcaggatgacttcatggaagagaaggtcggcaagttcttccgcctcttccccggcaatgaggtccgcctgaagggtgcctatgtcgtcaagtgcaccggctgcgtcaaggacgcggacggcaacgtcacggaggtcctttgcgaatatgacccggcctcccgcggcggtgaccccgccgacggccgcaaggtcaagtccaccatccactgggtcgaggccaacgaggccgtagacgccgaggtacgcctgtattcgaacctcttcaccgatcccgatcccgacgcggcggacaaggacttcctcgagtgtctgaacccggattccctcgaggtcctcacgggctgcaagatcgagcgttcgctcgccgcggccaaggctccggaatcctatcagttcatgcgccttggctacttctgcccggacaataaggattcgacgccggagcacccggtcttcaaccgctccgtcagcctgaaggacagctataagccgcaggcctgacctccaaaaccaaaaaaatgcagcgctcccggcgggaaatcccgccgggagctcaaactatccaaaaaaccgccaagccgagagtttcggagggaagaaaagtgtgaaatgaaaccgtcagggtgtcctttcgcgtttgatcacccgccgcagcggcagaattgcaaaatcatgctgcagattttgcaattctgaaagcagcttggtgaaaaagcccgaagggacttttttgacaagctgtgcttccggtgggaaatcccgccgggagatttttatatgcaaaacacctgaagaagcagcagcttcttcaggtattttaccaattatttgatctgcgagccggagcgaaggacgacgtcatggtagccgccttccacgatggacgtggccgagacgagcgtcagacgggcattcttctgcaggtcagcgatggtcttgacaccgcagttgcacatggtgctcttgaccttgtagagactgatctccacattgtcgtgcagggagcctgcgtaggtcacgaacgaatcgacgccctcttcaaagctcagcttgcctgcgccgccgaggtcatagcgctgccagttgcgtgcgcggttcgatccctcgccccagtattccttcatatagacgccgttgaccatgaccttggctgtcgggctttcgtcaaaacgggcaaaatagcggccaagcatgaggaagtccgcgcccatggccagtgcgagcgtcatgtggtagtcatagacgatgccgccgtccgagcagaccggcacatagacaccggtggcgcggtaatattcatcgcgggcggcgcagacctcgatgagagccgtagcctgaccgcggccgattccctttgtctcgcgggtaatgcagatggagccgccgccgataccgaccttgacgaagtccgcgcccgccttggcaaggaacaggaagccgtcgcggtcgacgacgttgcccgcgccgatcttgacggaatcgccgtactgctcgcgcacccaggcgatggtcttctcctgccagcaggagtagccctcggaggagtcgatgcacagcacgtccgcgccggcggccagcagggccgggatgcgctcctgatagtcgcgcgtgttgacgcccgcaccgacgagatagcgcttctgatcgtcgagcagctcgagcgggttttccttatgggaggcatagtccttgcggaacacgaagtacagcaggcgtccgtcggcatccacgataggcagggagttgagcttatgctcccagatgatgtcgttcgcttccttcagcgtcgtctgcgcaggcgcggtgacgagcttttccagcggcgtcatgaacgtgctgaccttctggctgccgtccatgcgggagacgcggtaatcgcggctcgaaacgatgccgagcaggcggccgttcgccgtgccgtcgtccgtgatggcgacagtcgaatagccgttcttcgccttgagcgccaggacgtccgccagtgtgctgtccggcgtcaggttggacgcagagacgacaaagccagccttgtggttcttgacgcgggcgaccatcgccgcctcggattcaatggactgcgcgccataaataaaagacagcccgccttccttcgccagcgcgatggccagcttatcatcggaaacggactgcatgatcgcagacaccatggggatattcagagaaatggcaggctcctcgcccttgcggaagcgcgtcagcggcgtgcggagcgaaacattggcagggacacagtcctccgccgtgtagccggggatcagcagatactcgctgaaggtgtggctcggttcggaatagtaaaaggccattgggatcgtcctcctcctgagaattggatatgatgaagagattatagctgaaatccgccgtgccgtcaagcgtttttgccggtcaacagaggcctgagctttacagctcccggaccttctgctatactattcccattgaaatacggaagaaggatcgatatggatcatctgggccttgatctcgggacgacgacgatctccgccgccgtgctggacgcggacggcaggctcctgtgcacgcgcaccgtaccgggcggcgctgccgtcgccgggcagccgtgggagcgcaagcaggatgcccgcggcatcgagcacgcagccctgtccctgctggacgggctgctgcaggaatttccggacatcggctgcgtcggcctgaccggccagatgcacggcatcgtctatgtggacgcggcggggcagctgctctcgccgctctacacctggcaggacgagacgggcgcgcagccggggccggacgggaaaagcacggcagcccgcctgacggagcggaccggctatcccctcgcctccggctacggcctcgtcacgctcgcctgccatcaggcagccggaaccatcccggacggggccgctgccgtctgcacgatcgcggactatctcgccatgcggctgtccggccggacggccccgtgcctcacgccatccatggccgccagcctcggcctgtttgacggaacagactttgaccgggaggctgtccgccgggcggggctgccggagcggctcctgccggaggtctcggagaaggcagagctgaccggcgaccggctgcgcgtctttgccgcgctcggcgacaatcaggccagcttcctcggcgcggggcagggtcggctcgacgcgccgctcgtgaacatcggcacgggcagccagttttcgttcttcacgaaggaacaccgcaccgtgccggggctggaaacgcgccccttccccggcggctggctgctgacgggcgcgccgctgtgcggcgggcggagctttgccctgctggagcgcttttttcgccagacggccgagctggtcacgggaaccccctgcccgtccgcctaccccgccatgctccgcgcgctcgaggctcccatgccggacgatgtgccgcagttccgcacgacgtttgccggaacgcggcaggacccagcggagcgcgccgtgctcagcggattggatgaagagaattttgctcccgttcccctgctgcacgctctgctgcgcggcatggcggacgagctttccgcctgttaccgcgctgcgctcaaagccggatgtgcgcccgccgggcggctgcttggctccggcaacggtctgcggcgcaatcccgccctgcagcgtgccgtcgagaggagcttcggtctgccgctcacgctggctgccgtcccggaggaggccgcctgcggcgcagcgctgtttacccgtatgcagcatgaggcagcactttgactgctccggtgcggtaatttactccccggtctgaggcctctgcgcagcttgctgcgcgggggctttttcctgttcggaaaaccactgctgcacggccgggacgaagcgccggtccgccgggcagaggtcatattgcgccagctcggacggcgcagcccattccagcgcgctgtgctccagtgcgcgcggctctgtgagcggctcggcctgatagagcgtcagatggaccgagagatccggatagtcgaacaccagctcgtccacgcgcggcccgacgcggacctctgcaccaagctcctcgcggcattcgcgcgccagcgcctgctcacccgtctcgccgggctcgagcttgccgccggggaattcccactgcagggcgcgcgccttgccctccgggcggcgacagagcaggacggtctgcccgcgcgtcagcatggctgcggcgacctcgagcggcgcaggccgccaggcctcgatcaggtcacggtgcgtcggcacgaggtccgccgtacgcagctcctccggcgtaaaaaagcgcagcgtgcaggactcccggctgcagtgcagctccggctcctgcggaagctgcgcgcggaacaggacgatgaccatgcgccagaccgtcccgtcctgatagctggcgatgcggtcggcatcgtccacgacgcgcacacgcgtaaaggctgcctccggcaggcgcaggcccgtctcctcgaacagctcccgcgcaatgccgcgcgcctcgctctccccgcggcgcagccgcccgccgggcatgccccatgcgccgcagtcccagcgctgctccagcaggagccgcccgcggcattcgagcaggacgttcgttcccatgcgcgtcggactgttcggcctcggcgcggcaggatcatgcagataatacgctgcaaccggcatggtcatcccctccttacgcggcatagagccgggatacgatccacgagacgagcctgcacggcaggagcctgctcagcaggaccgccgcgctgtactgcggtccaatggcatacagaggcttcgtcctgcggcggagcgccacgcggcaaaggaaggccgcggctttctccggcggcatgccggtctgctcgtcatgctccatacgggagacggaacggctgatgcgcccgccgtactcagcgtcgccccggacgtttttctcgcgcgccgccgtgaagccggtcttcagatcgccgggcatcacggcgcagacgtcgatgccgaacggcgcgacctcgcagcgcagcgcactgctgtaggcattgatcgcggcctttgccgcagaataatacgcctgaaacgggatggcgacgggcgcggcgacgctgctgacatggacgatccgcccgccgcccgcgcggcgcatgcgcggcagaacggcatggttcacattgacgacgccgaagaaatcgacgtcgaacagacggcgtgcctcctcgggcgtggtgcactccactgcgcccgagataccgaagcccgcgttgttcaccacaaggtcgatccgttcggcctccgcctcgatggcggcgaccgtgcgctccacggcgtccgcgtccgtgatatcgcaggccagcgacgtcacgccgggcaccggcgcgccgtgccgcgacagggcatacacccgaaggccctttgccgccagcgtctgcgctgcggcaaggcccaggccggaggtccctccggtcacaattgcagttttcataggatcctctccggaaaaaatggggccgctgcgcagtgcagcagccccgagtttttttaggcaacaccgcataattcgccttcagccttcgccggacatttttcgccgatccatcggtccgaaaagtttgaaatacacaaagtattcctgcacttttcaaactttgtctcgacaaaaaatctctcgccgaatgctctcgctgaatcatgcggtgctgcctttattccgcagtctttggctcgattggctcgatattctcctccagccactgctgcatggcggtgcggccctcgtccgacatggggaaggtccgctcctgttccatttcactgagctcatagcacagctcgccgtgccacagctcggcgtggatggagctggcagccagatcgacctccttcggcgtggccatcacgaccgtcggggcgatgcggaagcggagcaggccgcagctgccggtaaagatgttgttgttctcaaacgtgtgaagcgtaggaaggaagatctccatcagtctttcatcagctcttccatctcaccgatgagctcgccgaacaggctcagggcctcttcaaccggcttcgtggtgctcatgtccacgcctgcgcccttcagcaggtcgatcgggctcttgctgcagccgccggacaggaagccgatgtagtccttcacagcaggcgcgccctcacgcaggatgcggcgggacagcgcgatggctgcagcatagccggtggcatactggaagacgtagtagttgtagtagaaatgcgggatgcgcatccactcggtgtcgatctcatggtcgagcacgatgttctcgccgaagtacagacggttcaggcggcgatactcggcattgagcacctcgggcgtaaggctcgtgccctcctgcgccatgcggccgacattcagctcgaactcggcgaacatggtctggcggtacagcgtcgtgcggaactgctcgaggaagtggttgatgaggtaggcgcgctccttcttgtccgtcgtcttgccgaggaggtactccatgagcagggcctcgttgcaggtggaggcgacctccgccacgaagatcacataatcggcgtcgagcgggttctggttgtggttggagagataggaatgcatggcatggcccatctcatgcgccagcgtgaactggctgtcgagcgtgccggtgtagttcagcagaacatacggatggacgcgcgcgcctgcggaatatgcgccggagcgcttgcccgcgttttcatagacgtcgatccaacggttatcgaagccctgctgcagcactttgcggtagtcctcgccgagcggagccagcgcgtcgtaaacggtcttcttggcctcttcgatgggtgtgcggccgctcacgccctcaatgagcgggcagtacaggtcgtacatatgcagctcgtccacgccgaggagctttttgcgcagatcgacatagcggtacatcttgtccagattcttgtgaacggcctcgatgaggttcgtgtagacgctcgtcggaacgtttgtgacatcgagagaagcctccatggcagagccgtacttgcgggcctgcgcgaagaactgcagctgtttgacctgagaggccagcacggcggcgatggtgttgccaaagctgccgtaggtgtgatagagattctcaaaggcgctcttgcgcagcgcgcggtcgccggactccatgtaggagatataggtgccgtgggacagcggatgcttgtttccctcgccatccgtgcagtccgggaacttcatatcggcatccgtcaggagaccatagatattgtccggagcctgggccatttcgcccgcggcggccagcagcttttcctcggccgggctgagcacatgggcgcggcggcggcggatatcgagaagatagcggcgatagcgctccagctccgggcaggcggtgaagaagccctcaaacgtctcgtccgggatggccatgagctccggcgtggcaaagctgcccgctgcgttcagctcgacgaagctgctcatgaggcggccggtcatcgcctgatacttggcaacgcgcacatcctcatccgcgcggcgcatggcgtagttcgcgaggtcgctcgcaaggacctcgatctcctcctccatctgcgcataggcaagcagcatctgtgcggattcgcccagatggcccgcgaacgcagcgatcttgggaatatagcccctcgccttttcgaggtcggcttcccaaagctcatcggttgcgtaaatatcttcgatcgcccatttgtcctgctgtgcaagctcagcacgttccgggatctttttggtttctgccatagtgattcataacctccatatcaatatttcggtgttctttggttatcatatcatatcggtcccggattctcaaccatatttccgggcgaaagcacgaaaaactgccatgcccggaaaacggcacggcagttttttgggattatgaataagctgataagaccggatatccgaaatcagctctcgcggatctcgaggacctccatcgggcaggccttgacgcagataccgcaggcaatgcacttcgaggcggcgggtgcaccctcgacatgcaccatcacgccgaacgggcaggcctccacgcacttgccgcagccaacgcagagcttcttattgaccatgtacacgccggtcttcggattctgggtgatcgcaccgtgctcacaggccgcagcacacttaccgcactggacgcaggtcatcgggcggaccttgccgttgcgctcaacgatcttcaggcaggccttgtcctgatggaactctttataaaatgcggtcgagcaggcgcggacgcactccagacatgccatgcacggaacatccttcttgacgaaaagtttcttcatgtcagcttccccttcggttggtgatatgttgtttcatttctccgcctctacagacgggccaaagcaaaaagtttggcgtaccatcccattatacaaggcaatgcaaaaagaatcaatcccaattttacgttttcgacaaatttccctgcgtagcccgcgcaaatccgggcaaactaagcgggacaatcataacatcaggaggatcttgatcgatgaaacgaaccaaagctctgctctttctgacacttgccctgtgcgccgcgctgctcacgggctgccgcagcaatgtcccgaacacgacagacggccgcgtggacggcacggagccatccgccctcatcccgacggcagcctcggaaatcatgacggagccgtccgccgcaacggacgacagccgtaccgagtccgaaagcggcatgacggaggcttctgaaggcaccacaaatgccgcaaatgcgcgcagcagacgataagagcatgggaaccgcctcctgcccggaagcggttcccaaatttaacggagtccgtgatccccgatctgttttccggcgccgtttttctctcctgctcaaccatttctctgctcgaattataccgcaaatcgcctgcggccatgaccgatttgtgccggtctgcgggcatgaaaaaaagacaagcctgcaggcttgtcttttttgtaccataacgctgagatcagatggcgcgctcaaccttgttggagcggaggcatctcgtacagacgtaaacatggcggggagcgccgtcaacgatagccttgacgcgcttcacgttcggcttccacgcacggttggaacgtctgtgggagtgagaaaccttgatgccaaacgtgacacccttgccgcaaaaatcgcactttgccaattgctgcacctccaatcatcgcaaaatcacgctctagatcgcgctaaaagacgcctatacataatagcaaagaaatcgcaagaatgcaaggggaaaatcgaaaaaatgcaaaaaaattttccttttggcgattttcccgaatttgctcgaaaaaaagcgcaaaaacggttgccaaacctaccggaagccgttataataacattattatcttcgggcctgtacgcccggtgcaggaggatcgcagtcatgcccatgaattcctacagcgttcggctgaagcaggtcgtggaggaatttaacctcatcgtcgcccgtgaatccagcgattacgatcgcatcgatctcatggtggaagaagtcatgcgtcccggtctgcccctggcaggcttttttacgcattttgagccgctgcgcctgcaggtcatcggcaatgccgaggcgacctatctccactcgctcaccccggagcgccgcgccgagaccttcgaccggctgttctcctatcacatccccgcccttgtctttgcgcgcaacattgagccgatgcccgagtgcatacagatggcggaaaagcatgatatcaccatcctgcgctgcctggagtccacgtcctatgtcgtctccagcctcatcacctatctcaagaacgcgctggccccgcgcatcacgcgccacggcgtgttcgttgaggtctacggcgagggcctgctgctcatgggcgaaagcggcatcggcaaaagcgaggccgcagccgagctgctcaagcgcggccaccgcctgatcgcagatgacgccgtggaaattcgcaaagtcgctgggaacacgctgcgcggcacatcgccggagctgatccgcaactatatcgagatccgcggtatcggcgtcatcaacgtggcaaagctgttcggcatggccgccatcaaggacgaatccaccgtggacctcgtcgtgaacatcgtcccggtcggcaatgagcagatcttcgaccgtctcggcctggaggagcagtatatggacctgctgggcgtgaaggtcccggccattaccatccccgtccgccccggccgcaacctcgccatcattctggaggtcgccgccatgaacaaccgccagaaaaagatgggctacaacgccgcggcggagttcacggagcagatcaaccgccatttcgacgagacggccgggcagagcttctgattcgtttataccatgggctgctgcagaatctgcggcagcccatttttcatacgccgcgttctggggcttgctgcggacggcagactgtggtatactataatgaaatgatttctgttcgcgtcccggcggaaattccgccggaggatggccctgttgttttttgatattctggaggatatctcatggatctgtttgaccgtctttccctcgcgctgcccaggctccgcctgctgcgtgaggagccgcttgcggcgcacacttcgttccgcatcggcggccccgccgaggtgatggccttcccgtcgtcgcttgcagagctgcaggccctgctgcgcctgagcgcacaggagggtatccgcgtgcgtctgctcggcgcaggcacgaatattctggcgccggacggcggcgtgcgcgggcttgtcatcgtgacgagcggcgcgctgaccggcctttccatgccggatgcagcgcatatcgaggccatgtccggcgttacgatggcgcggcttgcctgctttgcccgcgacaacggcctgacgggtctggaatttgcccacggcatccccggcaccgtcggcggcggcgtctatatgaacgccggagcctacggcggcgagatacgcgccgtgtgccgctggtcgcaggagatgctgccggacggaacgctcgtccggcgggagggtgtctcgcagggcttcggctaccgcacgagcgtcttccagcatacagacggcgtgatcgtccgggcgtgctttgccctgcagccgggcgaccccggcatcatccgcgagacgatgcgcgagctgatgacgcgccgcaccgcctcgcagccgctggacctgccctcggccggaagcgccttcaagcgcccgcagggcggctatgccgccgcgctcatcgagtctgccgggctgaagggcctgacggtcggcggcgcgcaggtctcggaaaaacacgcgggctttgttgtcaaccgcggcggcgcgaccgccgcagacgtgctggagctgctccgtcaggtgcagcagcgcgttctggagcacagcggcatccggctcgagccggaaattcgcctttgggactgaggaacacatgagctttacgatattttccttcggctttcgctacggcgcaccggaggctgacgaggtattcgatctgcgctgcctgaaaaatccctattgggagccggagctgcgtgaactttgcagtcaggacgcccctgtgcgcgattttatcctgcacaatgagcagagccgcaccgtactgaactacgcgctgtccatgctgctcctgcaggcggacctgtatgccgagcgcggctggggcaacgacatgaccgtcggcgtcggctgcaagggcggccgtcaccgctccgtagtaggcgcagaatttctggccgccgggctgcgggagcatggccataccgtcacggtcttccaccgcgatctgagccgggagggaaacgcatgatctccttttccgccaacgtgaaacgggagctctgccgcacggcaccgggcgcaaaatgctgcgcgctggccgagatgctaggcgcactcctgtatgccaatcatttcagtgcttcgtgcatccgcatcgtcacagagaatccggagttcgccgcgcggctgccgcgcctgctgcagcgcggattcggcctgcgctttgacgcgctgccggagccggaggcgcagggcaagcgcgtgctcgtgctggaggacccggaaaaaatctcgcatgttttcacgctctgcggcttttccgccgaatcgagccttgcactgcatgtgaatcttgccctgctggaaaatgactgctgccgccgcgccttcctgcgcggagcctttctggcgggcggctccgtcacagaccctgccaagcgctatcatctggaattctccacctcgcaccggcgcgtatgcgccgagacgggcacgctgctgctggagatgggcctgacgccgaagcagacggagcgcaagggaagcagcattctctacttcaagcagagcgagaccatcgaggagctgctggccctgatgggcgcgccggtcagcgccatgaccgtcatgcaggccaagatcgaaaaggactggcgcaacgacgccaaccgcaagacgaactgcgacaccgcaaacgtcaccaaggccgtggacgccgcgcaggagcagcttgccgcactgcgcacgctcgaggcacagggccggctggactctctgcccgaaaaactcctgcagacggccctgctgcgccgcgagcacccggaggccacgctctccgagctggcagagcttcacgagccgcccaccagcaagtccaccgtcaaccaccgcatgcgcaagctgctggctctggcggcagagggcacggagacgaccgaagaaggcccggcgtgaccgccgcgcttttccgagaaaggaaggctgcctcatggcattcgtacatcttcacgtccacagcgaattcagtctgctcgacggcgcatgccgcatcggcaggcttgctgcgcgcgccaaagagctgggccagactgcgctggccatcaccgatcacggcgtcatgtacggcgtgatcgacttttatcgtgctgcaaaggccgtgggcatcaagcccatcatcggctgcgaggtctatgtcgcaccgcgcaccatagcagaccgcgtccacggcgtggacaatgacgcgcgccatctggtcctgctgtgcgaaaacgaaacgggctaccgcaatctgagctatctggtctccatggggttcctgcagggcttttacggcaagccccgcgtagacctcgccctgctgcggcagcacagcgagggtctgatcgctctgtcggcctgtctggcgggcgagatcccgcgcaggctgcgcaccggggactatgacggagccaagacctatgcgctggagctttccggcattttcggcccggagcatttctatctggagctgcaggaccacggcattccggagcagcgtgaggtcaaccgcggcctgctgcgcatcgcgcaggagacgggccttccgctcgtggcgacgaacgacgcgcattatctcacgcgcgaggacagtgagctgcaggatgtgctgctgtgcatccagaccggcaagacgctcgacgacccgaaccgcatgcgctttgagacgcaggagttctacctgaagtccgaggacgagatgcgcgccctcttccccgccctgccggaggcgctggaaaacacacagcgcattgccgaccgctgcaaggtcgaatttgaattcaaccactatcatctgcccgccttcacgcctccggacgggagcgattctctgacgtatttccgccgcatgtgcgatgagggcttccgtgagcgctacccgggtgcccctgcgggctaccgtgagcggctggaatacgagatgtccgtcgtggagaagatgggctatgtcgactattacctcatcgtggcggatttcatccgctgggcaaaggagcagggcattccggtcgggccggggcgcggctccggtgcaggctccatcgcggcctactgcatgcacatcaccgagatggaccccatgcagtatcacctcatcttcgagcgctttctgaacccggagcgcgtgagcatgccggatttcgatacggacttctgccagctccgccgcggcgaggtcatcgactacgtcatgggcaaatacggcaaggaccatgtggcacagatcgtgacgttcggcaccatggccgcccgcgccgccatccgcgacgtcggccgcgtcatgaacctgacgtatgccgaaacggatgccgtggccaagcagatccccgccacgccgcacatgacgctcgacgaggcgctgcgcatctcgccgcagctgcgcacaatggtcgagagcgacgagcgcatcaaaaagctcgtcgacacggcgcgtggcctcgagggcatgccccgcaacacctcgacgcacgccgcaggtgtcgtcatcacggcaaatcccgtcagcgactatgtgccgttggcgcgcaacgacgagaccatcgtcacgcagtttaccatgacgaccatcgaggagcttggccttctcaaaatggactttctcggcctgcgcaatctgacgatcctcgacgacgccgcccgcgccatccgccgccgcgagccggactttgatctcaagcggctgccggacggcgacgctgcaacgttcgccatgctgggtgatggcaagacggcgggcgttttccagctggaatccgccgggatcacgggcgtatgtgtcaacatgaagccgcagtccatcgaggacctcaccgccatcgtcgccctctaccgcccgggccccatggactccatcccgcgctttattgaaaacaaatcccacccggagcgcatcacctatctctgcccgcagctcgagccgatcctcgccgtgacctacggctgcatcgtctatcaggagcaggtcattgagatcttccgcaagctcggcggctacagcctcgggcaggcagataatatgcgccgcgccatttccaaaaagaaggaaaagatcatcatcgccgagcggcaggcgtttgtccacggcgatgccgcgcgcggtatccccggcgcgattgcaaacggcgtgtctgagacggcggcagaggccatttacaaggaaatcctggatttcgcgaactacgccttcaacaaggcgcacgccgtatgctatgccaaggtcacctatgacacggcctatctcaagtgccattactcccgcgaatatatggccgcgctgctcacctccgtgctggacaattccacgaagacggctggatacatcgccgactgccgcgatatgggcatccgcctgctgcacccggacatcaacgcctcggaggataagttcaccgtggagccggacggcatccgcttcggcctcggcgccgtgaaaaacatcggccgcggcctcatccggcaggtcatggcggagcgcgcggaaaacggccgctttgtctcgctggaggactttgcccgccgtatgcagggctcggacctcaacaagcgcgccgtggagaacctcatcaaatgcggcgcaatggacggtctcggcatgggccgtgggcagatgctggccatttatgaaatggtgctcgacgccgcggcggacacctaccgccgcaatctcgaggggcagctgcagctcttcgggccggaggacggcggcatgccggagatccccgcgccgaagctccccccgctgcgcccggcggagctcatgcagatggaaaaggagacggtcggcctctatctctccggccatccgctcgacgaataccgcacgcggctgcgcgcggcgggcgtcacgcccgtgctgcgcatcctgcagtcgtttgaagagaacgacggcttcttccacgacggccagaacgtccgcattgcgggcatggtcgaggagatccgccgcaagacgacccgcaacggatccatgatggcctatgtcacgctggaggacgacacggccgcaatggagctgctgacattctcgaacgtgctcgagcgcagcggcagcctgctgacggaaaacgccgccgtcgtggcggagggccgcatctccgtgcgcgacgaaaagtccccgcagctcgtggtcaaccgctttgacccgcttgaggccttcacaaagcaggctccgccgcccatggccgccgcgccgcgccccgctgcgcaggagcaggcggtcctgcaggcctcgcggctgtatctgcgcctgccgtcggagcagtcgccgctgttcggcaaggtccgcgccacgctcaacatgttccccggtaatgtgacggccgtcctgtattttgtggatacgggcgtccgccgcggcacacagtgcggcctgcgcggcgatatgctgcaggagctgcgcgccctgctcggtgaggattccgtcgtgctgaaatgaccctgctcggccgaaattttgcccacaaaaatgacagacccactacacaatggttacgatttatgttataatattggatggagaatatcggcgaaaggagaacgcacccgatgaagaagaaatgcatccgcttccttcccctgctgctggcctgcctgctgctcggcgggtgctttctggagcccgcagagggactttacgccgttccgaagcagtcagaggaatactatgacctgcagaacgccatcgaattggccctgccggacggtgcggtctatgccccgccggtctccggcgataaccagcaggtcgtgcagatggtcgacctcgacggcgacggtgaggacgaagccgtcgtctactgcaaaacgaccggtgagcttccgcttggcatctatgtctttgaccggcagaacgaggccttcacgctggctgcatccgtgcagggcgcaggcagcgcgttccaccatgtctcctatgttgcgttcgacgaccagccgggctatgagctcgttgtcggacgccagatcagtgatcaggtcccgcagctcatgaatgtctattccctgcgcggcggcacgctgaccgagctgatgagcacggaatacgctgagttcgtcacggccgatctggacgcggacagccggcaggagatcgttgtgctgcacagcggcggcgattcgcagaacggtattgccgagctgtactgctgggccggcggtcagctcaagcgtgagcgcgaggtctcgatgtctgtggctgtctcgtccgtcaagcgcattctgacgggctatatgtgccggaacgtcgcagcggtcttcgtcgcctcggagtacagcgacggcagcctgatcacagatattttcgtcttccgcgacggggtgttcaccaacctctcccgctcggaggacgccaacaccgacgtgcagaccctgcgtgattactacatttacggcggcgacatcgacaaggacggcctgatcgagctgccgatgctctgccccatgccgtcgctcgactatgatgccagctcgcaggatcagtaccttgtcagctggtataatctgcagctcgacggttcccgggacgagaagctgctgacattccactgccacacgggcggctggtatctgcagatcccgacgttgtggcaggagcacctcgtgctcacacgcagcgccgtggcaggcagcacgctcggctaccgctttctgtgggaagccggcggcagcaccgaggagcttctgacgattgccgccctgtccgcatcggacctcagcgcacttggagacggctggcaggtcctgacgcagaagggcgagacggtctatgtctgccgtctggcacgccgcgccgtggcgctcggcatcacggccgatgccatccgcacgcaattccattttattcagaacgactggaagaccggcgacgttacaacgtcctgaccgatccccgttgcagtctccgccgctcggcggaaggcaggaaaaggagagaagcatgaaaaaggtactgattctggaggacgaggtcagcatccgcagcttcgtcgtcatcaatctcaagcgggcgggctatgaggccatcgaggccgggaccggccgcgaggcgcttgagcgcctgaaggaaaacccggacaccggcgtggccattctggacatcatgctgccggatatcgacggcttcgaggtctgccgcagcatccgtgcgacgaacaaggccatcggcatcatcatgctcacggcgcgcacgcaggagatggacaaggtcacgggccttatgaccggcgcggacgactatgtcaccaagcccttttcccccgccgagctgacggcgcgcatcgacgcgctctaccgccgcatcggcggcgcggccgaggccgatcccgaagtcatcgtccacgagccgttcacgctcaacctgcgcaaccgcacactcgaaaagagcggccgccgcatcaagctcacgcaggtggagttcgccattctgcagctgttcatgcagaaccccggccgcgccctgtcgcgggaagacattctcacctcggtctggggccgcgattacgacggcgagctcaagatcgtggatgtgaacatccgccgcctgcgcatcaagatcgaggataacaccgcaaacccgacctacatcaccacggtctggggctacgggtataaatggggcctgtaagcccgggaggaaccgccatgaaacgaaacagcggcctgcagaagcgctggctgcgcaatacgctgagcattctgtttgccatcgtgcttctctgcgtgatcgcgctttcgatcatggtcgcagcctattactactccagcatggaggccgggatggaggccaaagcgcgcacgagcacgagctttttcgacaactacgtccgccagagctacaacgaatattaccagtcctgcgcaaaattcgcccagagctttgactcgaaggaccagatggagctgcagttcgtcaacacgaacaaccgcatcgtcgcctcgtcctacggcgtgtactccggtatggccggtgtgacgtccgacatccgcgaggccatcgagacgaaggccatcgcgtcctacaccggaacaaatcccgcaaccggcgagcgcatcatggcagtctccagcccgctcatctatacaaacggcgaggtcatcggcgtgctgcgctatgtcacgagcctgcgccgcgccgaccggcagatcatgctcttcagcctgtgcgccgcgcttgtcggcctgatcgtgctgctcgttgtctatgtcagcggccgctactttgtcaaatccattcttgtcccggtgcaggagctgaccgccacggccaagcgcatctccgctggcagctatggcgtgcagatcccgcggaagtccgacgacgagatcggcgagctgacggacaccatcaacgaaatgtctgaaaagatcagccgcgcagagaaaatgcagtccgagttcgtctcgtccgtctcgcatgagctgcgcaccccgctcacggccatcagcggctggagcgaaacgcttctttccgccggaacgggcgttgacagcgccgaggcccgccgcggcctgagcatcatccagcgcgaggccgcccgcctgacggacatggtcgaagagctgctggagttcacccgccttcaggacggccgctttaccctgaacgtcgtgccgtgcgacctgcgcacggagttcgaggacaccgtgttcatgtacggctcccgcctgcggcaggagggcatcgtgctggactatctggaaaatgacgacgatatccccgaaatcccctgtgatccggcgcgcatgaagcaggtcttcctgaatattctggacaatgccgccaagcacggcggcgagggtggcaggatcacggccgagatctgccgggagaacgcagacgggcaggactccgtcgtcatccgcatccgcgacttcggccccggcattcccgaagaggagctgccgcttgtgaaaaagaaattctacaagggcgcctccaaggcgcgcggcagcggcatcggccttgcggtctgcgaagagatcgttacgatgcacaacggcgtgctcgacatcgccaatgccgagggcggcggcgcggtcgtcaccatccggctccccattgcagagcaatagaaaggaaacacatggcaaaaaagaacacacagcagccgcaggaacaattcaagaccatgatcggcgggcaggccctcatcgagggcattatgatgctcggcccggagaaatccgccgttgtcgtccgcacgaaggacggcctgcagcgcaaggtcgagccgcggaagctctcgcagaagtggtcgccgaagatgctgccgttcatccgcggcatcttcaatttctgcacatccatgaagaccggcgtttccgccctcatgtattccgcggatttctttgcggaggaggacgaggacgaaaaaggcaaggagcccggccgttttgaggcctggctggaaaagcgcctgtcctccgagaaggcgcagaacgcgctcatcacgttctccgtcgtgctcggactggcgttctccatcgcgctgttcttcgtgctgccgtcgctgctcggctcgttcctgaaccgctttgtcaccacgaatgagatcgtgcgcaacctgctcgagggcctgctgcgcatcgtgatcttccttgcttacatgttcctcgtgtcccgcatgaaggacatgcgccgcgtcttctcctatcacggcgcggagcataagaccatccgctgctacgaggctaagctccccctgacggtcgaaaacgcgcgcaaaatgacccgcctgcacccgcgctgcggtacgagcttcctgttcgtcgtgatgatcgtctctattctggtcttttcccttgccacgccgctgctgcggccgatcacggcgggcatcacctcgcactggctcgaggccatcgtgcgcgtggtgctgaagctcctgctcctgccgatcgtcgtcggcatcagctatgaattcaaccgcctcgttggccgccatgacaactggctgacacgcgcgctgtccgctcccggcatgtggctgcagtacctgacgacaaacgagccggatgactccatgctggaagtcggcatcgaggcgctgacgctcgttctgccggaaaaggagggcgaggaccggtggtaaagaaatacgccgagctctatctcgacgctcgccgcgccctgctgcccacagagggccagtttgcctcgaacgtcgcgcgggagctcatctgcgcggcctccggcaaaacggcagagcagctgatctcggaccgcgacctctacgcctctgaggagatctgtgagctggcgcagtcctttgtgcgccgccgcgtggcaggagagcccatgccctacatcctcggtgaatgggacttctacggcatgacgctcaccgtcacgcccgacgtgctcattccccgcgacgacaccatggccgtaacggagcttgccatcaaaaaggcgctgtttctcgagcagaatccgcgcattctggatctgtgcaccggctccggctgcatcggccttgccatcgcccgccgcgtgaaggacgcgcgcgtgacgctcggagacgtctcccctgccgcgctgcgcgtggcccggcagaacgtcggcagccagcgcctgtccggccgtgtgaagtgcctgacgatcgacgtccggcagcccgcggccccgtttctcggcacctttgacctgatcgtctcgaatccgccctatgtcacaacggcggaaatggagacgctcgatccgtccgtccgcgactatgagccgcatctggcgctctggggcggcgacgacggactggatttttaccgcgccatcgtgcgcaacttcacccccgcgctcaaccccggcggctggctttgcttcgaattcggcatggggcaggatgccgccgtgtgcgacctgctgcgccgcgcaggctatgagatcgcggagctgaaaaaagacaccgcagacatcacccgggccgttcttgcccggaagagagaggaaggctgaccatggcacagaaaaagcccgcctacgaggcccccgcgcccgcagacgacaagaaaaaagcgctggagaccgcgctgcatcagatcgagaaaaactacggcaagggcgccgtcatgcgtcttggcgaccgtccggaaatgaatgtagacgccattccgaccggttcgcttgcactggacgccgccctcggcatcggcggcctgccccgcggccgtatcgtcgagatctacggtccggaatcctccggcaagacgacgcttgccctgcacgttctggctgaggcccagaagcgcggcggcgaagtcgcctttgtggatgccgagcacgcgctcgatcccgtttatgcggccgccatcggcgtagacatcgactccatgctcgtttcccagccggacaccggcgagcaggccctcgatatcacggacgccctcgtccgctccggtgccattgacgtcgtcgtcgtcgactctgtcgctgctctgacgccccgcgccgagatcgagggcgagatgggcgaggcctttgtcggtctgcaggcccgtctgatgtcgcaggctctgcgcaagcttgcaggcaccgtctccaagacaaactgcatcgtcatcttcatcaaccagctgcgtatgaagatcggcgtcatgtacggcaaccccgagaccacgaccggcggcaacgccctgaagttctactcctccgtgcgtctggacgtccgcaagatcgaggccatcaagagcggcactgagatcgtcggcaaccgcacgcgtgtgaaggtcatcaagaacaagtgcgcgccccccttccgtgaggccgtgttcgatatcatgtacggcgagggcatctcccgcttcggcgagctgctggatatcgccgtcacgctggagcttgtcaataagagcggcagctggttctccgtcggcgacgagcgcatcgggcagggccgcgacaatgccaagcagtatatcgccgatcatcccgagctggccgccgagctggaggcacgcgtccgtgcccacctgatggaggtccagaacagccgcatcaagcagcccgccgcccccgccaagcccgtggatgtttctgcggacgactttgacgccgaataatgcgtctgcttgccattgaacagacgcgctcgccgcagggcaagctgcgtctgcgctttgacagcggcgaagccatgctggtgctcccggccgtggtcgcggacctgagcctgcgccccggcatggacatcccggacgccgcacgcgcctcgctcgaggccgctgccggctccgcgtccgcaaaggagcgcgccgttcgcattctctctgcggcaacggtctcccgcgccgagctggagcaccgtctgcgccagaagggcgaatcgcccgagaacgccaggcaggccgtcgaatggctcgccgggctctccctgctcgatgacgaggccgcagcccggcagatcgtccgcagcggcacggcaaagggctacggcgcggcacgcatccggcagatgctctacgccaagcgcatcccgcgcgagctgtgggacgaggctcttgccgagctcccggagcaggacgacgcgatcgacgcatttttacagaagcggttccgcggcaggcagcccgaccgcacggagatccgccgcgcagcagacgcgctgctgcgccgcggccatgcgtggggcgatatccgccgcgcgctcgaacgttacgacccggattttccggaggaataaggaaagaggtacaaccccgatgggcaaacgagtgggaatgatctcccttggctgtgccaaaaatcaggtcaacgcagaacagatgctctatcgcctgcagcaggcaggctacaccctgcaggaggatgtggacggcgcggatctcgtgatcgtcaacacctgcggctttatcgactcggccaagagcgaggccatcgacaacattctcgccatgggcgcgctgaagcaggagggccgcatcggccgtctgctcgtaacaggctgcctgtcacagcgctatcaggatgagattctgcaggagatgccggaggtcgacggcgtgctcggtacaggcagctatgacgacatcgtctccgtggcggaccgcctgctgaacggcggcgagaccgtcagcgagttcggcgacatcgacgccccggcagatgaggccgggcgcgtgctcacgacgccgcagcactatgcctacatcaagatcgccgagggctgcaacaatttctgcgccttctgcatcatccctcatctgcgcgggcgctaccgcagccgcgccgtggaggacatcctgcaggaggcccgcggccttgcggagtccggcgtcaaggagctgatcgtcgtcgcgcaggacacgagccgctacggcacggacctgtacggcgcgccgcgccttcccctgctgctgcacgagctgtgccgcattgagggcttccactggatccgcgtgcactacctctaccccgatatgatcacggacgagctgctggacacgttcgcgtccgagccgaagctcgtcaactatatggacattcctatccagcatgtgaacgacgcgatcctgcgccgcatgaaccgccgcgggacccgcgccgagctggacgagatgctccagaagctgcgcagccgcctgcccgacgccgtcatccgcacgagcctcatcacgggcctgcccggcgagggcgaggccgagttcgaagagctctgtgcctggctccgtgagaacaagctcgagcgcgtcggcgcgttcgtgttctcccccgaggacgggacgcccgccgctaagatggagcacgcagacgaggaggtcgcccagcgccgcgccgagatcatcggcgagctgcagtcacgcatcatggacgaatacaacgcagcccgcgtcgggacggtcatggaggtgctttgcgagggcgaggagccggagaccggccgctgcttcggccggacctatgccgactcgcccgatatcgacggtcgtgtactgttctctgcggcgcgcagtgtcgttcccggtgagtttgtaatggtccgcatcacaggcgccgaggacggcgacctggtcggtgaaatggaggagaatgcataatgacgactgcaacgaagatcacgctgtttcgtgtcgtgatgatcccggtttttctggtctgtatgtacctcagtgagatctggagctggatgcagatcgtctcctgcgtcgtgtttgccgtagccagtctttccgatattctggacggtcagatcgcgcgccgctgcaatcaggtgacggacctcggcaaattccttgacccgctggccgataaggtgcttgtcatcgccgctatggccatgttctgcgaatggggcatctatcccgcctgggcactgatgatcgttctggcgcgcgaatttgccgtgacaggcctgcgtctcatcgccgccggaaagggccgcgtcattgcagccggttggtccggtaaggtcaagactgctgtcaccatgacaggcctgagcttcatgctcgtcttcggccgccgctttgtgttcagcgaggtgctcgactgggtcgtcgtggccgctatcaccgtcacgacgctctattccggcatcgaatacttcgtccggaatcacgacgtgttcgagaatacgaaataaccgtttccgacggaaaagctcccggtgcagtatcaaaccgcaccgggagctttttacatcatccgcataccggagaagccccggtgctggtgcaccggggctcatgttgttccgaataggatcagccgtgatagttgatgaccttctcgaacttctcggcaacaaggcttgcgccgccgatcaggccgccgtcgatctcaggctggctcatcagctcggtcgcgttcttgtcgttcatgctgccgccgtagaggatacggacctggtcggcagcgtcgccaaacagctcgcggatcgcagcacggatggcggcgatggtgcggttggcgtccgtcgccgtggcggtcatgccggtgccaatggcccagatcggctcataggcgatgacgacatccgtcacctttgccgggctgacgccgcacagagcggccttcgtctgcatgcagacgacctcgttcgtgatgttggtctgcttctgctgcaggctctcgccgacgcagacgatgggcttcaggccttcggccaggaccttcaggaccttcttgttgacggtctcgtcggtctcggcgaagtactgacggcgctcggaatggccgaggataacatactcgacgccgagctccttcaggctggcgatgttgcactcgccggtgaaagcgcccttgtcctcaaaatggacgttctgcgcaccgagcttgatgtccgtgcccttcagctgcgttgcggcagcgaacaggctgacggtcatcgggcagacaacgacttccgccttcgtgcggacctggatcttcttcagatcttcgacaagggcgacggtctcagcgggcgtcttgttcattttccagttgcccgcgatcatgggttttctcatgggggtcagatcctttctatgttgcgcttggaattaatacagcttcttgcggatttcgacgttgccggacgggcactggttcttgcagttgccgcagttgacgcacttatgctcgtcttccttcacgccgctgacgatcttcatcgtggagctgcagcccagacggtttgcaccggccttgagcatggcaatggcatcgtcataggtacgaacgccgccggaggccttgatgcccatctcggggccgacggtctcgcgcatcaggcggacatcctcgacggtagcgccgccggtggaataaccggtggaggtcttcacgaaggcagcgccggcgagcttcgcgacggtgcaggccttgaccttctcttcgtcggtcaggaggcaggcctcgatgatgaccttgaccttggcgcggcccttgacggcgttgacaacgccctcgatgtcgcgcttgacaagcagccagtcgccggacttgatggcgccgacattgatgaccatgtcgatctcacgagcgcccttggaggcggcgtcggaggcctcgaaggccttcgcctcgggggtgctggtgccgaacgggaaagcgatgacgcagcacggcgtcacgccgctgccctcgagctgctgggcgacatactgaatgtaggaggggttcacgcacacgctggcgcagtgatacttcttggcctcgtcgcagatcttgcggatctcgttgacgctggcttccggcttcaggtaggtatggtcaatgtacttggccatgtctgccggggtatagccgtcgctcgcggcgggcgtctgggtctgcgcgccgtacttggagcagatctcctccgttacctgtctgataatttcattgatatccattgaaagtcgtttcctttcgtatcgtttatgcgtttttcagcgcttcctcggcgatcttcgccgtggccgtcaggccaaggcgcgttgcgcctgcggcaagcagttcttctgcctgcgcgagcgtcttgatgccgccgtcgatcttgatgccgacattgcggccgaggatctcactggcaaagcggacatcctcaacgcgggcgccgtggccgctgagcatattctggatcttcacatagttcacgccgctgctgcgcagcatctgcagaacggcgcgcttctcctccggcgtgtagagcgcatgctcgaacacggccttgagctggaccttgccgaccgcacagcgcacgagctcatcgagctcacgctgcgccacatcgagacggccggacttgatggccagcacgttcagggcgacgtcgacctccgtggctccgttggccatgcactcgcgcagctccgccagcttggcggcctgcgacatgcagccgtgcgggaacccaatggccgtgccgacggcgacggggctgccgagcaggatctcgcgcgcagccggtacatagtacggtgcaacgcagaccgctgcgacggagtatttccgtgcgacggcacattcgcgctcgatggtctcaagcgtcgtgtcggggttgagaagagagtgctccagatgggagatcacgtccacgcccgtgaccatgccggcatagggcgcgtccgttaccgtcggttccagatggaagtactgcatgacctgctgctccacctgtttccggatcgcttcgatatccatatccatctcacctgtttcgtggaatgtgggaatgcgtcacctcagtggtattcccgggtctcgccgtcgagcgtgatgtggtcgatgacaccgcagatcgtcagatcggcgatgacggagcggccgaggaacatgttcgccgagccgccctcgacattcacaaggaccgtatctccgatcccggcgtccgccacgtcaaaggcgatggcctggttcccggtcaaactgccgttctcgtcgatatagtcgatgatcatcagcttctgaccggtgtagcaggcatccttcaccgtagagacgacgttcccgacgaccctggccagcttcatccgagcttcggcaggatagcctccacgtcatcgtgcggggacgggatgacatgggtgccgtacagctcaccgacgcgctttgcagcggtggcgcctgcgtccacagcagccttgacagcgccgacatcgccgcggaccataacggtcacgaggccggagccgatctgctgcttgccgatgagatgcacatcggctgccttgaccatagcatcagcagcctcgacagcgccgatgaggccgcgggtctcgatcataccaagagcgagtttcataggttattcctccagattattctttaattctgacattgtacgagtcgataaaaccgacgatcgccgagtcggccgcaggcaccgtcttgcggaacatgcgcgccgcctccttggagccgatcatgaagacaaagtccccgcgaccggcctgccgggtcgcgtcggcagccacgatcatcttcgtttttacgcctttttcaatgagctgaacgacgagcagcgggatattttccagccgctcctccttcacgctcgccacgacgcagccgacgacttccccgatatacatagcttaaccgatgttcggcaggatggcttccacgtcgtcgtgcggagacgggatgacatgggtaccgtacagctcgccgacgcgctttgcggcggtagcgcctgcgtcgacagcggccttgacagcgccgacatcgccgcggaccatgacggtcacgaggccggagccgatctgctgcttgccgatcagatgaacattagctgccttgaccatggcatcggctgcttcgacagcgccgatcaggccgcgggtctcaatcataccaagagcgagtttcataggttatttcctccgtaaatcaattctgaataaatcagccaagggtgggcaggatgctctccacgtcgtcgtgcggggacgggatgacatgggtgccgtacagctcgccaacgcgcttcgcggcggtagcgcctgcatcgacagcggccttgacagcgccgacatcgccgcggaccatgacggtcacgaggccggagccgatctgctgctcaccgatcagatgaacgtttgctgccttgaccatggcatcggctgcttcgacagcgccgatcaggccgcgggtctcgatcatgcctaatgcttctttcatgataaaaaacctccaatgattgtatatgtgaaaatatttttacgcttaataaagggacttgacgatatcgggatgcgggtgcgggatcacaacgctctccgacagcaggcccttgacctcgggcatgccctcggcagcatgaatggcagcgcgcacggcagcaacgtcgcccgtcatggtgatgaaggacttgccgcccaggccgcggccgagacgaacgtccatcaggtggatatcagccgccttcacggctgcatcggctgcgacaacggctgcgcagaggctgtaggcctccataacgccgatggcagcgacctcgccgatctcgttgcaggcgttgatggcgcggggcacctgctcgtgcacatgggagatcaccatgctgtcgatcaagcgctgaccggcctcggccttgcctgccgcgacactttcgctgacggcggagacctcgcccgtgacgatcacgatgtacttgcccgcgcagaccggctgcgccgtgacaagctggaccgtcgcggccttgagcatcgcatcgccggcgttgacgccgagcgggatgctctgaacttcaatcatacccagtgcattcatttggcagccttccttatctcaatgtagtcggcggtgatgtccgtcacgacgccggagatgctggcatgcatcttgacgccgagcttcttctccgcgatgtcggccacgagctggttcttgcggaccttatccccgaccgcaacaaccggaacgctcggagcgccgacgcccatgcgcagcgcgatgcgcacgcagctcgtcgtcaggggcttttccgccatgggcgcgggaacgtcgtattccgcgataccgaggcgcgcgatcagacgctcgaccgggaccttcttgttctccaggccgccgtccactgggccgtagacctccttgcgggggcgaacgccgtttgaggcaatcgcggacttgagcgtctgcatcacctgcgagggcttcaggccgaagttgcaggcgtaataggtgcacagtccgcagttgcagcaggagaagatgccattgaactcgccaagcaggtcgccgccgcttgccagactgcgcatggccttatgcggctgcacattcaggccgagcgcgttgcgcgggcacatctgcgtgcacatggagcactggcagcagaccgacatgatgagctgcaggttgagcttcggagacttccgctccagcagagggtgatccttcgggatggccagcaggccgccggtcgtcttcgtcaccgggatgtccagcgtgtcgaccacccggcccatgcacgggccgccgatgatgtatttgcagtcgcaggtgggaccgccggcggcgtccatgagctcctgcagggagatgccgaccggaacgcgaagcgtgacagggttcttcaccgcgccgccgaccgtgacatatttctccgtgaccttcttgccgtcgagcgcggcggcaatattcgtgagcgtgctgacgttgcacacgaccgcgccgacatccagcggcagaccgccggtcgggacgacacggcccgtgacctcgtagacgatctgctgctcatcgcctgcaggataatagccctgcagcagatgcagctccacatcgtccgcgtccttcagcacttcctgcaacgcggcgacggcagcgtggtaatgctccttcaggcagatgaccgcgcgcttcgcaccggtgaattccttcacggcgcggatgccgcgcacgacatcggctgcgaaatactgcatgacctgctggtcgacccgcagcagcggctcacactcggctccgtttgcaaggacgaattcggccttgcagttgatctttacatgggtgggaaagcccgcgccgcccgcgccgagaataccggcgtcgcagaccagtttattcagctccatcccgtccgcctcagatgatgcggaagtcgcccttcagcacacagcgtcttgcgcgcgtaaaggacttcgcgctcgtcaggccctcgccagtcggagtggcgatggtcagcgtggtgtagccctcgccgccgaagcccagaccggagtaggacggggcattcttgacgaagatggtcgtgttcatgcggcgagccgcacgggacatgttgtgcacgttggaggaatggatcatcgcggagtgctggcagccatgctctgcgcggaaggcctcgtccagcgcctcgtcgaagttgttcacgcggaccatgccgagcaccggcatgagcatctcgacctcgacaaacggatgatagcggtcgacatcggcgatgacaagcacgggatcgccgctgaactgcacgccgctctcgcggaggatgtacgttgcatcatggccgacaaacttgcggttgatgacatacttgccgtccttctggatgagcacggtgcggacgatcttgtcgatatcctcaccgtagacgcggtaagcgccgcacttttccatcgtgttcatgagggagtcggcaatggagttgaccatgaagacttccttctcggccacgcacaggacattattgtcgaagctcgcgccgtcgacgatgtccttggcagcctgcgcgatatcggcggtctcgtcgacgatgacagggggattgcccgggcctgcggcaacgcacttcttgccggacttcatggccacgccgacaacggcctcgccgccggtgacggccagcatcttgatggccttgtgggtcataatgaccttcgaggtatcgagcgtcggctccttcgcagcggtcatcaggccgttcgggccgcccgccttcacgatcgcctcattgagcagctccatggccttctgagaggcgcgctttgctgccggatgggggttgtacaccacggcgttgcccgcggagatcatgctgatggagttgttgatgatggtggcggtggggttcgtggacggggtgatggcgccgatgacgccatagggagccgtctcaacgagtgtcaggccattgtcaccgctgaacgccgtgggatgcagatcctcgataccgggggtcttgttcgcagcgaggaggttctttgcgatcttatgaggcaccttgccgtagccggtctcctcatgcgccagaatggcaagctcttcggcatgctcccgggcgcagacgcgcatggcctcgatcagcttgccgcgctcctcgagcgacatgtccatgagctgatgctgggcacggatggccgtgtcgatcgcgtcatgtacatcgtcgaacaggcactgcacgccggtcggggcaaacgagcccgactcaaagctgctgcgtgtctgcgcggcaatttgctggatctgttctttcgtcaatgccataacatatcctcaactttctaatatagattcgcgtttgctggttttctgaaatcaacctctgctgaatttctcaaaaatccgggagccgttgacgtcgaccgaatcaatgatggcaacaatgctcaggtcgacgggcttgccctccgttacggccgtctggcgcgacgagctgccgctgacgaccatcacgacttccccctcgcctgcgccgacggcgtcgatggcgacgagaaggccgcccttttcctgccaggtctcaatgtcgatgggcttgatgagctgaagcttcagcccattgagcttttcggccttgttcgtgctgacgacggttcccttcactctagctagctgcatgtgttgtttctccttcataccgcaggatcacatcggtcgcggccagtgcgtcgcgtgcggcgggtgtgatgatcgcgccgctgcggcagcggatcgttttgctctccgtcttcgcggcgtccagaacatccgcttccgtaacgaggtccgtgccctccggctcctgtggagccacggcgaaatacgggcagaccgtaacggccatctgccgcagcgtgtcgatggcctcggcggtatctgcaaggaaggtgttgcggcggaagcggggcggctcatagtcgagatacacccggacatccttctgccacagaatagcgcgcacgagcagatgcgacagcgggtcgccgtcatcaccggacgcgatgcggcgcagcagctcgagccgcggcgagacgaggatgaccgttttggcctccttcacccgctcgagcagcccgcccggctccagctttccggcgtagagcagggcctcgtctgcaaacgtgttcgtctccgggatgctcacgggcgtgtaggcgacgccgaactgctcgttcagcgtctgctgcagcttttccgggaaggagacactgtcggccagcagcacgagcacctgctcggggtgctgcctgcggcgctcctcctgcgcaatgcggcggacgacctcggctacgatcagctctgttaacttgtaaagctgtgctcgatccatagctacctcttacccgcagccggtcagggcaggacctccatcatcggggtcccgcgcatggcgatggcattggcctcatcggtgtcgatgtggacctccatgtcatggcccttgccactgcggacgatcacattctcaaatacgacggcacgctcaccctcggcgcgcaggcggacgggctggccgtcccgcaggccgaagagcgcacactgcgcctcggaaagatgcagatggcgtgccgcgatgataacgccctcggaaagctcgatctcaccggcagggccgacgagcctgcagcccggcgttccggccgttttgccggacatgcggacgggcgccttgatgccgagcttgaacgagtcggtcatggcgatctccacctgcgtggcgctgcgctccgggccgagcacgcggaccttggcaagctgccccttcggtccaacgatggtcacctgctccgtgcaggcgtactgccccggctgggacagcatgcggaacacggtcagctggtggcccggtccgaacaggcgctcgacatccgcatggcacagatgcacatggcgcgcagacgatgcgaccggaacgaagatccggcccgttttgcggaagacctcttccgaggtggcaagctggacctttctctggacctcagatttctccatgccgtgcctcctcatttctgcaccgtcttcaggacgatgccctcgtaatacgtcttggcaaggatggtcttgacatcatccagagtcgggcggacgatgtttgtctgcgtggcggtgtcctccagcgcatgctcggccagcacgtcgatgtcttccatgcggaatttcgtgtcgcagagcttcgggatcttcacatcgtcacacaggcggcggacggcctcaatagccttcttcgaggcctgatcgaccgaaaggttatcgcacttctcgcccatagcctgcgccacggtggcaaggcggcccatgcagtagggacggttgtactccagcacacgcggcagcagaatagcgtttgccaggccgtgcgggatgttgtagaagccgccgagctgatgcgcaatgccatgcacgaggccgaggcctgcattcgagaaggcaagaccggccatatactcggcccagcacatattcgtgcgggcgtccatgttcgagccgtcgcggactgcgtcgcgcagcgagccggagaccaggcggaccgcctcaagggacagggcgtcggtgtagggcgtgtgcgtattgcagatgtaggcctcaatggcgtgcgtcagggcgtcaataccggtggcagccgtcagagaaggcggcatgccgaccatgagcatcgggtcgttcagagccagatgcgcaaggcagttcgtgtccaccatgagcatcttcgtcttcgtctcttcgtccgtgacgacataggcacgcgtgcactcggagccggtgccggccgtcgtgttgacggcgatgatcggcgtaccgcgctttttcgacttgttgtagccgttgtaatcctgaatctttccaccgttggcggacaggatgctcacggcctttgccacatcgatcggcgagccgccgccgatggcgatgatcgcatcgcactggtgctcctgatagaaatgcagcgcgtcataaacgatccgggtcgtggggttcggctccacgccgtcatagaccacatactggatgttcgcattatcgagaacagccgtgacctttccggcggtgccgaccttgataaggcccttatccgtcacaacgaggacgcacttcgaactcaggcgctgcagaaaatgcgggatcttggtgatgccgtcgcgcccgataagcgttctgcgcggggcatacagttcaacaatgccttcatttctcatagttgctatctccatttgtttgccgggcgtatcgctcaaaatcgctcaagcatactacgcccatctttacggcatctatcatcccacaaaattggcgatctgtcaatacatcggcccggattttttgtttttcggcgaaatagccaaaatcatttgaaaatattttcacataccaaggcccgattgcaaaaacccgcccagatcttccggtttcccttccatccgtgcgggtttcaatcgctcatatttcgctcattcaaacggcagtaccgtgcaggggatcccctggcgggcataaaaatccagatacttctgcggtgcgccgctcgttgtgatcatgcggcaggtcttttccggtggaaaaacgctggcaaaggcgcggcggtcgtactttgcgctgtcggccagaatgtaaaaccggcgcgtcatgcgcgcaagctgggtgtagaggccgatctgattcttgttgttcacggtgtagccgcgctccagatcgatgccgtcgaccgtgatgaagaccttgtcaaagtaaaagccgcgcaagacatggctgatgtccgggtccagcgtctcaatataattcttccctgcgtggacatcgccgcccagcagcgtcacggacgcattcgggcactcggccagctccagcaccgccgtgatgctcgtcgtgacgacggtcaggcgctcgacgttctggagcatggacgccagcatattgcacgttttgcccgcgccgaggaacacggactcccctgccttgaccgaggccgctgcctcctgcgcgatgcggtatttttcctcatccgtatgattcaggatcgccgttccctgcagatagcccttcggctcctcctttttcggaagctgcaggccgccgtgcgtgcgctgagccagtcccttttcctgcagcagctcaaaatcgcgccgcgtcgttgcgacggatgcccccgtcaatgcgcaggcctccgtcagcgcaagcgagccctgctcctgcagccgctccagcagccgccgctcccgttcccaagctttcatactgcacctccgtagccagagcgttaatttcgctcataaatcgctcataagcagtatagcacgccggaaggccactgtcaatcccccattctgaaaaacaactccgggcggccgaagggccgcccggagagaagaccttcttcaattgctgtcgatgtggcgctggatgcggtcgatgatcatttcgagcgcgaccagattcttaccgccctcgagcacgacgagatcagcattttttttgctcggctccacgaactgctcgtgcatgggcttgaccgttgcaagatactggccgagcacagaatcgaggctgcggccgcgcttggcaacgtcgcggcggatgcggcggatgaggcggacgtcggcgtccgtatccacaaagatcttgatatccatctgatcgcacagggcgcggttctcaaagatcaggatgccctcgaccagaatgaccttgcgcggctcgaccgtgacggtctcgttcgtgcgggaataggtcgcatagtcgtagacggggcactcgatgctgtgcccggccttcagctctttcaaatgaccgatcatcatgtcggtgtcgaaggcgtccggatgatcatagttgagcttgcggcgctcctcgatggtcagctcgtcatagggccgatagtaattatcgtggctgagcacggtgacatcgtcctgaaagcgggcgatcaggttcttcatcagcgttgttttgccgctgccgctgccgcctgcgatacccagcacaatgatatttgacattctatttctcctctatcgaaataccgggctgcgcatgtcccggtgcaaaggattcagcttgtcaaaaaagtccctttggacttttttgacaagctgctttcagaattgcaaaattaaattttgcagcatgattttgcaattctgccgctgcggcgggttatttgacgtgaaaggacaccctgacggtttcctttcacgcttttcttccctccgaaactttcggctgtgcaggttttttgacagtctgggattctcctgcccccgaaagcgggagcaggagaaccggtttgaacaggactcagcgctggcctttatcgtaggggatgccctcagccttcggggctctggacttcttggacgtgaaggccagaacgatgagggagacgaagtagggcagcatgttgtaaacaacgctgggcatgttgagcttgagcaggaagtcaaagccggagtagacattgcccaaagcgcggaagaagccgaacaggatcgcagccagtgcgatcttcaccggactccagccgccgaagatcatgacggcgagggccaggaagccgaagcccgcgacgccgtattcaaacttccagacactgacgccggccgtgatgaaagcgatgccgccgaggccgccgagcacgccggagatcatgacaccggcataacgcatcttgtagacgttgatgccgacggagtccgccgcctgcggatgctcgccgcaggcacgcaggcgcaggccgaagcgcgtcttatacagcacagcgaacgagacgatcagtgcaatgacggcaaccagcatgaaccagttgaactcgaatttgccgatgttcaggatgaagagcttcttcggctcgatgtaggagatatcggaggaaacgtcgttgccaccggacatcgacgcgttcatagccttgaccgcgacagtcgcagcagccgttgccagcaggttcatggccgtgccggtgatggtctggtccgcgcggaacgtgatcgaggcaacggcgagcagcagcgaatacagcaggcccgccgcagcgctggcgaggatgaccgtcaggaccatgaccggtgcgccgacggagaccggcaggaatttcatgacaagtgcgccgccgagtgcgccgatgaccatgatgccctcaaggccgatgttgatgacgccggaacgctccgagaagcagccgcccagggcgacgagaagcaggaccgaggcaaaaatgatcgtatactggatcagcagtgtcatttctgcgcacctcctttctgttcttccgcaagcttggcgcgcgcggcacggcgctcatcgcccttccgcagcgaggcctgcaggcgctccttcaggaagccgctgaacgcgcacaggaagatgatgaggctggagatcaggctggagatctgcggggaatagaccgtcaggtcgacattgccgccgccggtcgtgatatgctggatgaagaacgaggcgagaatggagccaaaggggctcagaccaccgaggaaggcaacggcgatgccgttgaagcccatgcccggaacggaggagatcgtcgtctcccagtcctcgatgccggtcagatagtacaggcctgcacccataccggcaagaccgcccgcgatgaccatcgtaaggatgacgttgcggttttccttcatgccgcagtacttcgcagcgttaaagttgaagccggtcgccttcagctcatagccgaacttcgtcttgttcaggatgacccaaacgaggaccgccatgaggatagcaagcgggatggcaatggtcacggtcttctcgcctgcaaacagcttgctcaggccgaggctcgggatgagagccgaggggttagccgccgtcagggacttcgtataggggctgttcgggtgcttgaccgttgtcaggatcaggttcgtcagatacagggcgatccagttgagcatgatgccggagatgacaacgttgacattgcagtaggtacgcagcgcaccggaaatggcaccgaggaacgcgccggcagcaatagccagcagcaggcacaggtaccacggcagctgccaggcgatcgcggcataaaggccgacgcatgcgcccgcgacatactgaccggccgcgccgatgttgaacatgccgaccttataggcgaacaggatggacagcgcacacatcagcagcggcgccgtgcggacgagcgtctggccgaaatacttcatgcgcagcttgcccgccggataatggaagaaattcttcagcagggcggacatggacttccatgcgcccgcggggttgatgatgagcaggacgacatagccgatggccacgccgagaatgatgcacagcagagaggtcagaagggtctggaagctgtcgctgcgcagcagagacttgcgctttttcatgccccgtgcacctccctctttgcaccggccatatagaggccgagctcttcaacagtcgttttcttcggatcgagctcgccgacgatctcgccctcgtacatgacgaggatgcggtcggagaggctcatgacctcgtccagctccagcgagacgaggagaacggctttgttcttgtcgcgctgagcgacgatctgcctgtggatgtactcaatggcgccgacgtcgaggccgcgggtaggctgcacggcgatgagcagctgcgggtccttatcgatctcgcgggcgatgatcgccttctgctggttgccgccggacatggcgcgcgccagtgtgatgggcccctgaccggagcggacgtcgtactggtcgatgaggtgctcggcataggtacggatgttcttgcgcttcaggaagcccgcaccgttgacgaactgcggctcaaagtagcgctgcagcacgaggttgtcctcgagcgtatagtccagcacgaggccgtgcttatgacgatcctccgggatgtggctcatgccgaggatggaacgcttgcggatctgcatattcgtgatatcctgaccgcacagcgtgaccgtgccctctttcacaggttcgaggccggtcaggccgtagacgagctccgtctggccgtttccgtcgatgccggcgatacagacgatctcgccctcgcgcacgttgaacgagacctgcttgagggcgttgttgtggtggagcttcgaagcaaccgtgaggcccttgacctccaggatgggcttgccgggcttggcaggctccttgtggacggcaaattccacatcgcggccgaccatcatgcgggaaagctcttccttcgtcgtgttcttgatgtccacggtgccgatgtacttgcccttgcgcaggacagtgcagcggtccgccacggccatgatctcgttgagcttgtgggagatgaagaggatggacttgccttcctctgccaggccgcgcatgatgtccatgagctcttcgatctcctgcggcgtcagaacggcagtcggctcatcgaagatcaggatctcattgtcgcggtagagcatcttgaggatctccgtgcgctgctgcatgccgacggtgatgtcctcgatgagagcatcggggtcgacgtgcaggccatactgctcagagagcttcatgaccttttcccgggcctgatccttctgcaggaagcccgccttgttcggctccacgccgaggatgatgttttcaagcaccgtaaagcactccacgagcttaaagtgctgatgcaccatgccaatgcccagtgcattggcatcgttcggatcattgatcttgacttccacgccatccttcttgataatgccctcttccgcctgatacaggccgaacaggacgctcatcagcgtggacttgcccgcgccgttttcgccgaggagcgcatggatctcgccatggcgaagctggagcgtgatgttgtcgtttgcaatgataccggggaaccgcttggtgatattcagcatttcgattgcatactgttcgttacccaaaccgattgcctccctctcttatggtttcagattctattataatcaattccatgtttgatttcaaacacaaaaagctcccgcagctaactttttcatttttttatgcatttcaaccaaaagtagtattttatccctggcgtaagcatgtattttgcagcattttgacggatcgaaaaaggacgggtcaaagcccgtcccagatatgtcgaacaattttttacagccgtccgccgctcagcgcatgcttcacccttttcttgaacagcgcagcatcgcgtttgccaacgccgcggcagcaatcacggtatcgcggcggggcgcgctgacctcgatcccgacggaggccgaggtcacggcgctgatatccggcacagataacggctgacctgtcaaaagcgcctatcccgaagtccgaaactaaaagaggagatcgtaacgatgaacatgcccaagcttttgccctcgctgatgtgcgttgactttacccgtatggcgcagacgctggaggtttttgaacagtgcggcatcgacgccctgcatgtcgatatcatggatggagaattcgtgccgaactatgcgctgggcacggatttctgcaggcagctgcgcaagctgacgccgatcccgctggacattcatctgatgatctcgcggcccgatacgaagctctcatgctttgcgatccagccgggcgagtatgtctcggtgcactgggagagcacgccgcacatccatcgcacgatcggtgcgatcgccgcgctgggcggaaagccgatgctcgcgatcaatcctgcgacgccgtatgatgtgatccgctatctgctgcccgatctggcaggcgtgctggtcatgacggtcgatcccggctttgccggtcagcagctcgttccggccatgctgcagaagctgcgcgatctgcgcgcatttctggacgaaaacggctacccggatctggagatcgaggtaggcggaaacgtcagctttgaaaatgcggagaaaatgcggcaggccggggcgacgatgttcgtcggcggcagctccagcgtcttctggaagggcgcttctctaagcgaaaacatccagagaatgtacgccgtaataggaaagcgcaatattgcagttctgcaggcagtaaaataagataagcaagaaaatagccgggctgacttcgatagagtcggcccggttttcggctgagcagctttcgttgtccgaacgcgtcggcatacaaaaaggacgggccgaagcccgtccttttgcggttccttatggggaattagcccttgatgttgccgaggtagttcacagcgatgttggagacggtcggctcgacagtggtgtcgttggagaccttcaccttgccgttgaacatatcagcgacgagagcagtgtaatcctcaacggtgaacttgccgtctgcccactgcgtggtctcgagcgggagctggacatagttcgcggaaggatcgtcagcagagacgaggcccagggtctcgatcttgccggcgtagttggcccagttgccattgacaatgacatcggtcagggtgtcgatggtggtgggagcaaggcccttcatagcggaggtaacagtcatgccttcgccgtagccgccgtcgatgacagcggactggtcggtgtcgacgccgatgaccttgccgttgaccttctgagcagcctcagcagcagaggtgaagatgccgccgccgcaagcgaagaccagctgagtgccgttggaataccaggtgtccataacagcggtgatgtcgccgtcgccgttgaactggccgccgtagatgtagttgacctcaacgccctcaacacccttggcagcagcagcggcgtcaacgccctgcacgaagccgtagccgaagcggataacagcaggaacagccatgccgccgaggaagccaagcttggtgtagccgaggcagacagcagcgtaaccggccatgtagccgctgagctcttcctgataaacagcgcagtaaacgttgctcaggtcgacgtagtcagcgaggttccagttgtcggggttgtagtcgtaggtctcaccggcgttggcaacagcagcctcgagcagatcgcccttggcgacgtccagcgcgatgaacttcacattggggtactgcggagcgacctcaacgatggtgccgccgaaggcatagcccggcatcacgatgacgttgtagccgtcagcgatggccagctcggtggaagcaacacggccggcagtggagttgtcggtgggcttgtagtacttgaagtcatagccgttgtcgccggcaaacttctggcaagcctcataggtggtctggttgaaggactggtcggtgatgtcgccgtagtcggtgatcatcgcgatcttgacgtcgccgttgttgtcatcgggctcagtcgcatcgctgttgtccgtgctctcgttggtcttggactcatccgtaggagcggtggtgggtgcatcggtctcgctgtcgttgttggcacaggccacgaacaggcaggagatcatagcaagaacaaggagcattgctaagagtttcttcattttcttaacctccatttattttggctcaaggccgtaagcaattattacacaatttggcgtgaaaatcaaggcgctgtaaaatttttgtgaaaagcgccaaaaattaggcctccatactgtcttttgtaaagccgaacggcagcaattcgggcagttttacggtgaacacaccgccgccggccttctgcatatggatctcgaagtccgggccgcagaattcctgcatgacctgacggcacacaccgcacgggccgctcggctcgtcttgagcctgcacaggcttcccggcaggaccgccgaccacggcaatggcggcaaagtcatagcagccgtcgtacaccgccttgaaaaaggccgtgcgctccgcgcagtttgtggcggagaagctggcattttcaatgttgcagccctgatagacacggccgtccttcgtcagcagtgcagcgccgacagcataatgggaatacggcgcataggcgcgctcgcgggcctcatgcgcaagctccagcagtttttccggtatcatggcgatctcccctttcagaaattacaggatctcggtggcaaagctcgtgccgggcgtctgatacggaacaccgagcagctccgtcacggtcgcggcaatgtccgcaaacgacttgcgcgtgccgagattcacagggcgcaggtgcttgcccgccatcagcagcggcacatactcgcgggtatggtccgtcgtgcgggtgtaggcagggtcgcagccatggtcggccgtgatcataacgaggtcctcgtcgccgagctgcggcaaaagctccgccagccagccgtcgaattccgtcagagctgcggcatagccgtcgatgttgcggcgatggccgtagagcatatcgaaatcaacgagattcacaaagcacaggccctggaaatcgcgcttgaagtagtccatggtcttggcgaggccgtcggtgttgcccttcgtgtagacatagtccgtcaggccgcggcctgcgaagatatcgtggatcttgccgacggcaaggacgtcctgaccggcggccttgatggcgtcaagcatggtctctgcgggcggctcgagcgaaaagtcgtggcggttggacgtgcgggtgaagccgtccttctcgttgccgatgaacggacgggcgatgacgcggccgacgccatgctttccgacgaggatcttgcgggcgatgcggcagtattcatacagctgctccagagggacgatgtcctcgtgcgccgcgatctggaacacggagtctgcggacgtataaacgatgaggtctcccgtgcgcatatgctccgcgccgtactttgcgatgacctcagtgccggaccagggagcgttcgccagaacgccgcggcccgtcgcctcgcggaagggcttgagcacttcctcggggaagccgttgggataggtgggcagcggattcggggaaacgacgcccgcgatctcccagtggccgatcgtggtgtccttgcccatggaggcctctgccatgcgggcgcaggcgcccgtctgcgcgggatccgtgccgaggaacgacaggccctcgatgttgccgaggccgcagtgcaccatcgtggggatgtgcagcttgctggacgtggaacagctcttgagcgtgttcacgccgaaatcaccgaactttgcggcatcgggcatttcacctgcgccgcaggaatccagaacgatcagaaaaatgcgcttcattttggtatttgctcctttttgtcgtgatagaaatttgagaagagaaagaaaataaggggtcaaaattcggaagcgttgttttacgcttccgaattttttagattacttttccagtttgacggccgtttcgagcgcgacctccatcatctgcgtgaaggacgtctgacgttcctcggcgggcagggcctcgcccgtgagcatgtgatcggagatcgtgcagatgcacagggcgttcttcttccagcgggcggcggtcatatacaggccggcagcctccatctcgcaggccatgacgcccatcttgatccaggcgggaacggtctgcaggacctcgggcatgccctcgtcgtcgttatagaagttatctgttgacaggacgttgccgacgtgatacgtcgcgccgacctgttcgcaggacgcaacggcgcggcgcagcatctcataggaggcaatgggtgcgaacgtgccgtcaatgtgatactggtgcaggaagttcgaatccgtacacgcgccctgcgcgatgacgatgtcgcggacgtggatatcggggttgatggaaccggccgagccgatgcgcatgatgttctgcacgccgaaggcgttgtagagctcataggaatagatgccgatggacgggatgcccatgccggaggccatgacggagaccttcacgccgtgataggtgcccgtgtagccctgcacgccgcggacgttgttcacgaggcgggcgttctccagaaaatgctcggcgatgtacttcgagcggagcggatcgcccggcatcaggacggtctgaccaaaatcgtcgggcgtggcgttgatatggggagtcggataattcataacaggatctcctttcaaaattcagcggttctttactttgcggtgctcgcggatgttgcggatccagcacttgtggcacatggcaagataacggtcgttgccgccgagcaggagctgagcgccctcggtgacgatgcagccctcgctgtccagccgggcattgaccgtggccttggccccgcagtcgcagatggccttgatctccgtgatggtgtccgccacctcgaacagcctgcggctgccgtcaaacagcttgcactggaaatccgtgcgcaggccgaagcacagcaccgggatgttctccacatccacgatgtcgcggagctgatcgatctgcgcaggcgtcaggaactggcactcgtcgacgatgatgacgtccgtcttttcgcggctgcggtagagctcgtaaatgtcgctgtgcggcggaacgacctcggcaggggcctccagaccgacgcggctgcgcaggatgatcgcgccgtcgcgctcatcggccgcaggcttgatcagccagacgtgcatgccgttttcctcgtagttatacttggtaatgagcgcctgtgctgtcttggacgagcccatcgagccatatttaaagtagagctttgccattggctatcccccatttgctttgagtaggactattataccggattgtgtccatttatgcaagcagaaaagcattcttgtaccgcgtgcattgacaaggcacagccgttccgttatactgaaggcagaatcgaatcgagggggattttccatgttttgtccgaaatgcggagcgccgaacgacacctccgcccgtttctgctctacctgcggcgcggcgatgcctgcgcagcagcccatgcagagcacacagccggtcccggttatcgtgcagcaggtccgcccggcgcccgtgcagcttgtgcctgcccatccgacggcctatacccatgccctgacgggctgcggccggtcgctgtcctacctgtttgccgccattgccctgaccgccgtcgcggtgctgcacctgctggacctgctgctgggcatttccggcggcatcgagagcgtccggacggccatcgacgcaagcccgagcggcctgatgcagttcctgcaggctgccttctggctgccggagctgctgaccgtcatcggcgtgtggtctgctgcaggggcctgcagaagccgcagcgcgcagatctcaaccggcgggctgaattgcctgcgcacggcggccgtcttccgcatcatcttcgaggcacttgagctgacgttcctgctgatctatctgctgttttacagcgccgaggatttcttcagcttccactttgccggcgaagaatacgtcgtctttgtcatggccggcggctgtgcgctgaccattgtcctgcagggctgcatcatcgccgcactgaactccgcaaatgaggcagctgtcaaagcccgcgccacaacgctcccgccgatgctcctcgccgtcatcgtcatggcagaggccgccatgcagaccatcggtcttgctatgtactggggcgcgccgtatctggactacgacatcgccctccagctctacggcatgttcggctatctgaacggcaatgttctgctgcatatgttctccctgctcctcagcgccgtttccggcattctgttctccgtcgtcacgctgcgctaccgccgcgaggtcagcgccgccatggaagcggaatgagctgagaacggcaatcggactgatggattggcgaaaaatatccgccatccgccgaaggagatcgttccggggcttccgaaacaaaaactgtggaccgttcgtcaggcggcccacagctttttttcgggacgtgtcccattttcaggaggtgatttttgctgattacgatctatttgtgctctggcgtggtcgatctatcaggcagtgccgcacagggctccggcagggatcgccgtcctagtgcggacccgcccgttacacccgggatcaaccggccagcgtggcaccaagctttttgcactgcgcaagcgcgtcgtcatccggcgcttcgcagcagataacactctcacaggcgagcaccgcgccgtcggaacggcaggtgtcttcccatgtgcgcatccattcgccgtcgccccagccgtaggagccgaacagcgcgatcttcttgccggacagggcggactcgcagcccgtgaacatcggctcgaactcgtcttcctccagtgtttccgcgcccatggcggggcagccgaaggcaatggcatcaaattccgcgaccttcgcggcagagaactgatcgacggtcagcgtgctgacctccgcaccggcctctttggctccctcggcgacggcgttggccatctgctcggtgttgccggtaccgctccaataaacaactgcgatcttactcatgatccatgatcctttctgttttgaatttttatcacggcagctccggctcagacggccagagcgagccgctccaccccggtcccacgggcccaggaggccagatagcagcgcgtgcagcgttcgaacttgtcgaacagggcgcgcgagcgctcctcgtctccgtagaccttccagtaaccggtgaatttgtaatttcgggtctcgttttcaataaagccgcgcacgtcctccggcggatagccgaggaacaggccgatctcgtgcgggaagccgtccttctggcactgcagacggtccatcaggcagcgcaggcagccggaaggctccgtgccatcgtaaccgctgccgttgagcaggcaggccgcatcctcacaggccaggtcgcgcgccagcgccttcggccggtagaggtatatgagcgcccgcccgttccagatgcgcagcggaagcatccgcaggcccttcggggcaagagaagtgttccagtggcgcagctgcccgagcagctctgcctcatccggcgcatcgcagcagaacaggctggcggttttcagcccggcgagcgtcggcgcgcagaagcgaatgatctgatattcggacatatcgtctcctccttctctttcaggatgccccgttttcctgcagacagcccggtattttgcggttagtctcctctaacccgtgtgctgaaaattatgcttccaatgcatcgggcagaaacccggcaaggagaagcatatttcatcggggtcttgcttctgtgggcgctcccgagcctcagcagtgtgccgcgcaggcggacgactggcacagacggccaagatggtccggcggcagctctgcaaggaaggcgcacagcgcggcgcgcagggcggcctcctcggaggagacgcggtgcagatagcccgccagaacgtcgtagcaggcggcgtactgatccgccaggctgcggccctccggggtgaaatgcaccatgccgtagtgattcttttcaatgagattcttttccttcagggcattcatcatggcatggacgctggccttggagatgccgagcgcgtctgccacgctgacacagcggatctcattgctcggaccgcacagactgcgcagcgcgagaagatatttgatgttgcttgcagaaagcgcttgctgcattccggttccctccgctgagtgttttgttcctgcggggcgggcggacccgccccgcagacggttcagaggtattatttcgagtggcacgagccgtgcagcgcacagtgcccgcagtcacagccgcaggaggtctttccctttttgcggctgcgcaccatcgaaatgatgatcgcgaacacgataccgccaagtgcgaggcacacgagaatcgtgggccaataatatgctaaccattccagcatgagaagttcctcctttcaggaaatgcgatgattatttctgtgcgagagccttcgcctttgtgctcaggtgctccgcttctttatacgggcggaagagcatgtagcagatgaagccgatgagcaggacagcgacgatgatgccgaggacattgccgtggccggtgaacaggcagccgagctgatagacgatcagggagatcgcataggcgaagcagcactgatagccgatggcaaaccacgtccactttgcgttgttcatctcgcgcttcatcgcgccgatagcggcgaagcacggggcgcacagcaggttgaagatcaggaagcagtaaccggccagcttggtcatggagacgaagtccaggacgccgaagacgccgacgacttcttcctttgccacaaggcccatgacggtcgcgattgcggcacgggcattgtcaaagccaagcggagcaaagatgaacttgatggcattgccaagacggccgacaaggctgtagtccagttccatctcaaggtcgaacacgaacttgccgtccacgacgccaaagacggagccgagccacatcacgatggaggacagcagaatgatcgtaccggccttcttgatgaaggaccagccgcgctcccacatgctgcgcaggatattgccgacggtcggccagtgataggcgggcagctccataacgaacggagccgggtcgcctgcgaacatcttcgttttcttcagcatgatgccggagacaacgatggcggcagcgccgaggaagtaggcgctcggagcgacccaccatgcaccgtggaacagagccgtggcgatcatggcgatgatcgggagctttgcgccgcaggggatgaacgtcgtcgtcatgacggtcatcttgcggtctcggtcattttcaatggtacgggaggccatgatgcccggaacgccgcagccggtgccgatgagcatcgggatgaaggacttgccggacaggccgaacttgcggaagatacggtccatcacgaatgcgatacgggccatgtagccgcaggattcgaggaaggccaagaagatgaacaggacgagcatctgcgggacgaagccaaggactgcgccgacgccgccgacgatgccgtcaaggatcaggccgttgagccaatccgggctgtggatggcgttcaggccgttctccacgaggaccgggatgccggggacccacacgccgtagtcgctcgtatccggagcggactccatggcggtgtcatagacctcggagatgtcatagcccgcagcggcgagggagtcgccgtagctgccgtaggcttcgtcaaatgcgccgaagtcctggtcgttgatggcgtccagaacgtcctgcgcgccgataacgccttcgtcagcggccttggagacctctgcgacgacctccggtgtccagatgttctcttcggcgtactcgttgatggcatcgtcataggcgctcgagccgataccgaacagatgccagccgtcgccgaacaggccgtcgttcgtccagtcggtcgcccaggagccgaccgtcgtaacggagacatagtaaacaaggcacatgaccagggcaaagatcggcagagccagccagcggttcgtgaccacgcggtcgatcttatcggaggcggtgagcttgccggcgttcttcttcttgtagcagcccttcatcagggaggcgatatagacatagcgctcgttcgtgatgatgctctcggcatcgtcgtccagctccttctcggcagccttgatgtcctcctcaatgtgcgcctgcacatcggcagagagcttgagctgtgccatggccttctcgtcgcgctcgaagatcttgatggcgtaccagcgctgctgctcctccggcatctgatgcacagcgacctcttcgatgtgggccagcgcatgctcgaccggaccggagaacgtgtgcatcggaacggtcttcgtgccctcggcggccttgatggcagcctcggcggcttccatgacaccggtgcccttcagggcagagatctcgatgaccttgcagccaagctcacgggacagctctgcggtgttgatcttatcgccgttcttgcggacgacgtccatcatgttgatggcgatgacgaccgggatgcccagctcggtaagctgcgtggtgaggtacaggttgcgctcgaggttcgtgccgtcgacgatgttcaggatcgcatcgggacgctcgccgatcaggtagttacgggcgacgacctcttccagcgtgtacggggacagggagtagataccgggaaggtcggtgatcgtcacaccgttgtgcttcttgagcttgccttccttcttttccacggtgacgccgggccagttgccaacgaactggttagaaccggtcagcgcgttgaacagcgtcgtcttaccgctgttcgggttgcccgcaagggcaattcgaatgttcattttgcttcctctctttccggatttcagtgagggtagtttgggctaaccctcctgcaaaaagaaacggggttactgcacctcgatcatttccgcgtcgttcttgcggatggacagctcatagccacggacattgacctcgaccgggtcgcccagcggcgcgaccttgcggacgtaaacctgcacacccttcgtgatgcccatgtccatgatgcggcgcttgacggcgccctcgccatgcagcttcacgacggtaacggtttcgccgaccttgacctgcctgagtgttttcatcgaaatctcctccttttctgtaatgcattgcatatgattgaagtgagagagccgctgcaaatggctcccgggatcaaaccatgatcttctgtgccatttcgcggctgatcgcaacgcgcgcttccttgacattcacgatcaggtttccgccgatcgtgttgatcacgctgacattgccgcctactacaaagccaaggttttccagatgctgccgcacctccggctttccgccgattctctggatgatggcgtcctcaccgggcgacatcagggtcaacggcatcatacgttcgccttctttctccggtattgtgattagcttgtgctaaccgaagtcttttgaaattggttaggtttccctaaccaagagtcattataacgggagggcggccttttgtcaagcccggaatttcatttacccaccgattttgtgtgttttgtatacatgcccaaaagtttgttttgcctaacctctgatttgtagatttttcccagtgcgcgggcagcgaacccgcgatgctttatgctggcaaaaggatgccggatcatgcatcaaatttttaaatatagtagtggaccaattaaattttgtcataaacccggcgggccgtcacgaccggatttccggccagatattcgcgctcgagcaggtcgagataggcgcccggcgtcttgagcccgagcatgaccgtgcggccgatgtccgttttctccagcagcttgttcgtcagggagacgcagttgatcgtcgggatgaagtacgttgcatacggcccgcgctgcacgcgccagaaccgcacgccgccgagcctgcggagccgcccggcaaagcagtcctccggcagagcttccggctgccagggtgacagcgtctgccggaagcgctccagctccgcgcgcagctgcgcggcctgtgcaggcggcaggcggaggctgtagctgatgacgcggcggtgatgcgtgccgatgcaccaccggagatacggctcgcgtggggcggaaaagacgatcccggcgcccaccgtacggagcaggcgctgatgggccggatcataggcgccgtaggtcagcgtccggccgtcaaagcagagctcgcagtggccgacgaggccgatgccgtgcgcggacgtctgaaacaggagctcaaactcctccgtcccctgctgcgggaccgggcccagcggagcgcgcggcagcacgtccgccgtccgctgcggcaaaaacaagctcatcagatccggcagcgccacgcggatcgagccgagcacccgccggacgcggcggctgcggatcgtcagcgcaaggacatcgcagacaagccccgtgccgaacaccgtcagcagcagcgcggtcgtatagcgaagcgcagcgtcccgcagcgccggaacgaacacgatgagcacaaacaggcccgtgccgcccgcagcggctgccatcgccggaaaaaacgcgccccagcggcgcattctgccatagaggatcgcattgactgcctcgaccgtgaccagcagcgtcagatacaccgcaacgaccacggcaaacagccgcaccgacagctgcggcaggagcagcaggcccgcgcccagcagcagctcgacagccgccagcagcacggacatccggccggggcggttgccgcgccgccgcgcgagcagcaggtacataaggccgcgcagcggcaggagcagacccgacagcagcagcacgacatgcgccgctccggcgcgtccggccatcagcgcggggccgaggccgagcatgccgatgccggacagcatgggaagcagcagcagatacagcagagtcatcatgggggtccttcctcccggcaggcgctgcgcgcgtcagcttgtcaaaaaaggcctttcgggcttcttcgccaagctgctttcagaattgcaaaatcagtttttgacagtctgacgcgctgcgcacgttactccgactggatcgactttgcgtattccgagggagacatgccgaatttatccttgaattggcgggaaaaatggtggatcgtggaataattgagctgcgcggcgatctgggagaaattcatcgtcccctcccggatgaggcgcttgctctcctccagcttgacccggcggatatactcgccgggcgaaatattcatctgccggtggaacagcgccgtcagatgcgacgcgctcacgccgacctcgcgcgaaacgatctccacggagagcttatcgcacacatgatcggccacatactgcagcgtgcggctgacgatctcgttttcgtggttcagcgccaccggcgttttcaggcgctttttttcgctgcctgtgtcgcgcagaacggacagaagcagcagcttgagatagctgcggataaaatcgccgctgtaggcgtccatattttcggactcgcggacgatctggcgcagctgggccgcctcggcggacgacaggtcgaacacccggtccggcagccgcgcggcaaactcgctctccagatcaaagctgaccgtgaggaagcgggccgtcatgtccagatccgtatactgcatatgccattgctgcgggccgaacaccatgagctggccctgatgcagctcgacgccgttgccgtccacaacgcagtgcagcgagccgcggtcgacgtacgtcagctcgaacatggagtgctgctcgcccttgaacaggaagccgctctccacctcgcggtaaaacagcgtatagatctcgccgacgcgcaggcggtcgccgagcttgagattctcggccgccgtcacaggctcgagcacctcaagctgcgcgcccgcaggctgtgccagccggacggagcactccgtctgatacggcaggatggcaaactcccgccccgcaggcaggcagaccggcttatcgagataaaaatacgccgtctccccttccctgcgcacggcaagcaccgtcatgcccagctcgaaatccagatagaccggtccggcactctggcggtaaaagcacaggccctccgccgagaaatactgtacggactcctgccactgcgctccggacggaaagccgcggttcggcaggctgtcgcgcagcacgcggccgtagccggaaaaggtcagcttgttcagattttcaaccaaggcgggtccccccctcccgttccgccggctgttattcgaacagcacgggcggatagataccggccgcatgcatggcggccacggactcctgcacggaggcaaggtcctcgcgataggtcacgccgtgccagctctcgtccgtgtggagaacgcgcaccgtagcgcggttggcggcaagctggttgttggcgaccgtcggcagatagaactccgccttcaacgggttaacggacacggactcctgcaggaagcgtgggaactctgccgccagctcgtcgagaatacgcggcgtgaagccccagaagttcatggagacgatcgtatcgccggacagcggggtgaaatgctcgccgtcctccgtaaaggccgcgtcgtcgccgcgcttttcgatgtgcgtgcgctccgtgattccggtaaggtagccatcgcgcagctcgcagacgccgcgggccacggagccgtgctccgtcatggcgttgtgcaggcggtagccgaccatggcataggcattatcggcatgctgcccggtcaggaagccgccgatggccgtgaacgcgccgcggccgtaaaaatcgtcggagttgatgacggcgaacggcccgtcgatcacgtcgcgcgcgcacagcacggcgtggcccgtgccccagggcttcgtgcggccctccggcacggtaaagccctgcggcaggcaggacgtcagctcctgaaagacataggagacatcaaaatacggctcgacaccgcggccgaccttctcgcggaagtcgtgctcgatctcgtgcttgatgataaaaacgaccttgtcgaacccggcaaggcgcgcgtcatacagagaatactggatgatgctgttgccctgcggatcaatgggcgtcatctgcttcaggccgccgaaccggctgcccatgcccgccgccatcacgaccagcgtcggctttttcatggaaatacttcccttctgctgcgttatttcggttttctgcgcggcatccgccgcggggcaggccgcagcgcggcccgctcagtgcgcactattataacagctcttttccaaaagctcaatggtttttgcaaaaaacggcgcatatttcggcaaatattttgcacgttggcttgcatgcgcggaaggatctggtaaatctgcacgcaaaagcgccccggccgaagccggggcgcgcggggatgtaatggagagtaatcactctgccttggcaatgcagatggcgttgttctcggtatcgaggtagaacgtcgccttcggattggccgatttgaccatggccagatcagcctcggtgagcttgtattcgtccgtgccgacgacgagcggcatgcccttagccgggacgcgattatccgcgatatacacggagatcgtatgtgtcagggcgctgtcgacgacgatgcggctcatgaagaccttggcgctgtagggcgtcaggtacacgggcagatccgcagagagcttgtgcacatagacgttggagccgagcttctgggaaacgtcgcgcagatagatgccctcatagttcttgccggctgcagtcgtgttgttggcaaacgtgccgccgtagaagtgcagtgcacccggagacttcaggcgggcgatggagccggagccgtaggacgtgctgctcagcaggcaggcattgtccgtgaacgtgccgccgtagacgttgatcgcagaggcgttgcccgcattcgactgatccatcaggaagatcgcaccgcagcccttgacggagttgttcgtaaacgtcgcattctcgatgttgatcgtgtgcgtaccgccgccgttcacatggaccagcctggcctgattgttcgtgaacgtgccgttcttcaggttcagaacgctgctgccgctctgaccgtacatggcgaaaacggcagcgccgccggtctcgctgttgctggagctgtaggtctggcagttcgtgaccgtcacgtcctcgacgttgaccgtgttcgtcttgcctgcacggctgaacgaccacacgaagacctgagacgagccgcgcatgttgcgcacgaccgtaccggccttaacgttcagcgtgccgccttcatccacacggacaaaggcgctcgttgagcgcgtctgcggggtatacatgcacaggccgtcgagcgtgatattctcgagcgtcagttcaccctcgacccagacggccgagccggtgctgccgttgagatagcgcgaaagcatggcgttcggaatgccctcgagggaccagacctcactcgtgcccgcttccagcgtgccgccgttcataatgtagatgatgttgtcgcccttctccttggcgttggccttcagaatctccttggcgcgcgcgaaggtggcgaccggcgtctgcggcgtcaggccgtcgttggcatcattgccggggttcgtggacatcgtgctgtcgttcatgtagacctcggcgccgataacctgcgcggaaacaacgcagtaacggttgttcgccgcgtcgatctccgccttgtaatacgggtcgagagagttgaccagctgataggccttcgtatcctcggctgtgagcttataggtgccgtagccgatggccagaacgatatccgtgcccatgtagtcgagggtcacgcggacgccgccgcccgtcacattgctcaggggcttggcgatggtgactgggagcgctcctctcttggtgttcagatacaggccggagaacgtcagggcatccttttcggcgccaaagacgacctgagacttttcaagcatggcgacctgatcgtcggggtagcctgcacccggcgtgttgttctcgatcgtaccgccgttgaggtaccacgtcgagctgccggagttaccgtaggcaacaagagccgcataggtgccggagacgttgttgcggatgataccgccgttgagatagccgaccgcatgctgggcaagactgacggcacagcccttcagggattcgttattctcgatgatgccgccgttgatagtcaggatgccgggagcgttggcttcgccgctgctcacgccaacggcggagccgcggtgcgggagggtcgtgccggtgttcgttgccttgttgccggagatgaggccgccgttgatcgtaatatgcgcaccggcggaaccggcgatcgcagacatatagccgccgtagttattgatgatcttggcgccctcgttcatctctaccgtgccgcagttaaagccgctgccggtgacatagatcgcgccgccgaccatacgggacgatgccgcggagttctgcaccgtcgcgccgctgttcaggacaaggcggccgccggcctcgatatcgaggatgtaccagaccatattctgcgtcagcagctccggccacatggttgcgccgccgtcgagcgtgatgttctcgagcgtcagcgtcgcggaagcgtcctcggcctccggctcgatgacgatcatgcgcttcgtgaaggagcctgcacgcatgaccttgccgccctcaagatcggccatggtccacgtcgtgtcctgcgtaatggtcacggtgccgcagatcaggatgacgggattcttgctctctacgagcagcgactttgcacgctcgaaggtcttgacggcgctctcctcggtcgtgccgtcgttcgcatcatcgccgtccgtgccgtcgaggtagatatagtcggagcgatcgtcctcacgccacttggcgtacaggctcatatcgccgcggcagcggtcgatgaagtcgaacatctgcgtcagctcgggatccttgaaccagccggtgaacaggtagccttccttgctcggagaagtcggacggtcgatgacggagccgtagctgtattcctgcgtgtagagcacgttttcgccgtcatagtatgtcacaacgtacatgcgaaccttccaggtcgcatagagtgtcacgtcctcacgaacgggctgggagaagtcaaacggtgtgccgtcctccgtcgtccagctgacgaacgtatagccgctgcgctccgccgtggcgggctcaacggtctggccccagggcacctgcaccttttcgggtgtgaccgtggcgacctgcttggagacgaacgtcacggtgacgatcatgccggtcgtcgtaaacgtgacggtcacatcctcggtgatgtcgcggaggatgaactcggagcgcacgcgctgcagcgtgccggaggaggcggcgacctgatcgagatcaaagccctcgctgtgatcgccgtagaggttgaagttcagccagttcacgcccggctcgagcgtcacggacgtgaccttctcaccgttgaccttggcatagccgccctcgcccttgaacgtaacggtgaagccggtctccggctccgtcggctcagtgggatcggtcggctccgcagtcggttcctgcgtcggctcctcggagggctccgtcggctcggcagaaggctccgtcggctcgggctgctccgaatagtccagcagcacgcagaagacctttgcagcctgcgcgcgggtggcggtctcctgcgggcggagcgttccgtcctcaaagccgccgaacaggcctgcgccggcagcccagatcatgccctcaacggcccaatccgaaagcgcggaggcatcggagaagacgtcgagcttgccgtcctgcgggcacttgttcccgaggaagcgcatggcgcgatacagcagggctgccatctgctcgcgggtcacggggtcgttcggagcgaacgtcactgcgctcgtgccgttgacgatgccgttagccgcagcccaggcaacggcgccggtgtaatactgcccggcggggacatccgtgaacgccgtttcagcattgttgtccgtttctgccttggcatagcgcgccaggatcgttacgaacatggcgcgggtgatcgtctcttccggagcgaacgtcgtgtcagaggtgccgaccatgaggccctgctccgcgacgcgcgcaatataatcgctggcccaatgcccggacggcacatcctgatagacctccgccgcggcagcgccggcaggcagaacgccaagcagcatgaccagaaccagaagcagggacagggcgcgtttgcgaatactcatagattctgtcctttctgttgtgagttacaacacgggatccggagcgggggccgcagcccccgcgcggggatcatcaaatcttcgcagccagccagacaagaagcgttgcggcctcggcgcgcgtcagtgtgccgttcggctgcagcgtattgtcggggtaacccttcatcaggccggagccgacagcccagcgcatcgcggtgatcgcgtaggcattgatcttcgcgctgtcggtgaagcggccgagctcggcacgctcatccgtccggatgcctgcgatcttcacggcgtagcgatagagcattgtcacggcctgctggcgcgtcacgcgggtgtccggctcgaacttgccgccgcccatgccgttggcaacgcccttctgcatggcccagatgacagccttctcatagtagctgcctgcaggaacgtcggaatacgggttctcgcccgtcacggccggagagccggacatgcggtacagcgtcgtgatgagcatggcgcgggtcatgctgtcgttcggggcaaagaggtcggaagactcgccgaccatgaggccgcggccgtatgcgtcatagaccgcgttgaagaaccagtcgtcagcggaaacgtcgcggaacacgccggggatctcgaccgagacggagaccgtctcctttgtctccgggagggaaagctgcagcgcatagacaccgggctttcccgtgagcttcagctcaagcgcagcggtatccttcttcaggtccgcatagcaggcccaggcaaagcgcagggacgttttcgtgctcgacaggtcggcaatgccttcgctgcccagcagggagcgggcgcttgccagcgtcaggccggcaggcatcgtcgcagtcacgcggccatgggacgagccgctgcccgccttgaccgtgaggacgaccgtcgcagagccctgcgcattggccgttacggctgcagtcgcggtgggagagcctgcagctgccaatgccgccgggcagagcccgagcagcaggaagcagacgagcaggcaggaaatgattcgtttcatcatgacttgcctcatcctttcttcagcgtgccgtcacgggaagcgcctcgatctgtgcctcctgcagtgcaggcagggagtcggtgctttccatggcggaggaggtggatgcggaggtgacgatcgtcacgcggtccgttctcaggccgacaacgggccagacgtccgcgttgaagctgccgaggtcggccgccgcgccggtcttgaggtcgaggacggccagctcggactgcgagccgttcaggatcgtggcatagaggtaagcgccgtccgtcgcgatggagcagaagaaggctctgcttgcctcgatgccgaggtcggcaacgagctgcggcagcgtgcagtgcaggttgtcgccgtcgccgtagaagcccatggcccagaccttgccgtctgcgtcaagcaccaggcagttgtccgtcacgccattcgtcgtgtcgttgacggtgttgagataggtaatgccgacgaggttcgcggaaaagagtgtggagagattccagcccgcagtgtaagcaccggttgcggtgtcgaccgtgacgatgcttttgccacaggttgcaagcatcgtgccgccattgagcttctcggcgaacgtcatatcggtataggcaacttcggaatcgccgatcttcgtcaggctgtaatcctttccgacctgatagagagtcgagtaaagattaccgtccttttcttcataggaggcggcgtaagtaatgccggcggtatcggtcgctgcggccatgatctgctggcggctggcctgctcggtcagcttcttgtaattcgggatcgtcttcgtgttgaacgtgctgaaccaggactgactgtccgcatcccagatgacggcgctgaggtcatggtcgacctccttgaccgtcacggtgcaggtatccgtgacactcgggtccagaacggaggctgccttgatggtgcaggtgcctgcgccgacggccttgacgacgccgttttccaccttggcgacggtctcatcggagcttgtccaggtgcagtcacggttcacgaccgtccacggcttcgcggagacctccagcgtggcgctgctgcccttgatgaggtcgaggctctcctggctcagtgagatctcctgaactttttcggacgggccgaacatggagccgctcttgcgcgggatgaacaggccgcacagctctgcctgatagagctcatcgagcacggtagcttcgccggtcgtcaggtcataggaaatgaaggtggtgtagtacgtcttcgcgccgtagttggcgtgatagagcttgccagtgttatggtcgtaggtcatggactgcaggaatgcgaccttcatgcccgtcgtcttcgggaacggcgtgaccgtgaagccctcgtccgtcaggacgaacttgtacaggcgggagttatagtcgctgtaggtcgcggcatagaacgtgccgtctgtcgcgcaggccagcgtcatgaagctcaggccggcggacatcgggatggtgccgaccatctccagtgtgcccatgagcgggtcgatggagtacaggcggttctgcgtgcacaggacgtacagcttgccgtctgcgtagttgtaggccatatcgagcgcattgctcggcaggctgagcgtttcgatgtatgtctggttctccagatcgttcagcggagcgacgcagaagcgggcgctgctgtcgatcgtaaagacatgatcctcgacgcagtctgcggcgtagatcgcgccctgcgccacggtcttggcagtgtccatcgaaccggccttgaaggcgatccaggaggaatcgtaggcgttgttggcatagaagctgtccgcatcgatctcctcttcctcgctgccgttgagcttgatcttatagcctgccatgttgccggcatagtcgacggcaatgacgcagacctcggagccggtgacgccggaggtatcaaccgtgaccgtggattccacgccgagctcggtctggttcacggcctgacgggcaaggacctgcgtctggcgggcattcgtcacgaggatggccgcaacatagcggttgtccttcgcggtgaccgtcaggctggattcgccggtcacgaaatcgcgggtgtagctcgcgccggtcagctccggagcggtgttatcaaccgtgagctctgttgtccaggaagcgcccgcgccaagcgtgcccttcacggtcttcgtggcgcggtcccagttgtattccggaatggcgttcacggtgaccttgatcttcgtgccctcgggcagcgggccgccgttcttgtccgtcacattccagctcagcgggatggcgatcatgttgttgccccaggccgctgcgctcgtgttgtagtaagcgccgaactgcacgccctgatcaacgcttgcatagacctcgccggtctccgcattggagatgacggcattcagatcaccgcccgcgttgcggatcaggctggcgtatgcgccatagagctgcatgccggacgtggagctgatggccgtgcggtcggcaaggaattccgcagcctgaccgtaggggttcgccgtaaggtaataggccgaggaggagccggagccgcgcaggacgagcgcgttggcgtactgcgtcgtggtgtagccgacggcatccggatcgacgctgtcacgcagggtgatgtacttatcgaacatggaggcatccgtccagctgccgtagtaggccaggatcggcagagacagctcggcctcggcttccgtcggatcggaggcgtagacatagccctcgacatagcagccgtttggatagtattctgcgaagtaagcacggtcggcctcgctgagcttcactgtcgccttgacggagacggagccgctggcggggaccgtcacggcagccgcgtagacgttcggactctccggctcattgtgcagaccggccagatagagttgggcgtccgccgtagtgagagcgccgtcgccgtcgaagtcgtacttggcggcatcggcctcggacagcgcgtcatgcgtgccgtttgcaacctgcaggagcacgagggcatcgttctcgtcgatggcgccgtcgccgttcaggtcatagaggtagctcgtgccgccctcgacgtcgaaggtgaccttcgggctcaggacacgggccgtatcggacatgtagttctcaccctcgatctcctcgaccgccatagtgttgatgccggcatggagcacataggcaagagccttatccgagagattgttgatggtgaagtcaaaggtatactcgcccgtgcggtcgggatcgtcgccgaggttgaccttgaccttgccgtcggtcacatccttgctgtccgtcagcagataggccggggtcgtcacggcatgatagacgtttgcaaagccggagccctgctttctgggcgaatattccacgccgttatcctgcttcagcgggctggacgtggacatgagcagtgcctgcgacagggcgcggaccgtcatgccctcctgctcggcaaggccggtctcacgcagatactgcgcaacgactgccgccatgccggtcacgctcggcgcggacatggacgtaccggacatggagccgtaggtgccgtccgtcagggtggaccagatgttgccgcccggagcggtgatctcaggcttcaggtcgaggttgccgggaacgccccaggaggagaagtcgctcggcacaaagccgccggggacatccgtcacggtgcggacctgattggcaacgaccatctttccgccgtacaggccggtcgtctcgtccttctcggaggcggcgagaatgctctcggcgctgatcatcgggatgaggacggcagggttcttgtactcatagcccgtcaggttcatgttgagattgttggcgctgtcattattataaatgacggtagcggccgcaccggccttcacggcattgttcgccttgacatagaacgaaacaccgccgccgcgggagatgaggacgatcttgccggtgaggtcgaggccctcaaagctctcgtccgcgccgaagatatcctcgcccgtcgtcgggtcgccaaggaagacgtagtcatacgtcgtgccggacttgtccgctgaggtatcgagcgtcgtgaacgcataggcgccgtagttctcggaggtatcattgtaggacgtgccgacgccgttgaacaccggcatcacgcccgtcagaccggagttgtcagtcgaggcaatggtgaacgcattgccgaacgagccgggagagccgaccgtgtcgatcacggtgtcctgcgtgagctgcatcttcgtgccggtattgttgtactgcgcatagctgaacttgttgccggcggagatggtcacgacggtgtccgtgtcctggaggctggcaaacagctcgtcgttatcgctgaacgtatggccggagacggacgagccgagcgacaggttgaccgtgtcgcagtcgagcagcagggcgtcctcgagggccgccatatagtccgaatcatacgcgccgccgcccttgccgaagaccttcatcggcaggacctgcgcatccggcgccacgccggccacgccgttttcctggcgggccgcgtgcagatcgccgtcggcgtccttcgtccagacataggtattcgcagtggcgataccggcaacgtgcgtaccgtggtcgccctgcgcgtcgttgtcatgggtgacgtccagatcctcatcgatatagttgaacgcataggggatcttggccgtgcggtagagctcgtcggccgtcaggccgctcatgcgctccgatgcatgcagacggggcaggaccttcgtgatgtcctcttccgtcatcagatcataatcggagacctgcttgccgaagcgggccgcggagcgctcgaggccataaaggaacgcgctctcgtcaaagctcgggtggtcgatatccaggccggtatcgatgatggcgacccggctgcctgcgccggtgtagccgtcggcccaggcgttataggagccgatcatcgtgcccgcagtggacgtgttgggctcgtcgacatccggctcgtactgattttccacatagacgctctcaacgccgtccatggcgcggatcgcctccacctcgccatagggcacactcgtggcaacaccgttcacgccgatggtgaactggtagcgcacgggaagcgtcacgccgagctccgccgaaatggccttgatctgcgtgcgctgcttcttctgcaggcggtcactgtaggccagtgccgcagcgttgctgccgagaccgcgggtcgaatagccgtgcccggtcagggaatcgctgcggaagcggatgatcacacgcaccgtttcctccggcgcgggctcgtccgctgcgtccgtttccacattctcattttcaggagagatggaaacaggcgtctgctgcagctccagctccttcgtctggtctgctgcaaacactgcgggaacgcagccgagcagcaggcagagcgtcaggaggacagccaatagctgccgaagcttctgttttctcatcgaatcaaccttcctttcttttgttatgacaatacgcccggcttgccgaaaaggtcccgcaggcccttttcgataaaccggacgttaggccatactttattgtagcagtgccgcaaagtgcagtcaagataaaaatgcgctaaaatttgaatacatttccttatgttttttgctcgtcgtgcatacttgcaggaattctttcacggtttcccgcatgattatcctttcatatgccgtaatatcagcataacctgcatgatttcatgcaatactgccatgtgtactgcttacctacattttgcaaacgttttcatcatattcagaccatcgaaacgggaaaaagccgcattccgacattgacagaacgccgaaatcggggtaggataatactataatagaaaatgaacggcggcgcagctgcgctgccgaaggaggctgcccatggatcccatttacgtcaccggccatcggaatccggataccgactccatcgtctccgccatggcctacgccgcgctgcgcaatgcactcggcgaccgggagtaccgcgccgcccgtctcggccacgtcagcgacgagacgcagctcgtgctcgaccgcttcggcttccctgccccggtctggatcaagaccatgcgcacgcaggtgcgcgacctcgactatgacacgccgcccgcgctttcctccggcgtgacaatcagccgcgcgtgggctgctctgtcgacggacacgtccatcgccgccctgcccatcacaaatgaggacggcacactgttcggcatgctctcctccggcgacatcgccgccagcgacatgcagtccatcgagcatccgcacatcgacgccgttccgctgttcaatgtgctcagcgtgctcgagggccgtattctgaacgaagcgggcgatcttgtggattccatcagcggcgacgtgtgcatcgccctgccgcagagctgtgacaatctgctgttctccggcagcggcagcatcatcgtctgcggccaccagccggacatggtgcgccgcgccatcgagcagcacgcccgctgcgtcatcgtctgtcaggccgagctggacgagcagctccgcaatgcgccgacggacaccgtcatcatctccacgccgttcgatgcctaccgcgccgtccgcctgctgtatcagtcgctgcccatcagccgcatctgccgcacgaaggacctcgagtgcttccatctcgacgactttgtcgacgacgtccgcgagggtatgctgaaaagccgctaccgctgctatcccattctggatgaaaacgaccgcgtcgtcggcacgctctcccgttaccacttgatccgcccgaagcgcaaacgcgtcgtgctcgtcgatcacaacgaggcggcccagtccgtgcccggcctcgatcaggcggaaattctggagatcatcgatcatcaccgtctcgcggacatccagacgggcaatcccatctatttccgcaacgagccggtcggcagcaccacgaccatcatcgccacgatgtatcaggaaaagggcctcatgccctcggaaaagctcgcaggcatgatggcagccgccatcgtctcggataccgtcatgttcaagtcccccacctgcacccagcgcgaccgcagtatggccgagcgcatggcgcgcatcgccaacgtctcgctcgaggagctgggccagcagatcttctccgcctcgtggtcggatgacaagacgccggaggagctgctgttcacggacttcaaggatttccacatcgcgggccacgatctcggcgtcggccagatcacctgcgtgaattctgcgcacattctcgagcgcaagcaggaatttctggaaatcatgggccagaccatgcaggagcggcactacagcctgatgctgctcatgctcacggatgtcctgctcgaaggcacgcagctcatctaccttggcgacgaggagacgatccagcaggccttctccagcgaggccaagaacaacgtcgtgtttctgccgggcgtcatgtcccgtaaaaagcagatcattcccacgctctccgcaatgtggggctaaaccgcacccgaacggggatcgccgtgccgctcggcaggctgtaaggcacagaagcataaaaaaaccggcaggggccttttcgcctctgccgcattgttttccgtatttatttgggccagcccgcgcagagcttggcattgagcttggaatagatgcgctcgcggaaccacggctccgacgaggccgccacggcctcatccaggccgaaccagcccacgcggctgttctcatccggcttgcagcggatgggcagcgccgggtccgcctccagcagatatgtcacgttcaggtgcaggtgtgacggcacatagtgcccgcgcttttcgtgcccgtccacagtcaggatctccacggagaacagctccgggctgacggcgcgcacggtggaaagtccgctctcctcctgtgcctcccgcagagcgacagccagaagatcatggtcgccatcggcatggccgccgagccaggaccaggagtcatagagattgtgataggccatgagcacgcggctgcgctccgggctgacgatccagccggaggccgtcaggtgggccgagcggttctcccgcgtccacaggtcctctccctgcccgagccgccgcagcagctccgcgcagtccgcctcctcctgctcgttccacgggcgataggcccgcagctgttccatgatccgatccatgccgtttcctccgctttctttctgttttctgtttctgattttacagcggctttggcccgctgtcaactcccgaacgcacctgcgcggtccagcagaacaagaagccggacgctgtcctccgtcaggtccagcacccgctcctctcccgttccgctgcggccgcgcaggatgtccgccgcgatcagcttgtccagcacggtgcggtaatcgccctgcggcacgtcggagagcagatgatagcacaccgtctccgcccgctgcggctcgtctgcggtctttttcaggccgtagtgctccgcaagaacagctgcctccgcagctgccagccgcttgagattttcgtcgtccagcagccaggtcgtcatgcgcgtgttcgtgtggaagctgtgctccaggatcatccccgtcacgccgaaggctgccgtgaagcggatgaccccgtaataatcggcgttgtgcgcgctgttccagcggacgcgcgtctgcgcgggctgcagcgttcccatcgtcttatggatgcactccgccagctcggcagccagcccgatccccttcccgctgaccggataaaagacgacgggatagtccacgctttcgcagaccccgtttcccgctgcgttgctgtgcaggctgaggaacagatcgcagtccttcgccgccagcgcgcgggtatagagcggcgggtcgtcctgccgcgcggcgcgcgtgcagaccacggtcacgccgtaggcctccagctcctgctgcagcaggcgctgcagcgtaaacatccggtcgccctcaaagtagccgcaccgtgcggggctttgattctggccggtcccatggccggcatcgagacaaattttcatgctgcattgctcctttcatgctgtgttccgaaataaaaactgatgacgaccgtaaacacggtcagaaattcctgcgctgagacacaccgctgcaacgcaagcgcggcaaagacccccgtcagcgtcaccgtgacgagcgacttgaccgtcagcaaagcggataaccgatccttcatgtcttccccccttccaggcagtccattctgtgcgagatcgccgtgacccgatcctccaggaccgggatgcgctctccgaagccgttgtgacggtccacttttttctcgagctgctcgatccgataatttgtcagccgggccgaggtcaggatcccgccgagggtgcctgtcagcgttccggccagcgacagcagcgcaatgagaacgtcgtgttccatattgccgtatacctcctttcaaccataccgcgcagccggtgaattcttaacggaaaatgttgttttttcctgccgaagttgaaaaattttaattcatgtgctacactgaatgctgtcgaatgccaagggcaataccgcacaattcaacaagagcattcgacgagagattttttgttgatacaaggtttgaaaagcgcaggaatactttgtgtacccgcaaggggcatgccgtatcc

SEQ ID NO: 11155 - DNA, 24965 bp, Unknown
  gut microbiota DNA sequence
aggaattatgcggtgttgcccaagatctgccgctgcagcccgaagccgcgcggcacggaaaggagagtccggatgaaacagcagatcacaaaacgcgccatcaccgagtcgttccgggcgcttctggccgtcaagccgctggataagatcaccgtccgcgacatcgtagaggactgcgggctgacgcgcaataccttttattaccattacgaagacatctacgatctgctgagcgacgtgctggagtccgagatcgagcgggcgctgtccgtccccgcaggcggggcctcatgggagaccatgctgctcgatatgctcagcttcctcatcgattcgccgcagatcggccgtcatattttccagtcgaaatgtcaggatgccatgcgcgtctatctcagcaaggtcatctccgagctgtcggaccgctatatcgagcaaaacgtccgcgatctggactacagccagcaggaccgcaagctcatctgcgacatctgctgccacgccctctacggcctgctggaggaatggctgacaggccgctccgacgtcgcgctcgaggcggagcttcgccgcgtcgcccagctgttcgagggcacggtgcgccatgcgctggaattcagcgccgctcatccgcgcacctgaatgccatacaaatatcccggagtgtatggattttgcacatcgctccgggaatgaatgatgactagcagaggctgacccgctatgctataggggtggttttttgagtctcgcagaacacaggaggagatcaacatgcaggctctgctgctcaatggcagcccgcgcggcgctgccagcaatacgctgcgactttcccgcgcctttctgcagggtacaggctggccgtttgagacgttttctctgacagaaaaccgcatcgagccctgccggggctgcatggcctgctggcgcagcggcgccccctgcacgattgcggacgatttctctgcttttgtcggacagttccgccgggcagacgtgctgattgcgagcttccccctgtattattttggtcttcccgctcagctcaaagccctgctggatcggacgatcagcctgatggagccataccacggccagacgccggagggcgggcactgctcgttccagacgctgcgggacccggcgctgcggcgcaagaagctcgtcgtcatctcctcatgcggctatacggaggccgcgcccatgtatgaagcgctgctggcccagcttgaccggctgtgcagcggccagaattatacgcccctgtttttcccgcagggcgagctgctcccggtggaaaagctgaacgggccgcgggcccgccgtctgcaggccttcgaggcggcaggccgggaatatgccgaaacgggaacgctctcggagcagacgcttgccggggtgcagcggccgatggtcgatccccgtgtctatgaaattctcgcccgcgcgcagtggcgcggcggcgcggaaaggaacaaacagccatgaagcaaaacgacaatctggtcaagctggccaaaatcaccaatacggccgcctcgtttctgatctttctggcgggcctgatgctgatcttcctgcccagcacggaggtcacatccctgcagcggacagtgcttgccgttttatttctgctgaccggcgccgccaaaatgatcggctactactccaacgatctctaccgcctcgcctttcagtttgactttgccatcggcatcctgtgcgccctgctggcagggcttctggccttcctgccgcagcgcgttctgccgacacttccggtgttgctgagcgtctatgttattctggatgccctgctgaagctgcagatcgcgatggatgcccgccgcttcggcatggagagctggatcgccattctctgctcctccctgctgctcggcctcggcggcctgttcgccctttcggcgctgtattccagcttcctcacgccgtccgtcgccatcggcatcgcgctggggctcgatggtctgcagaatgcctggatcaccatgcacacggtgcgcgtccgcgcccgcaagaaaaatctttccgaaaagtttggactggagaatcatgaagaagatcctgattgacgtattcggcagtgaccaccccgagcagctgctcgagggctgcgcccgctgcacactggaggtcccggacgtcatgctcgtcctgcccggcgaggaggctatgcttcgtgcggagctggaaaaatatccctgcaattgggatgcgctggaattcatgcccgcatccgagatcatcacaaatcacgacgaccccatcgacgccgtcatgcacaagcgcgactccacgctcgtcaagggcatgcagcgcctgaagcgcgacccggagcttgccggcatgctcaccgccgggagcaccggcgcagccctcgcaggcggcgtggcctatgccgggcgcgtccgcggcgtgcgcaccccagcgcttgccacatttctgccttccatccccggccgcaggctgtgccttgccgactgcggcgcaaacgtggactgcaagcccgagcgcatggagcagttcgctctgatggccacggctctcatgcagagctgcggcgtggaggagccgcgcgtcggtcttctgtccgtcggcgtggaggagagcaagggcagccactttatccgcgaggtctatgacctgctcgagcgcctgccgatccgcttcaccggcatgatggaggcgcgcgacgccctgtccggcgagtacgacgtcatcgtagccgaaggcttctccggcaatgtgctgctgaagaccgttgagggcacgggcctgttcacggccgcccggctgcgcgccaacaccgatcccgccgtccgcgccgcgggcgacaccattgccgccgagctggactttgcctcaaacggcgcgtccatgctgctcggcctgccaaagcccttcctgaaggcgcacggcagcgcaaacgcagccacgatcccaaacgccgtccgccagctcctgcagctgagcgagctggactttcccgagcgcctgcaggctctgctcgcccgcacggccgagcagcaaaagacctgaaaatacagcaaaagcccggggcttccgccccgggctttttgcccatcgggaaaccccttcgggctttcccgacgattggatcacagtccgctgcgcgcacggatcatccgccgttggcagacgatccgcacactggcggactgagcggtattttctccgacgtacacgccgccggagaaaatgatctcactttcttcgccgcctgcgggcggcgaactctgcgaggcttttaacgaaacgccgaatggctcttaggcgaaaggtgaaagcagaagcccggggcttctgccccgggctaagactgtcgaaaaacctgcccagctgaaagtttcggagggaaggaaagtgtgaaaggaaaccgtcagggtgtcctttcgcgttccataacccgccgcagcggcagaattgcaaaatcatgctgcataatttgattttgcaattctgaaagcagcttggcgaaaaaggcccgaagggacttttttgacaagctgagcccggggcgaaagccccgggcttttgctgtacctgtattgttttcagtttgtcgtgatctctccggcctttttgagcgagagcttcgtcacggccgggccgataagctcatagatgagcgtaccgcagaggataaccgcacggatctgcggtgcaaaatgcggcacgatcttaccggctgccagcgacaggccgatggccacaccggcctgcggcagcaggcacgggccaaggtactttttcacgttcttgtcacacttgcacacgatgccgccaagcgaagcgccgaaggccttgccggccactcgcagcacgatgtagatcacgccgatgaggccgaccgtcggcagcacagacagcttgaggtccgcgccggacgcgacgaagaacagcaggaagatcggcggcgtcacaccgtcacagatgtccatgatctgcgtgacatccggagagaagttcgccacgaccgcgcccatggccatgcacaacagcagggatgacaaatcaaacagggtagcgatgccgatgcccgcaaacacgaacgccacaataagtgacaggcggttgccaaccttcttgaagaagcgcagcggcagcaggaaaataaagccgagcgccgcgcccaccacgattgcgccaccgatctcgcgcagcggcgacagcaaagacgcgccgaacgatgcgccggcgtccgtcaggccctgcgccacggcgacggcgagcgagaacaggataagggccgtcgcatcgtcgatggcgacgacggacagcagcgtctccgtcacggtgcccttcgcgcggtactgcttgatgaccatgatggtcgcagcaggagccgtggctgccgcgatcgcgcccagcacaagcgagaacggcagcggctgtctcgcgatcagcagaccgagcaccacaaatacgaccgcaaacagcgattcgaggcacgcgatgacgatcggcgcaacaccgacacgcttgaaataggacattttgaactcattaccgatggagaaagcaatgaagcccagcgccacatcggaaatgatattgatcgtcgtgagaaaatcctccgacagcaggccgaagacgctcggcccgatgagaagacccgccacaagatagcccgtcacgttcggcaggtgcacatgctttgccatgcgcccgcagaacatgcctgcaaagatcatgatggccaggtccagcagggtattgagattcattggtatttgcccagtccttccacatacgagattggcaccgtgaagaggatgccgctgtccggctgatccagtcctcccgttacctcattgacgacgcggctgaccgtgcgcaccttctcaccgtccaacaccataaaaatcatcttgttttccttgtgcgcagggttcatcagcatccgcagggagccgaggaaccgaagctcgtcgtgcgcctcgagctgctgcgccatgccgcggctgtccagaatggtcgcgccggggatatgttcctcctccagcgccgtgagaagcttatccagacattccagcttgttcagaacgatcaccaatagctgcatcatgttcgcctcctgaaaattttccggacactatcttagcactgtctctccgaaaaaacaacaggaaatcacggattttttcgtttttttacgccggaaacagctcgtgcagcgtccgctccgtcagcgcatctgccgctgcgaagtccacataggggcggcacagggcctccagctcatcatggatgcgctttgcctcgcgcacatgctccgctgccttccgcaggagcgttcccgccgtgtcccgcgcaaagtgcagcgtgtcgcgcgccgcgggcggcagcgtgccgtccagctccagcgtgcagcagcgctcgcccgcataggggaagtccggactgctcgccacaaaggccgcccctgcccccggcacaagcaggtgcgcgggcgcaccgtccggctgcagcggcgtgtagcaggcaaggcacgtctgcccgagctgcagggcctgctccagcacgcgctgcagcagagccggggcaaggccgtagctgtcctccagcacatagacccgcccgcacacagccgcagccgtctccgtgcagaacgacagcccctccggcgttacggcgctgaggaaccgccgccggaccctcccctgccgcccggacggccgcagggccgtcagcgccaggcagcccgccagctcctcgagatcgcggcggcagcgcggctcctcccacatggcccgcgccggagccagcaggcggtccgccgcggcgaggcacgccgtcacgagcggatactgcgcggcgttctcccgcttccggcggcgcagctccggctcgacgcgtgcgatgcccgcccggtcataaaacgcgccgaagtccacatagccctcccgcccggcgcacagcgtcggctcgagcacatggggcgccgtggcgtcgacccagccgcgcccgagagacggcagcacgacggcatcgagggactgcggatcggacgagcacagaaaccgccatacctccagcccccgtgcggcggcctcatcggcaatgcgccggagaaaggtcgacttgccgcagccggagccgcccttgatgtaatccaccgcgccgcactcctccgccagctccgaggcgaaggtggaaaacccccgcggtgtgcacgaacccaaaaaaaatgttgcctgcatcaacagcacctgcctttctcccagatatctatgcgcggcggagcgaaaatgttccttccccaaatttaggctttatttctatatgtaaacattgacaggatacatattttgtgctaaaataccataaaaatgtggaagatcatcgcttcccgcattttcagcatcacaggaaagaaaggaagatcaccatgaaaaaacgttgtctcagcctgctgctcaccctgtgcctgctggccgcgctggccgttcctgccttcgcgcaggaagcggaaaagcagccgacactgcagcccgcctcggagcatccgtccgttcttctgaataccccggccgttgagatcccggccgtccgcgccgagatcgagcccatgtgcgtgccgcacgccagcatgcgcagcctgtccatcgccaggggctatgagggttatctctattacagcctctaccgcggcacctactccggtacctacggttattccattgaaatctaccgcggcaccagcatcacggaagccaattacgtcggcggctatgccgatggctatacctccgcagagccgcagctgcttgagctctcgctggacagcgcgctcacgtccacgctctctgccggtacttacaccgttgtgagcacggtccttgtcgccgtcaacggcgaggcccgccccgtgagcggcacggagaccaaaacgcagatccaggtcgtcaacgatcctatcccgctgcagggcgtgtacatggagagcgtcaaggacgtcatgtacctcgatcccggtcaggagatcacgacgcgcgtggccttcagccccgccaacacgacggcccgccgcaactacgagctgagcatcagcaacgaatccgtcttcagcgctctggatttcggcaacgacatcaccatccgcgccgagcagccgggcaccacgacattctatgtcctgcttggcggctacatgggcggcttccgcctgaccgtccgcggctacaccggctccatggtccagaaggagcagaccctgcacgagggcgcctctgcgaagctcaccctttcgatctcgccggatgacggccagacgaaggccgtctggagctcgaacgatccgctgatcgtcagcgtcgcacaggacggcatcatcaccgcactgcgtgaaggctctaccattataaacgcttcccttacctacccggacggccgcaccggtcttgcgtcctgcgccgtgaccgtcacgccgcacaccggcgacgtgctctccgagcaggcccccacggccagccgcgacggctggcagcagatcaactgcaccgtctgcggtcatgaggcgacgcacattctctcccgccgttttctcgacctcgacggcacgcagtggtatgccgacggcgtggacgacatcgtcgaccgcggcctgatgaacggcaccggccccgtgacgttcgagccggactccaccatgacccgagccatgctcgtcacggtgctgtggcgcagcgccggttctccgaacgagggcacgaacggcttcacggacgttcccgccgatcagtggtacacgcaggccgtcgcatgggctgcgcagaacggcatcgtcaacggtgttggcaacaacaagtttgacccggacgccaagatcacccgcgagcagctggccgccgtcctgtaccgctatgccgggaaggtcggtatggacgtcaccgcgcgcgccgatctcaagctcttcccggatgccggcagcgtcagcgcctatgccacagacgccctgagctggtgcgtagccaacggcatcgtcaacggcacgctggagcacggcacggcctatctggacccgcagggctccgccacacgcgcccaggtcgccacgctcatgtcccgctatctcaagctcacggaagcataaccgaaaaatcactgaggccgtccaatcgggcggcctcttgctttttctgctgcaatgccctatactgatgcaggaggtggttccacatgaaaagcaggcggctttccctgtttctgacgtttctgaaaatcggcgcgttcacgttcggcggtggctatgccatgatcgcgctgctggagcacgagctcatcgagaaaaagggctggatcgggcacgacgaatttctcgacatggcagccattgcggaatcgacgcccggccccgtcgccgtgaatgcagcgacgtatgtcggcttccatgttgccggggtgtccggcgcggcgcttgccacactggccgtgtgcctgccgtcgttcctgatcatttttgcgatttcccaattctttgaccgctttcttgcgctgaccaccgtcggctatgccttccgcggcattcaggtctgcgttgtctatctcatcgcatccgccggatggaaaatggtccggaagctgccgcaccgtccgctggataacgcgatcctcgccatcgtcctgctggccatgctggcctgctccctgcttgccgtctcgttctcctccatctatttcattctgctcagcggcacggccgggctctgcgtctacggcgtgcggcagctgcggagaggcggtgggaagccgtgatccggctgttctggaattttctaatgatcggcgcgctgtccttcggcggcggctacggcatgatctcccttgtgcgggagaccgttctgtccaacggctggctgacggaatcggagtttctgagctttatcgccgtctcggagtcgacgcccggcccgctggccgtgaatatggccacattcgtcggttcttcgcaggggggcttctggggcgcgctgctcgcgacgctcggcgtcgtgctgccgtcgttcctgctcctgctgctcattgccgccgtgctgcggaacctcatgaaataccgcggcgttgaggcctttctctccggcgtgcggccgtgcgtcgtggcgctcattcttgccacggccgtgaccatgggcctgacgcgcctgctcggctttacgcacctcggtgatgtccctgcgccggatatccgctcgcttcttgtgctggtggtccttgccgccgtccatttcctgtggaaaaagctgcgcggcaaagtgccctcccccattgccatgatcggcctgtccgccgtcctcggtatcctgctctggagcatttaggcagcttgcgtctgtagcggcgttccctgagcgccttgcaggctgcaggtttggtggcactccgccgaccgcatctgccgttgtaggggagcggacagccgggcccggcgacgcacttgcagtccgtacaaaccgccgttaaaatggcaaacgctcccgaattgtcattgcgaggaggccgcaggccgacgtggcaatctcgcagtaccctgttggataatcgggcagccccggcgaattcgcaagctgctgcaatccctttagagagagcatcgtttttttacgaaaaaacagccgctgcactgcgcagcggctgccgttttattctgttttacttcgtgccgaagatacgatcgcccgcatcaccgaggccgggcacgatataagcatgctcgttcagatggtcatcgacagcagcgacatagaggtcgacatcgggatgcgcctccgtcacagccttcacgccctctggcgcagcgatgatatccatcagggtgagatacctgcagccgtattccttcttcaggatatccagcgcagcaacggcgctgccgccggtggccagcatcggatcgaccacgaagacctgacgctccgagatatcgggcggcatcttgcagtaatacttgaccggctcatgggtctccggatcacggaacagaccgatatggccgacctttgcagaggggatcagctcgatcatggagtcgaccatacccaggcctgcacgcaggatgggaacgatcgccagcttcttgccggaaaggaccttcgtcttcgccatggcgaccggcgtctcgatctcgacttcttccgtcggaagatttctggtcgcttcatagcacatcagggctgcgatctcgccgacgatctcgcggaattccttcacgcccgtgttcttgtcacggaggatcgagagcttgtgctgcagcagcggatgatccaaaacctgtactttacccattgacactctccttcgatgtgcgcaggcgctccgcacgttcccgctctgcctgagacagacgcagataattcggcgcgagcgccgcgccgctgcaatccgccccttcactgaggagccgccgcgcagcgagcgccacacctgaagcgcgctgcattctcctatgctccggcgcaagcatgcagccggagatttccgtaccgaacgtattatagcacaactgtgcgccatcgccaaccattattttcggtttttcgcaattttccagtgcgagccgcacctcgtcgagtgaaacggcgcagtcggggcacaggcgtgtcagtgtgccgttctctgcgaggaagcgcgcgtgatacacctgggaacgccgcgcgtccatggcgcagcacacgatgccggaaaattccgatgcctgccatgccatggcctccagcgtcgaaacgccgcagcacgggatatcccgcccccatgcaaagcccttggcggccgccacgccgatgcgcacgccggtaaagctgcccggccccgccgcgcaggcgacggcgtcgatgtcctttgccgtcagctccgtgatctccagaagacgctgcgccgattccagcagcgtccggctgtgcgtcaggccgcagttcagatagagctcgcccagcagcgtgtcgtcctccagcagggcgacggatgccgcctttgccgaggtctcaaatgccagaattcgcatccagcccgcctccttcgatggtgatcgtgcgctgctcgtccgaatcgcggccgatgcgcaccgagatcgcgccctgcatggcgtccgcgacgttttcgctccactccaccgcgcacacgccgccgcgctgcaagtaatcctcccagccgatgtcaaacagctcgtcactcgagccgagccggtacatgtcaaaatggaacagcggcagacggccgcccgtatattcgttgacgatggtataggtcggactggtcacacgcatcgggatcccgagcccgcgcgcaagtccgcgggtgaacgccgtttttcccgcgccgagatcgcccgtaaaggcgatgatctcgccgccgagcagcgttttggccagcctttcgcccagcgcctcggtctcgtcggcgctgtgggtcacaaaccgcatcgttctcacgttcctttctctccggctgcattccgcagctgcttttgtttattttaccatatccgcgcgttttttgcaaaacatacttttgggtttacagaatgccggatcgatgatagaataagaagaacgaaatcgggaggtgacggcatgcgaaaatttggggcaaaactgctggaggtcctgcgcaagggggatatggtcctgctggcgctgtgcgtgctgacctccgtgttcggcatcgtgatggtcgcggcctccacggcctatgacggcagcagccgctatgtcatcatccagacgggcgcgctgatcacgggcattctgctgtatcttgcgctcaccgctttcgacatcgacatcctcgccgggcagcggacgctgctgttcctgttcaataccgcctttctggccatgctgctcgtctggggcgttgagggcacgtcaggtaataaaagctggctgcactttcccttcctgccgttcaatattcagcccgccgaggtctgcaagatcacctatatcatcattctggccaagaccatgagtctgaaccgcaaccgcatctcctcgctgcgctccgtcggcacgctcacgttccacatgctctggatcgtcgccctgatcgtcgtcatttctcacgataccggcgttgcgctgatcttcatgttcctgttcgttgtcatggcctatgtcggcggcgtgagcggctggtggttcctcggcggtgcgggcgccgtcgcggccgtctccccctatctctggaaatactttatccgcgacgaccagaagcagcgcatccttgccctgatcgacccgtccatcgacccggacggcctcggcgtgctgtggcagacgaacaaaagccttgaggccctgcgcaacggcgggctgacggggcagggtctgttccacggcgacctgacgagcatcggctacctgcccgcccagcacacggactccatcttctcgtccattggcgagcagctcggcatgctcggctgccttgccgccctgttcctgctgctggccatcgtcctgcgctgcattcaggtcggcatgaagtctccggattacatgaaccgcctcatctgcatcggcatcgcctcgatgctgctgttccagatcctcatcaacgtcggcgtctgcctcggcctgttcccggtcgtcggtctggccctgccgtttttgagctacggcggcagctccatcctgacgtcgttcctcgccatgggcatcgtctccggcatcaaaatgcgccccgcgcccgatatgagcgcacactatatccgaccctattgacgcgtattttcaggcagcaccgtgttctcagttccactgcttgactttcggaaaactgccgccctgaaggtttcggagggaaggaaagtgtgaaaggaaccattaaggtgtcctttcgcgttcaataaccagacgcagcagaaacattgtaaaatgatactgcaaaatttaatttgcagttctgaaagcagcttgtcgaaaaagcccttttggccttttcaacaagctgccgctttttgcataatctggagaaatcggtgtatcctacccgcgatgacttttttaggagggaacaccatgaaacgaacgctgcttcttctgctggcgcttctgtgcatgctcccggccgcgcacgcggccgggccggagacgctttaccccatcgcctactgcttccgcgagacggattttcgcgcggacacgctctcggacctgaacggcatcttcgtcacgtccgtgccagaggccgacgtggcgacggtctgcctcggtgagcgcgtcatccgtgcaggcgacgtgctgcccgtgtccgtgctgggcgagctggagcttctgccggtcagcaccggcgggcaggaggccgctctgtgctactgccccatccgcggcacggcgctcggcgaaccggcgcaggtcacgatccgcatccgctcggccaaggatgccgcgccgaaggccgacgacgcggaattggagacgtacaaaaacattccgaacgacggccggctcaccggctccgacccggaggacacaaacctgacctttcagctcgccgaggagccgaagcgcggcaaggtcgagctgcaggaaaacggcagcttcgtctacacccccgccaagaataaggtcggcgaggacagcttcacctttacggtcacggatgccgccggaaacgtctcccaccctgcaacggtccgtatcacggtcaaaaagccgtcggaatgccgcgcctttgccgatcttacgggcagtctggatcagtttgaagccatgtggacggccgcggccgggctgaccggcggccgcagcatcgggggcacgctgtgctacctgccgcaggagacggtctcccgcgcagaatttctcgtgatggccatggagctgctcgatgtccccgtggacgacacgctccgggtctccggctttgcggatgccgacgacgcgcccgcgtggctccagccctatctcgcctcagccatgcgccgcggcatcgtcaacggcatggtctccgagcgcggcctcgtcttccgcccgaatgagccggtcacggccgggcaggccgccgtcatgctgcagaacatgctggagctccccgtctccgcagccgtctcccagacggacgcgccgtattgggcggcctcgtccatgcaggccctgcaggaagcggggatcccgctggccgccgcggacacgagcgtcagccgcatcgaagcggcgcgcatgctctaccgcgtcagccgtctgccgaaataacgcgccttgcccgccttcgaaaagaggcgggcagttttttgcaaaaaagctctgtacttttttaaaattcgtgctaccataggaaccgaaaacaagggcagcaccgtacaattcagcaagagccttcggcgaaaaaggtccgccgaaggggaatgatgcggtattgcccgatatcgaggtgatcccatgtccatccgagaggccgtttctgccgatgttccggccatgcttgccatctatgcggaatatgttacgcagacggccgtcagctttgaatatgaagtcccgtccgaggcggaattcacccgccgccttgcggagcacaccgccgtctatccctggctcgtctgggaggaggacaatcgggtgctaggctactgctatgccgggcgcgcctttgagcgcgctgcctatgcgtggaatgccgaaatctcctgctatctcgcccacgaggcgcagcaccgcggcatcgggcggcagctctatgcccgcgtggaggagctgctgtgcaggcagggctgccgaaaggtcttcgccgtcgtcacatccgcaaacgagccgtctctcgcattccaccgctccatcggctaccgcgatgccgcctgcttccggcaggtcggcttcaaattcggccggtggtacgacgtgacctggctggaaaagtccctgtgcccgccgggcaagccgtctgaatttccgatctcatggaaggaggtcctgtgaccatgctgcaggatatcgcgcctcatacatatcacgttgaattcaccccggcagagccgcagcccgcggacctgctgctcatctacggcccacagggcgtgctgagcgccgcggatgccctgcgcctgccgaggcgtgccgatttcccggacatcgctgtccattttgcctttcgcctcgacgaccgtgccgtatttctggcgcgggagccggtcgaagccccggggggctggcgctatgttccctccgtcacctaccgcgacgccgagccgcgcgaaacggccttcgcctgcgccaccggtgagagtctgcagcgctggtatgccgcaaaccgcttctgcggccgctgcggcgcactcatgacggaaaacccggccgaacgcgccatgacctgcccggtctgccataagaacgtctacccgcgcatcaaccccgccgtcatcgtcgccgtgctggatcacggccgcctgctcatgacaaaatacgccaaccgccccctcatccgccgctacgccctgatcgcaggcttctgcgagatcggcgaatcgttcgaggacaccgtccgccgcgaggtcatggaggaggtcggcctgtgcatcaaaaatctgcggttttacaaatcgcagccgtgggtcctgacggacagcctgctgctcggcttcttctgcgacgtcgacggcgacccgacgcccgtcctgcgtgacggcgagcttgcgctggccgagtggcatacgccggaggacgtccctgcggactactcccgcatcagcctgaccggcgagatgatcgaccgcttccgggagggccgcattcccggatgatcccctgcccgcctgtgtacaggcgggcaaaaattttttgcggaccgcttgactttctgctgatctgtgctatactaagcaatagattagaaaataaatcttcgcttaggaggcgtgcccatgacacagcgtgaacggcagatcctgcagtggatcgaggccgaccccatgatctcgcaggaagcccttgcggaacgcgcgggcatcacccgctcctctgtcgcagtccatatctccaacctgatgaaaaagggctacatcgccgggaagggctatgtgctccgctccggcacctatgccgccgtcgtcggcggcgtgaacgtcgatatcggcggccagtcctatgcgccgctcgtcgcgcgggattccaaccccggccgcgtgcacatcagcctcggcggcgtcggacgaaatattgcccacaacatgagcctgctcggcgtggatgtccgcctgctgaccgccttcggcgacgacctgcatgcacagcgcgttgcggcctcctgcggcgagctcggcatcgacatcagccacgcgctgcaggtgcccggcggcacgacgtccacctaccttttcctgaacgacgtcgacggcgatatggcgcttggcctttccgacatggatatctgcgagcgcatcacccccgcctatctcgcatccaacctgtccctgctgaacaacgcgcaggtcatcgtcgccgatacgaacattccggcagagtccctgcagtaccttgtcacgcactgtaccccccctgtgttcgtcgatcccgtctccacggcgaaggcgcgcaaggttcagcccgtgctcggcagggtccacacgcttaagccgaaccgcatcgaggccgagcttctctccggcgtacagatcacggacgaagccagcctgcgtcttgcggcttccagactgctcgagaccggcctgcaccgcgtgttcatctcccttggcacgcagggcgtgttcgccgccgaccagaaggaaatgctgatgcagccgtgcctccccgcgcagatgcgcaacgccaccggtgccggcgatgccttcatggctgcgctcgcctgggcctatctcgagggcacggcgctggccgaaacggcacgcgccgctgaggcagccgccgctatcgccatcgagggcgaagaaaccatcaactctgccatgtctgccgacgccgtccgcagccgcatggccgcaaaataaatttgtaaatttttcatttcttgatacaggaggatctttatcatgcagctcaacaagtttcttgacgtaaagcccgaggtcgccgaggccattgccgccggtaagcccgtcgtcgctctggaatccaccatcatctcccacggcatgccctatccgcagaatgtgcagaccgccctggaggtcgagcgcatcatccgtgagaacggcgccgtccccgctaccatcgccatcatcggcggccgtctgaaggccggtctgaccgaagaggagattgagtacttcggcaagaagggcaccgccatcgccaaggcctcccgccgcgatctggctgtcctgtgcgcccgcggcgaagacggcgcaacgaccgtcaccaccacgatgatcatcgcccacatggccggcatcaaggtgttcgccaccggcggcatcggcggcgtgcatcgcggtgccgagacgaccatggacatctctgccgaccttgaagagctggcctccacgcccgttatggtcgtctgcgccggtgcaaagtccattctggacctcggcctgacgcttgagtacctcgagacccacggcgtgcccgtcatcggctacggcacgaaggagctgcccgccttctacacccgcaagtccggcttctccgtcgactatgagatcgacacgccggaagagctggccaaggccttcaagacccagcacgagctcggcctgcgcggcggcatgctcgtgacgaacccgatccccgaggagtactccatggatccggacgtcatcaacaaggccatcgacgaggccatcgaggaagccaaggccgccggtatccacggcaaggccacgacgccgttcctgctcgcgaaggtcaaggacctgaccggcggcaacagcctcgcctccaacatccagctcgtctacaacaacgcccgtctggccgcgaagaccgccgctgcctactgcgcgctgtaagcgaagcaagacctttttccccgggcgcaaatgcgtccggggatttttgcaaaatcgattgctttttttcggccgttccggtataatggtagccgattttccacacaaaggagccacgaacttgacgccactgtttctgcatggggccgcctccgccgatatgaccggctggagcgccgttctctccgccctgctggacggcctgaaggacggtctgctgagcatccccattttatttctcgcctatctcctcatggagctgctcgagcgcagcagccgcctgaacgagggcctgctgcgccgctattcccgccgggccggtcccgcgctgggcggcctgctcggcattgtgccgcagtgcggcatctcgggcgcggccgccacgctgttttccaccggctccatcaccgtcggcaccatgctggccgtgttctttgccacatcggacgagatgctgcccatcctcctctcctcgctgacggagagcagcggcatttcgtggaacgccattgtcctcatcacgctttcgaaggctgcgctcggcatcctgctcggttatctggcggatctgctgttcggccgctggttccgcgcgcagaaaagcatccacagcttctgcgaacgcgagcactgcgactgtgacgaggaagagggcagcgtgttcctcgccgccctgcgccatacgctgaagatcgccgccatgctcatcgcggtgaacttcgcgctgaatctgctgttccattatatcggcgtggaacgcctgtccggcacggtgctgaaccgccccgtccttggggagctcatcctcgccctgttcggcctcatcccgaactgctccgtttccgtcgtcgtgacggagtcctacctgagcggcgtgctcggcctcggcggcctgttcgcgggcctgctgtccaatgccggcatcggcctgctcgtgctgctgcgcacgaaccggaactggaaggaaaacgccgccgtcgtcgccatcctctatggcttcagcgtgctggcgggcatcgccgtcaccctgctggccggctgaacaaattgaggggagactgtgcagccgcacagtctccccaggctgtcgaaaaacctgcccagccggaggtttcggagggaagaaaagtgtgaaaggaaaccgtcagggtttcctttcgcgttcaataacccgccgcagcggcagaattgcaaaataatactacaaaatttcattttgcaattctgaaggcagcttggcgaaaaatcccgaagggacttttttgacaagctagggagactgtgcagccgcacagtctcccatttttacacgtttattcacagatgcagcttcgggcgcaggcggacgtgataatagacctccagccgcgcgataagcacgtcatagatcacgaacgtcacgtttgccagcacaaggagcacggccagcatggcctttcccatgccctcaaagtcctccatgacagccgtcagatggaagacatagagcatcaggccataggccgcaaagaccgccgcattgacatacacgagcttgaccgcccacgcagccgcgcgcacgcgcagcctgccgatgagctttcgcagcatgggatagtagccgaagaacacgaacagcacggccgcttccttctccggcgccagcagcgcggccagagcagccacggcggcgtaccacagcaggccccatttccagccgcactcgcagtagaccgggatgagcacaagcgaggccagcaccgggcaggcgatggaggcaaacggcaccgttccgccgaggaacatcagcgcgaccgccagcgcggcaagcacaccgcacagggccatccgcgccgccgcgccgcgcttacgcatggtgctctccgcatgcgttgtccttcagcagacggtatttgatctcccagagcttctgagagaggtccacatagtaggtatgtgggttgtcaaatcgcttgacctcgtcccaaagtgtgtcgacctgctcccggcagtaggagcgaatttcgttaagcgtcggaagctggtagacgagctcgccgttccggaacacggggacctgcagctcgcgggcatggaagttatagaccttcttgcgcttccaagtcgcctccggatcgaaaatttccagatcctcgccgtcgttcacggtctcgtcgtgcaggcagagatagtccgcaatggccttgcccgtgtccgcgccgtagaagcggtagagctttttgaaatgcggattcgtgatcttgccgacgttctcggaaattttgatcttcggctcgatcgtcccgtccgggcgctcgacggcaacgagcttatacacgccgccgaacaccggctcgctcttggccgtgatgaggcgctcaccgacgccgaacatgtcgatctgtgcgccctgccgcagcaggtcctgaatgaggtattcgtccagcgaattcgacacggaaatttcacattccggccagccggcctcgtcgagcattttgcgggccttcttcgtcaggtacgtcatgtcgccggagtcgaggcggatgccgcacttgcggataccgagtgggcgcagcacctcgttgaacgcgcggatggcgttcggcacaccgctcttgagtgtgttgtaggtgtcgacgagcaggacggcattcgtcgggtacagctcgcagtagcgcttgaaggcctcatattcgctgtcgaacatctgcacccacgaatgggccatcgtgccgcccgcgaatacgccgtagagctgatcggagatcgtgcaggccgttccgtcgcagccgccgatgtaggcagcgcgcgcgccgaggatggcagcctgcgcgccctgcgcccggcgggagccgaattccagcacgcggcggccctccgccgcgcggacgacgcggttggcctttgtggcaatgaggctctggtggttcagcgcaagcaaaatatacgtttcgacgagctgcgcctcgatggccggggcgcggaccgtcaggatcggctcgcgcgggaagaccggcgtgccctccggcacggcgtagatatcgcccgtgaagtggaaattctccagatagtgcaggaagccctcgtcaaagatgccgcggccgcggagataggcgaggtcgtcctcagaaaaatgcagatcgcggatatactcgaccacctgctccagacctgccgcaatggcaaagccgccgccgtccggaacattgcggaagaagacgtcaaaatagcagatctgatccgccttcccgtccacaaagtagccgttgcccatggtcagctcgtaaaaatcgcagagcatggtcagattgagtttttcattcgttttcatactgcacctctcatgcatatgttattacccagattatagcccggaatcgccaaaatggcaatctttatttttgttttgcattgacctgaccctgcaaatttggtactatactatgtgagaaatcaggctggcaccgcacaattccgcaagagcattcggcaaaaaatatccggcgaaggccgaaggtgcaaggatgcggtgctgcctctggtccatttggaggattatgactatggcaattgaaattggactgcagggccacagcgagacgctcgtcgagcaggaggacactgcaaagtccgtcggctccggcgatctgctcgtctatgcaacgccttgcatggccgccctgatggagggcgccgcctgcgagagcatcgcgccgtatctggccgagggcgagacgtccgtcggcgtttccctgcagcttttccacacagccgccacgcccgtcggcatggaagtccgcgcagaatccgtcgtcacggcggtcgacggcaaaaagatcaccttcaccgtcacagcctacgacgaggcgggcgagatcggccatgcacagcacgagcgcgtgatcgtcaaggccgagcgttttctggaaaagacctatgacaagctctgagcaggaggacagcatgcagaaaaaatatctggaggcgggcgagatcgtcagcacccacggcgtgcagggagaggtcaagatcctgccgtgggcggacggccccgaattcctgctgcaatttgatacgttctatctggacggccgcccctatgccgtccgctccgcccgtgtgcacaagacgtgcgtgctggcaagccttgagggcatcgacacgccggagcagggcatggctctgcgcggcaagcgcgtctgcatcgaccgggacgaggcaaagctgccggagggcagcgttttcattgccgatctcattggatgccgcgcgctggacgaggacggcgcagaacttggccgcattgaggacgtgctgaccatgccgtcgagcgacgtctatgtcatcgcgggcgaaaagcgctatatggtcccggccgtcagggaattcgtccgcgaaattcgcgttgacgagggctatgtgcgcctgcacctgatcgaaggaatggcaatcgatgagaattgatatcatgacgctcttcccggacaccgtcggcgacgtgctgagcgagtctatcctcggccgcgcgcaggagcgcggcattctccgcatcgaaacgcaccagatccgggattacactgcgaaccggcagaatcaggtggacgactacccctacggcggcggccacggtgccgtgctgcaggcagatccgctctaccgctgctggtgccatgtctgcgatgaggcaggtgcgcccgtccacacgatctacctctcccccgccgggcatgtgtttgaccagagcgacgcccgccgtctggcaaaaatggacaatcttgtttttgtctgcgggcattacgaaggcatcgaccagcgcttcatcgacgagtgcgtcgacgaggagctttccatcggcgatttcgtcgtcaccggcggtgagatcccggccatggccattacggacgccgtctgccgccttgtgccgggcgtgttgtccgatgcggcctgctttgaggacgagagccactgggcgggcacattggaatatccccaatacagccgccccgccgagtggcacggcctgcgcgtgccggatattttgctctccggcgaccacgccaaggtcgcacgctggcgcaggaagcagtccattctccgcacgcgggagcgccgccccgacctgtatgccgctctgcggctcgacagcaaggaggacaaaaaaattctgagggagatcgcagatgaagacgaagatcgagcagctgcgcaaatggatcacagagagtaagcgcatggtgtttttcggcggcgcaggcgtcagcacggaaagcggcatccccgatttccgcagcgtagacggcctgtaccaccagaaattcgactacccgcccgagacgatcatcagccacagcttctttctgaaaaatccggagtatttttaccggttctaccgcgaaaaaatgctcccgctcggctttgagccgaacgtcacgcaccgcgtgcttgcccggctggagcaggagggacatctggccgccgtcgtcacgcagaacatcgacggtctgcaccagaaggccgggagcaagcgcgtctatgagctgcacggcagcgttctgcgcaattactgcatgaagtgcggcaaattctatcccgccgaattcatccgcgacgcaaagggcatcccccgctgcacctgcggcggcattgtgaagcccgacgtcgtgctctatgaggaagcgctcgacgaaaagacgctggccggggccatttccgccatccggcaggccgatgtgctgatcgtcggcgggacaagcctcaccgtctaccccgctgcgggcctgctcggctattaccgcggcggccgtcttgccctcatcaaccgcgacgagacgccctatgacgacatggccgggcttgtgctgcacgcctcgctcggcgacgtgttctcgcagctgtaaggagggcaagcatggaagagacctgcgttctccgtcccattgcgcatgtgcacagcgaattccccgggaaattcggcatcccgcgccagagcggcgtcgtgccggagctgcgctcggagctgatcttcacgccggaattccgcaatccggacgccctgcgcggcatcgagggctttgaccgcctgtggctcatctgggagttttctgccaaccgccgcgcctcgtggtcgccaacggtccgcccgccgcgccttggcggcaatacgcgcctcggcgtgttcgccacgcgctcgccgttccggccgaacccgctcggcatgtcctgtgttgtcctgaccggcgtccggcaggatgcaaagcttgggcctgttctgtgcctgtcaggggccgatctcatggacggcacgcccgtgttcgacatcaagccgtatcttccctattctgactgctttccggatgcccgcgcgggcttcacggcgcttgcgcccgacctgctgctcggcgtcgattttccgccggagctgctcgaacgcatcccggaggcgcaccgcagcgccctgctcggcgtgctgtcgcacgatccgcggccgtcctatcaggacgatcccgcgcgccgctacggcatgggcttcgcgggctttgacattcattttaccgtctccgagggccggctgaccgtggtcgacgtcgtgccgatggagccgtctgagaaaggatccgcaagccaatgattcgaatcatgttcgtctgcaccggaaatatctgccgcagccccatggccgagctggtcatgaagcagctcgtgcgcaaggaggggcttgactgggtcatctcgtccgccgccaacaccggcgacgaggttggaaaccccgtctatccgcccgtccgcgccctgcttgaggcccgcggtatctcctgcaaggggaaatactccgtgcagctccgccgcgaggattacccgaactacgactatttcatcggcatggacgcacgcaaccgccgcgatatgctgcgcatcttcggcggcgaccccgaaaacaaggtccatctgctgctggactacacggatcatccgcatgagatcgccgatccgtggtacacgcgcgacttccgcaaggccgaggccgagatcaacgagg

SEQ ID NO: 11156 - DNA, 14879 bp, Unknown
  gut microbiota DNA sequence
gcattgtgaagtgctctcggcccgatgtttgtcagtctcccatgcacaggccaagctcgcgggccgcgcggaccagctcgccgtccaccgggacggtcttgagccgtccggcaacttccttgagcggcaccggcacgatgcgatcgttctgcacggcgaccatgttgccgaatttcccctcacggatcagctcggccgccgccacgccaaggcgcgtgcacagcaggcggtctgccgcacagggcgcgccgccgcgctggaagtggccggggatcgtcacgcggatctcctgactggtgatcttctgcagctcatctgccaggcggtaggaaatggacggatacggcatggccgcccgggcggccttgaagtccttcttgctcatggcagcctcctcgcggctgatggcgccctccgccaccgcgacgatggagaagcgcttgcccccgcgggcgcgctgctggatggcagccgcaatggcccgcgcgtcataagggatctccgggataacgatgacgtccgcgccggaggcaatgcccgcatgcagtgtcagccagcctgccttatgtcccatgatctccacgataaacacgcggctgtgcgagaacgccgtggaatggatggaatcgatgacctccacggcgatgttcatggccgactggaagccgaacgtcacctgtgtgccccacaggtcattgtcgatggtcttcggcagcgtcacaacgggaatgccgtgctccgaaagcaggtttgccgtcttgtgcgtgccgttgccgccgaggatgaccaggcagtcaaagcgggcacggcggcaggtgtcgagcattttctcgagctttgtcgcctcgttctcctccgcctgctgcatggtcttgaacggctggcgcgacgtgccgaggatcgtgccgccgcgcgtgaggatatcggaaaaatcctgcggctccatggggtgatagtcgccctcgatgaggccgcggtagccgtcgcggatgccatagatggtcacggcggtcccgaattcctgatacagcgcctttgccacacctcgcagggccgcattcaggccctgacagtcgccgccggatgtcagcataccgattttcatggtttcgtccctcctgtaattcttcagcttgtcaaaaaaagtccctttgggctttttcgccaagctgatttcagaattgcaaaatagaattttgtattattattttgcaattctgccgctgcggcgggtgattgaacgtgaaaggacaccctgacggtttcctttcacactttccttccctccgaaacttttggcttggcagttttttgacagtctgagttcttatcatctctatcatcatacgactttttgccgcacttgaaaagggggttttgtcaaattttcatgattttacaacgccgggattgcagcagcggcgcatttccggtataatggagcaaaacatctggaaaggagcaggccccatgacggaaccgatctgggaaaagggctacacgcagaaccgggagctttcgtggctgcaattcaacgcccgcgtgcttgaggaggcggaggacgagaccgttcccctgctggagcgcgtgaaatttctctccattttcacgagcaatctcgatgaattctatatgatccgcgtcggcagcctcggcgacgtcgccgcgctgggcggccacggcgtggacaacaagtccggcctgacggcaaaggagcagctcgagcggatctatgcggcgacggccccgctgtatgagcggcgcgaccgtgtcttccgccgcgtggagcgggagcttggcgcagagggcctgcagcgcctgcgcatgagcgagctgacgcaggacgagcaccactatatccgccagctcttccgtacggccattcagccgctgctctcgccgcagatcgtcgacgcacatcatcccttcccccatcttgccagcaagacgctgcacgtcggcgtgcggctgtcgcggaaaaaatcggaattctggggtcttatccccatgccgccctccgtgccggagctgctgttcctgccggagcagaatggcatttgccgctacgttccgctcgaggaggtcctgctgttttacgcagacagcgtgtttgagatgtacagcacgctcgaaaaggtcgtgttctgcgtcacgcgcaatgcggacatcaacccggacgacgagccgttcgcgccggacggccgcgagatcgacctgcgcgccaagatggaaaagctgctgcgggagcgcaggcggctgtgcgtcgtgcgcgtggagctttccgcgcccatcagcgggcactttgccgagttgttccgcaagcgcttcgatatctccggcgaacagatcttcgtctcctgcgaggcgccgctgtgcatggactacgccttctcgctcggcgagcatctgccggaggcccgccgcgctgccctgtccgacccgcccttcacaccgcagcagcccgccatgctgctgcctggccagagcctgctgcgcgccgcgctgaagcgtgacctgttcctgtcctatccctatgaatccatggagccgttcctgcagatggtgcgcgaggcggccaatgcgccggacgttctgtccatccgcatcacgatctaccggctggcccgcaaggccaagctcgtggactatctctgcgccgccgccgaaaacggcaaggacgtaaccgtcctcatcgagctgcgcgcccgctttgacgagcagaacaacatcgactggtccgagcggctggaggaagcgggctgcaaggtgctctatggctttgaggactacaaggtccattccaagatctgcctcatcactctgcgggagcgcggcgcactgcgccatgtcacgcagatcggcacaggcaattataacgagaagaccgcaaagcagtacacggacgtctcccttgtcacagccgacccgagcatcggcgcggacgccgcggccttcttcagcaatatggcgctcggcaatctcgagggcagctacggcacgctgctcgttgcgccgcaccagctgaagaagccgatcctcgcacgcatcgaggaacagacggccctcggcccaaacggctacattctgatgaagttcaattctctgacggatatcgacgtcatccacgccctgtcgcgcgcctcgcaggcgggcgtccgcgtcgagctaatcatccgcggcatctgctgcctcgcccccggcgtgccgggctatacggacaacatcaccgtcacgagcatcgttggccgctttctggagcattcccgcatcttctgcttcggccgcggcgagcaggagcacgtctatatctcgtctgccgacatgatgacgcgtaataccgtccgccgcgtggagatcgcctgtcccattcgcagcccggagattcgccgcaggctccacgaaattctggacgccatgctggcggataccgtcaaggcgcgcgtcctgctgccggacggaacgtatacgaaaaagccaccttcctatgagccggtctgcgcacaggtcctgctcatgaagcgtgccgtcgaagccgcgcagcagcagagcaccgctgtcccgcagaaaaagcgctcgctctgggagaagctcttccaccggatgggatgctgaccatggcggaagcaccgtcgttttttgcctccgtctatgcgcttgtcgcgcagatcccacccggctttgtcgcctcctacggtcagctggcccgtatgctcggcgcgccgcgggccgcgcggcaggtcggctgggccatgcgccgctgcccggacgaactgccgtggcagcgcgtcatccgcgaggacggcacgatcgcaggcggggaatatgccccgctgcgccgcgccatgctggaggccgagggcgtcccgttcacacaggacggccgcgtcgccatcgaccgctgccgctggcagcccggggaagcgggtctcgtttgagagcctgtcgaaaaagcctcgcagagtttgcgcccgcaggcgcaaagaaaatggaaatcattttctccggcggcgtgtacgtcggagaaaataccgctcggctcgcaaacgtgcgaagggcacgcctgcggcgtgcccttcgtgcgctgcagcgagccgctgccccattcaaacgagagcccagtgaaacgggtctcgtttgagagcttgtcaaaaatccttttttgacaagctcaagggcagggtcgtttggccctgtccgtcgtttttttatttcccgcatttgccgcagctgcagcaggccgcgccgttttccgccgtgcggcagcggcgcttgcgatactccgtcggcacctcgccgtagacctcgcggaatgcctcggtgaagcggctctggctctcatagccgacggccttggcaatggccgcgatgtcgtcctgtgtctgcgtcaggcgtgcggcggccgcctccatgcggtgctgcttcatatgctgcgcgatggacgagccgtaaacgcgcttgaaggcacttttcagcgttgtcgtattcatcaggaattcgcgcgacagcgcctcgatcgtgatgcgctcggaaagatgctccgtgagataggtgtgcacgcggcggatgatttcctcctgcgaggcctgaaagtccacggtcttctccggacaggcgatctccatgacgcgctcgacgatctcgtgcagcaggcggctctcctccgtgtctgctgcgcggtagtagacctccttgccgtcgcggcggctgatgagcaggccgctctccgtcagggagcgcagatggtgcgacacggccgggctggacatctccagcatggcggccagattgatgacgcatgcctcctgatggctgagcagccagaaaatgcgcacgcgcgtcgggtcgctgagctgcttgaacacctcggctgcagccgcaaaatgcgccacctgcatgacctcctgatgcaggcttgccgcctgagacgacgtgccgtggtcgtgtggaagctgaaattctgccatagtctccctccgttctccgttttggaaattccgttcgcccgttccgaaacaagacggccgaaccgcttgcattttgggtccgcatccagtatactacagtcacaacgattaagcaagcattgaatcgttccaatattcattccttccggagcgccgctggcgcgcaaggaaaattttcaggaggtttttatcatgaagaagacgtatccgatcgaagttgactgcgcaaactgcgcgaacctgatggagcaggccacaaagaagaccgatggcgtcgccgacgcgaccgtgaatttcatgacccagaagatgatcgtggagttcgccgagggcgctgatcccaaggacgtcatgaagcgcgttctcaaggcctgcaagaaggtcgagccggactgcgagatcgagctttgaccctcccggcggcgcatcgcaagatacgctgccttttcctttggggtgacctctaaatcgatctgcggcggtggatgacggagctttttcgccaatccatcggtttggaaggtttgtggtacacaaagtacaactgcaccttccaaacctcgccttgacaaaaaagtctctcgccgtccactcttgcagattgatttcgagttccccttcccttttgaaaaatagaaaatcagaaagaaaagagaggtaaaccgagcatgaacaaaaagcagaaaagaatgctcatccgcatcgcgatcacggcagtcatgctcatcgcgcttgcattcctccccctgaccggtatctggcagctcctggcctatgtggccgcctacctcgtcatcggctacgatattctccgcaaggcaggcatcggcatcatccacggccgcgcatttgacgagtgcttcctgatggccatcgccacgctcggcgcgttcttcctcgccgtctggacgaagagcggcgactacgtcgagggcatctccgttatgctgttctaccagatcggcgagctgttccagagctacgccgtcggcaagagccgccgcaacatcagtgcgctgatggacatccgccccgattacgccaacatcgaaaaggacggcaagctcgagcaggtcgacccggatgaggtcaccgtcggcagcatcatcgtcgtgcagcccggcgaaaaggtcccgctggacggcgtcgtcgtcagcggcaattccaccctgaacaccagcgccctgacgggggagagtcttccccgcgatgtggcagagggcgacgagatcatcagcggctgcatcaatatgagcggtgtgctgaagatccgcacgacaaaggccttcggcgaatccaccgtctcgaaaattctcgaccttgtggagaacgccagctcccgcaagtcccgctccgaggcgttcatctcccgctttgcccgcatctacacgcctgccgtatgcatcggcgcggtgctgctgggcgttgccgtgccgctgctgcgcatggccttcggcgcaagcgcccagtgggtcgactgggtctaccgcgcgctgacgttcctcgtcgtgagctgcccgtgcgcccttgtcatcagcatcccgctgagcttcttcgccggcattggcggcgcaagcaaggagggcatcctcatcaagggctcgaactatctggaagcccttgccgcgacgaaggtcgtcgtgttcgacaagaccggcactctgacgcagggcgtgtttgaggtcacggccgtccatcacaacgagctggacgccgataaggtgctggaatatgccgcgctggccgagtgcgcctcgtcccatcccatcagcaagagcctgcagaaggcctacggcaaggccattgaccgcagccgcgttacaggtatcgaagagatcagcggccacggcatcacggcgaccgttgacggccacagcgtcgccgcaggcaacgccaagctcatgaaaaagctcggcatcgaataccacgactgccactgcgtcggcacaatcatccacatggccatcgacggcgtctacgccgggcacatcgtcatctccgatatcatcaagccgcactccgccgaggccattgcccgcctcaagaagtccggcgtctccaagaccgtcatgctcacgggcgacgcgcgccgcgtagccgagcaggtcgcaggcgagctgggcgtcgacgaggtccgcagcgagcttctgccgggcgacaaggtcgccgaggtcgaaaagctgctggcagaaaagtccccgaagaccaatctcgcctttgtcggcgacggcatcaacgacgcgcccgtcctgacccgcgcggacatcggcatcgccatgggtgccatgggcagcgacgccgccatcgaagccgcggacgttgtgctgatggacgacgatcccctgcagatcgccaaggccatccgcatctcgcgcaagtgcatcggcatcgtgcggcagaacatcgtgttctccctcatcgtgaaatttgcctgccttgccctgacggccgccggtatcacgaacatgtgggccgccatcttcgccgacgtcggcgtgatgatcctcgccgtgctcaacgccatccgcgccctgcgcgtccacaatctctgagttgaaatgatccccaaaaaattccgggcctgctgcattttttggcagcaggcccggatgctttttgccggttattttaaggcagctccgtcatagaatgcgcggccgacgaccgcgccgaggcggacataggtcttgttgaacgaatcataggtgatgggcgcgaccttgtccacgtcgaccttgccctccggcgtgagataggcctcgtccacgctgacgttcacgatctcgccaacgaggcggcagctctccggatcatagctcacaacgcggcaggaaacggcgatgggcagctcatcgatgcagggcgcgtcgacgaattcggactttgtggcatggaagccggcacgggcgaacttgtccggcacctggttgccggacaccagcccgacatagtcgcaggcgacgacctgctccgccgtgcccatgctgacggtaaacgcgccgcgggccagcaggtccttcaccgtgcggtgcgacgggctgacgcagaacgacagctcctgatcatcgctgatgccgccccaggcggcgttcatggcgcagggcgtgccatcctcgccataggcagccagaatgaacaccggctgcggataaatgcttgcatgtgcaccaaaattctttctcatcaagaaaagcactcctattctattgaaatatcaaaactcgcagagcaggcagaagctgctccggcggcaggtcagcaggccgtcccgctgcattttggacagctcattggacagcgcgctgcgttccacattcagataatcggcaagctgctggcggtcgaacgggatcgtaaagctgcggctccccgcccgccgcgcctgctcgccaaggtaggacagcagccgcgcacgaatggtgcgcgggccggtgtgcaggctgcgccgggaaagcgccagatttttctgcgccagcgtccggacgagattgcgaatgatgcggctgtggtgctcgcaggcgttcgtgcactgcgtcaggatgcgctttgcatcaagaaacagcacctcgcaggcctcactggccacaacgtcgacaagcagcggctcatccgatgcacaggcataggcctccgcaaacagctcgccgggctccgcgcgcccgagcagcgtgaccgcgccctgcatgtccgtgtgctcgatcaggacgctccccgtgagcaccagtcccatatatcgcgtaggctcccccgcccgcaggatccgttccccgcgcgcaaaacgccggggcgacgcgccgaggcagggcagcatggccgcgatctcctccgatgttgccccgcggaacagcggcgaggccagcagagccgcatcgttcattctttcttcctccgttggtattccaacatactttctcttgaatttggggtatgctatctggtaacagggtcatgcaaacgcgcggccggaaggaggatcattatggctattctgaaaaacatcgcgcaggagcaggtgctcccgcttgcacagcaggtcgaggccgaggccgggcagatcgtcagcaagacgcttgcccagaatgacgccgtcagcatcacgttgttcgccttctccaagggcgaggagatcagcacacacgcctccggcggcgacgcaatggtgctcgtgctcgagggcagcggccgctttaccatcgacggcagagagcatttctgctccgcgggcgagagcatcgtcatgcccgccgggaagccccacgcggtctatgccgccgaggacttcaagatgctgctgaccgtcgtgttcccgcagaactaaacccgcaccccgccgaacgtatagtcgtagaggccgctccacggcagctccccgcggatgcagggcagatactccgtgatgagcgtaaccgcctgcggcacggcctcgtcaaacaggcgctgcaggaccgcattgctctcggtgcactttgggtttggctcgtaattcacgatcatgccgtgcaggccgtggtacgcgccggcaaggtgcatgccggcatacagcgccgtgcgcttggcacggcccggcgcaaggaacagcgcgttgccccacaggaacgtccggatcgcctgctccgtctgccggggcgtcagctcatccggcagcagctccgccatcacggccgcgctgcgcgccgaggcatgcaggtggcccgtcaggctcgtgcggatcgggtccagcccggcctgcaccagcaggctgcggtcaaattcgacctcgatctccgtgtgagccacgccgctgcgcacgatctgctcggcaatgtagccgtggcaggcgcggtccagcgcaaagtggcacaaaaatccatagagatacgccgtttccggcgccggaaactccagtgcggccagcttctcccctgtggggcggaagaaggccgcaccactttgtttgtgcatccggtggccgaggcggctgacgtgcccgagcagcggatgatcaaaaaacagaatatcggggccgtgcagcccgatggaaaacaggttctgctccggcaggagcagctgctgcatttcctgcggcagtgccgcaagcacctgcctgccgaagcagcggtgcgcataagttgatggcatgaagcccacctcatgatctggaatctgtgcatagcataccacattccggcagttttgaaaagcgtttttcgtgcagggcggtcatttgttttcaaatccttcacagttccgacatttgattttcacgccgctttatgatatacttattgtttagaaaaacacatgtgagggtacccgttatgaaacactgctatcgggcgggcatcgacatcggctcaaccaccgcaaagctcgttattctggacgaacgcggcgtcctgtgctatagcgattaccgccgccactgtgcgcacacgcaggaaacacttgccgagctgctggaggacgcctgcgcaaagctcggcccctgcgacctgcgcctgaagatcaccggctccggcgccatcaacctcggcaaagccctgaacatcggctttgtgcaggaggtcgttgccgtggcctccagcctgcaggccattgccccgcagacggacgtcgccattgagctgggcggtgaggatgcgaagatcatctacttccgcggcgggctggaggagcgcatgaacggcgtctgcgcaggcggcaccggctcgttcatcgaccagatggccgcgctcctgcagacggatgccgagggtctgaaccgcgccgcggcggactatcgcgagctctatcccatcgccgcgcgctgcggcgtgttcgccaagtcggacatccagcccctcatcaacgagggcgcaacgctgcccgatctggcggcctccatttttcaggccgtcgtcaaccagaccatctccggccttgcctgcggcaagcccatccgcggctgcgtcgccttcctcggcggcccgctgcacttcctgccggagctcaaaaaggccttcatccgcacgctgcacctgacgctggagaatatcgtcgatcccgacaactcccatctgtttgctgccatgggcgctgccctcgaggcgggcgatgccgagccggcggatgccgccgcgcttgccgcaaagctgcgcagcggcgtgcagatggcttttgagctcaaacgcctgccgccgctgtttgcggaccgcgcagagtacgatgccttccgcgctcgccatgaccgcgcgcaggtccataaggcagcactgcatccctgccgctgcttcctcggcatcgacgcaggctccaccacaacaaagcttgccctcatcgacgaggacggcgcgctgctgtggtcgttttacgccaacaatcagggctcaccggtgcagacggccatgcacgccatgcgcctgctcggtgaacagctcccgccgggcgcggagatcgcgcgctcctgctcgaccggctacggcgagacgctgctgaagtccgccttcctgctcgatgacggcgaggtcgagaccatcgcgcactatgaggccgctgccttcttcgacccggacgtcgactgcattctggacatcggcgggcaggatatgaagtgcatccgcattcgcaatcactccgtggattccattctgctcaatgaggcctgctcgtccggctgcggctcatttatcgaaaatttcgccaattcccttggctacaccgccgcggttttcgcgcaggaggcgctgtttgccgcccatcccatcgatcttggcacgcgctgcaccgtgttcatgaactccaacgtcaagcaggcgcagaaggagggcgcgaccgtgcaggatatctccgctggtctcgcctactccgtcatcaaaaatgcgctgtataaggtcatcaagctcgccgatgcccgcgacatgggccgccacatcgtcgtgcagggcggcacattctacaatcaggccgtgctgcgcgcctttgagcgcatcgcgggcgtcgaggccacctgcccggatatcgcaggcatcatgggcgcgttcggcgcggccctgatcgcccgcgaccgctggacggggcagcgatcggccatgctccccatcgcggacattctgaagctgcaatatacgacgcagaccacgcgctgctccggctgcggcaaccgctgcatgctgaccatcaatgaattctcgaacggccagcgccacgtcaccggcaaccgctgcgaaaagggcctcggcggcacgccgaaggagaaccgtgcgccgaatgtcatggcctataagctcaagcgcatgttcgactatcccccgctgccggagaaggacgcgccgcgcggccgcatcggcatcccgcgcgtgctgaatctctatgagaactacccgttctgggcaacattcttccgccagctcggcttttccgtcctgctctcgccgcgctccacgcgcaagatctatgagctgggcatggagtccatcccctcagagtcggagtgctatcccgcaaagctggcccacggccatgtgcagtggctcatcgaccacggcatcaggaccattttccacccctgcgtgttctatgagcatcaggagacgcccggcgcacagaaccacttcaactgtcccatcgtcgtctcctaccccgaaaatcttaaaaataacgtcgacgccatcggcgaggacggtgtgacctatctgcgccccttcctcgcctttacggatgagaaggccgctgcgaagcgcctggctgacttctgcaaagagacatggagcatttctgcctcggagacccgtgccgccgtccatgccgcatggctcgagcagcagcgcgcaaaggccgacatccgcgcgcagggcgcggcggcgctcgcgtggatcgagcagaatcacggccgcggcatcgtgctggcgggccgcccgtaccacgtcgacccggagatcaaccacggcatcccggagctcatcgcctcctacgatctggccgtgctgaccgaggattctcttcccatcgacttcacgcctgcccggccgctgcgcgcaaacgaccagtgggtctatcactcccgcctctatacggcggcggagttcgtccgaacccgcccggagctcgagctcgtccagctcaactccttcggctgcgggctcgacgccgtcacgaccgaccaggtcgcggagattctggagaagagcaaccgtctctacaccgttctgaagatcgacgaggtctcgaatctcggcgcggcgcgcatccgcatccgcagcctcatcgccgccatggacctgcgcgcccggcagggcatcctccccacggcaggtcccgtccgctatgagcgtgccgtcttcacggagcagatgcgccgcgagcactggaccatcctcgcgccgcagatgtcccccatccacttcgatctgctcggcccgacgttccgcaaatacggctatcacatcgaaattctcggcaacgacaaccgcagcgccatcgacacgggcctgaaatacgtcaataacgacgcctgcttcccctccatcacggtcgtcggccagatcatgagcgccattctgtccggaaaatacgacacagatcatctcgccgtcgccatgacgcagaccggcggctgctgccgcgccagcaactatgtcggcttcattcgccgcgcgctggagaaggccgggctcggccatatccccgtcatctccatcaacgccaacggcatggaaaagaatccgggcttccgcgcctcccccggcctgctgatggatgcgttccgctcgctcgtctacggcgacctgctcatgcgctgcctgtaccgcgtacggccgtatgaaaaggtccccggcagcgcgaacgccctgcacgccaaatggcgcgatcgctgcgtcgcctcgctcaccagcagtcacgccgggcgggactaccgccgcctctgccgcgagatcgtcgaggatttcgacgtgctcccgctggacgagacgctccgcaagccgcgcatcggcgtcgtgggcgaaattctcgtcaaatacatgccgcttgccaacaaccacctcgtcgacctgctcgagcgcgagggtgcggaggccgtcgtgccggacctcatggacttcatgaattactgcgtctacaacggcggctacaagcacgagttcctcggcgggagcctgggcggcgcgcttgtcggccagctcggcgtcaaggccattcgttacctgcgccgcccggtgctcgacgcgctgcaggccagccgccgctttgaaccgcctatggagatcgcggacgtcgccgagctggcaaagcccttcctctcccttggcaaccagtacggcgagggctggttcctcaccggcgagatggtcgagctcatccgcagcggcgtaccgaacattgtctgcatccagccctttgcctgcctgccgaaccacgtcgtcggcaagggcgtcatcaagtctctgcgccgcgcctatcccgaggccaatatcgtcgccgtggactatgaccccggcgcatccgaggtcaaccagctcaaccgcatcaagctcatgctctccaccgcacgcaaaaatctgaacgcccggcccgccgacccgcagcccgctgccgtcgtctgaccgtccccgcgaaaaatccgaaaaaagccaaaatagtgcttgcaaatttcatccggatgtgctatgatatctaggcaaaatgaaatccgggtgtagcgaagtttggtatcgcgcttgaatggggttcaagaggccgctggttcgaatccagtcactcggaccataagtccaccgtaattttgatagaattacggtggactttttctacgcccgaaaaccgcttgaaataaggcttttcagatgtttcagcacataagcgaaccccgctgcaggcaattctgcggcggggttttgtgcgttttacggtttttgtggtgactttggccaaagtaagcgttaaatttatgggtattcgttg

SEQ ID NO: 11157 - DNA, 6633 bp, Unknown
  gut microbiota DNA sequence
gccctgcttcaggttgacgccgacttcgttggcggcttccatcttgaacttgtccatggcctcgcgagcttccgggatattgatctggttcgtatttttcattgcgtacatctccttgaaatgtgattttgggtaccgcagtcatagcattgcccgaaaaagatcgaatatgccggaagtctgtcagggaatttccggccgttcttctgaaaattgggcggcggaaaatgctgtcaaaagcaattgacaaattccggacggctctctataatgaattaaagtgatgaacaaaggcgcggcttgcgcagcgtttgccgcggcgggccgatactctgtttcagagcacaaggataccggcaaggccggcagcgatttctgctcgctgaaaacaggagagtgaaccatgaaagcagtacgattaaaaacggaatatctgcaggaccctttgggcattgatattccgcatccgcggctgttctggacttgtgaggacgggatcacgcagagcgcattccagatccttgcagcgacggacggccgtacggtatgggacagcgggaaggtgccctccggctccatgcacgcggattatccaaacgcgcttgcttcccggcagcgcgtcagctggcgcgtgcggctctgggatgagaacgacgatcccggcgcgtggtcgagcgaggcctttttcgaaatggggcttctgaatgcttcggactggagcgccctgtggatcgcgggggactatcccgtccgtaaaaagcagcgctacccggtggattgcttccgcaaggtgttttccgcgggacaggttcaaaaggcccggctgtatcttacggcctgcggcctgtatgaggcgcggctcaacggccggcgcgtcggggacgcgctgctgacgcccggctccacggactaccgcaagcgcatccagtatcaggtctacgatgtgacggacctgctgcggggcggcgaaaacgccatgaccgtcgagctggcggacggctggtaccgcggctccaacggcggcgcagggcagacgaacaccttcggcacgcagacaaagctgctggcgcagctggagctgacgctggcggacggaacgacgcagaccgtctgcagcgacgggagctgggcgtggagcaatgacggccccatccgctttgccgacctcaaggacggcgagatcgtggatgcaaatcgcgagccctcctattccggcagtgtccgcgtcgtggaggagcatgcgcctctgacggcatccgacaacgtaccggtcctcgagcgcgagcgctttgccccggtcgaacggatcacaacgccgtccggcaagactgtcctcaaatatgcgcagaatctttcgggctatgtgtccttccgtgtgacggcacacaagggccagcgagtccacatcacgatgggcgaaacgctcgatgacagcggcgaactgacgctccggaacatccagtgcgttaccaaaggaagaccctcaccgctgcaggagctggattacacctgcagggagggcgtgaacgaatacacgccgaaattctattacggcggcttccagtatgcgcaggtcgacacggacgtcgaattccggacagaggactttacggctgttgctgtgtacagcgcctttgaggaaacttcaaaattcgagtgctccaatcgcctgatcagccaattttaccacaacactctgtggtccctgaagagcaactccaccgacgtgccgacggactgcccgacgcgtgagcgcatgggctggacgggcgacagtcaggtcttcttcaacacggcgtcctatctcacggactatgcggcctttgcccgcaagcatgtgcgcgacatttttgaccgccagtggcgcagcggccgcctgccgcagatcgcgccgtttgcaaacgagtcgccgagcatcaacaaaatgaacggctccgtcggctgggcgtgcgcaggtgtctatatcccgtactatttctatcagaaatacggcgacgaccgcctgctgcgtgcgtattacgacaacatgctgcgctatgcggactttatgatccgccgcgcggggaaatggggcgggatcttcgccaaacccatgcatcttgctcacaaaaatcgaaagtatgctgttaactgcggcaagtcctacggcgagtgggccgagccgaatgacgtcatggccttccacgggatcgactttttcattccgcacccggaggaatccacggcctatacatattttacgctcaagcgtgtgctggagatcgcctcgatcctcggcaagccggaaacgccgcagctggcgcgcatccgggaatacagcgagggcgcgaaacgcgcctatcaggaactcgttacgaaggacggctactcgctggataccgaccggcaggccaagctcgtccggcccttgtatatggggctgctgacgccggagcaggaggcctttgccagaaagcgcctcatcgccgcgctggaccactatggctggcgtctcgggaccggcttcctctccacgccgatgatcctggacgttctggcggggctggatatcagctatgcctaccgtctgctggaaaacgaggaaatgcccggctggctctttatgccaaagtccggcgcaacgacgatctgggaggcctgggagggcaaccagaaggacaaatggatcgcctcgctgaaccactattccaaaggcgcggtctgcgagtggctgatgaacacgatgtgcggcatccggatcaccggagaaaaccatgttacaattgcaccgaagcccggcggggacatcaccttcgcacgggctagttattggagcatttgtggaaacgttacgacaagctgggagcggacggagaacggctatcggctgaccgtgggcatccctgcgaacacaacggcggagatcctcctgccggacggaacgggccggaccgtcggagccggacagcatcggtatgaatggaaatgaaacgatatttccttgccatcgacatcggcgcgtcctccgggcggcacattgtgggctggcgggaggacggcgaaatcaaagcaaaagaggtctaccgcttccccaacggcgtacaggagcagaacggccatctcgtctgggacgtggatgcgctgcttccccatgtgaaggcgggcatcgcggcggcgaaggccgagttcccggagatcgtcagcctgtctgtcgatacctgggccgtggactatgtgctgctgcgcggcgaggaagaagtccgtcccgtctatgcctaccgcgacagccgcacggaggcggccattcccaaggttcacgaaattctgccgtttgcggagctgtacgccaaaaccggctgccagttccagccgttcaacagcatctaccagctctatgccggtcagctggcggggcggctggagggcgtgacggattttctgatgatcccggagtatctcctctggaagctctgcggtgtgaagtccaaggagtacaccaacgccactaccaccggcatggtaaacgcagaaacgggcaaatttgacccggagattatttcagcgctcggcctgccgcccatcttccccaaactccaaaagccggggacggtgctgggcgagtatgaggggataaagtgcgtcctctgcgccacccacgacacagcctcagcggtggagggtatccctatggacgggagccagccctacatttcctccggtacatggtcgctcttgggcgtcaaaacgccgaagcccattacaaatactgccagccgtgccgccaattactccaacgagggcggcgtgggctataaccgctatcagaagaacatcatgggcatgtggctggtcaacgagctgcaaaaggagctttgcagcgggctgggctttgcggagatcgtgaacgccgcaaaggagagccgctgcgatgccctcatcgacgccaacgcgccggaatttctcgctcccaagagcatgaaggccgcctttgacacggcgacgggcggaaagctcatcagcatcggcgactatttccgctgcgcctatcgcagccttgcagagagctatgcgaaagcccttgcagagctggagcgaaacactggaaagcaatacgacaagctgtacatcgtgggcggcggtgcgaaaaatgagtttctcaaccatctcaccgccaaggccaccggcaggcgggtcgttgccctgcccattgaggcgacggcgctggggaatctgaaaatacaaatggaggcagacctatgagctatacggaagcaaaagaaaaatacgccgccctcggtgtggataccgaagcggcgcttacaaagctgaaaaccgtgccgctgtctctgcactgctggcagggcgatgatgtgcgcggtttcgacaccgaccccaccaagccccttaccggcggtatccagaccaccggcagctatcccggccgtgcgagtacgccgcaggagctgatggcggatatcgaggaggtgctgaagctgtgccccggcacgaagaagctgaatctccacgccagctatgctatttttgccgagggcgagtgggtcgaccgcgataagctggagccgaagcattttgcaccgtgggtggacttctgcaaaaagtacggcctcggcgcggacttcaacccgacgttcttctcccaccctaagtgtgatccgctgacgctcagctcccccaacgaggagacccgccgcttttgggtggagcacggcaaagcctgcgtgcgcatctcgcagtatctggcggaggagttggggcaggtctgtaccatgaacatctggacgggcgacggcttcaaggacattcccactgaccgcctcgggccgcgcatgcgctataaggaatccatcgacgaaattctctctgagccctttgacttcaataaggtcaagccctgcgtggagagcaaggtgttcggcatcggcgtggagagctacaccgtcggttcggcggaattcgccctgagctacgccgccatgaatcccggcaaatgcatccccctgatggacaacggccactatcaccccaccgaggtggtcagcgacaaaattccggcgctgctgaccttcttcccggagatcgccctgcacattacccgcccggtgcgctgggacagtgaccatgtggtattgtttgacgatgaaacaaaggaactctgcaaggagatcgcccgctgcggcggcttggacggccgtgtgcatctggcgctggactacttcgacgcctccgtcaaccgcatcgccgcgtgggtcacgggcttccgcaatgtgcagaaggccctgctgaacgccctgctgacgccggatatgacggctgaacagaacgcgggtaattttaccgatctgctcgttcggcaggaggaactgaagaccatgcccttcggcgaggtctgggcagagtattgccgccgctgcggcgtgccggaggacggcgcatggctgccgctggtgcgggcgtatgaaaagaacgttctggaggcgagagcatgaaaaatattctgacagccccgtggatggtggagatgatccgcaccgtgacgaatatgtacgaccacggctgggacgagcgcaacggcggaaatgtgagcctgctgctggaggaatcgcaggtcaacgattatgtggacggcgcggttctgcgggagattcccacgggcttttcctgtccagagctggacggcaagtacttcctcgtcaccggcacgggcaaatatttcaagaatgtccagtatgcgccggagatcaatctcggcctcgtgcgtctgacggacggcggcgagacggcgcagcttctgtggggctttgcggacggcgggaaattcacgtccgaatttccggcacacatgatgagccatgccgcacggctgaaaatcgacctgcagaaccgcgtggtcatgcactgccatccggcaaacctgcttgccatgacctatgtccacagcttggacgaaaaggcctttacccgtaccctatggcagatgtgcacggagtgcatcgtcgtctttccggacggcgtgaatgtgctgccgtggatgctctgcggcaccaatgaaatcggcattgccacggcggagaagatgcagaccgcccggcttgttgtctgggcgcagcatggcatctacggcgcgggaaaagacctcgacgagacgttcggcctcatcgagaccgccgaaaaggcggcagagatttacatgaagatcgcccatctgccactggtaaataccattaccgatgaccagatgcaccagttagaggcccacttcggcgtgaaggcaagagagggctatctgtcttaatttcaaattcaaagatgtgtaacagaacaggaaaatgcgccacctaaaaggaaaatcaatgcccccctcaaattgagaactgccccctccgaaccgaagttgcacccctttacacggtttctatcaaaattagagtcatttgccataagtccaccgtaattttgatagaattacggtggactttttctatgcccaaaaaccgtttgaaatcaggcatttcggctgtttcagcgcataagtgaaccccgctgcagagcaattctgcggcggggttttgtgcgttttacggtttttgtggtgactttggccaaagcaagcgttaaatttatgggtattcgttg

SEQ ID NO: 11158 - DNA, 1868 bp, Unknown
  gut microbiota DNA sequence
gcaattctgcggcggggttttgtgcgttttacgttttttgtggtgagtttggccaaagtaagcgttaaatttatgggtattcgttgaattttagggtattcgttaaatcattgcctttttcgctaaaatgtaccccataaagtggacactctaattgtgcgaagcccaagggctggggaattaaaaagtttgaataccaaactatagacaatttcctcgctgcccacgaaaatgtgcgtcaactcggtcgtgtttttgaaaggggtatcaacaacctatttcagtcttctcatctcataccctacaacacagtaaggaaggatatgcctcccaaagggcgcaataagcaccctctgggaatatggtacatcttcggaacggaacgcacaaggttaatagaattgctcgatttcgcggatttcgccggtgtcaacatcctgaaaaatatacttaacgccgtccggaattttcgatctgctgatgtactgcattggtgagttctttcccatgggccattcaccgccttgaatccagtaagggcgttttttatcagaaatatggaacacctcctttagcttcgcgcggatttctttaatgcttttacttttgggcgtgataaaaagcgcatcttcaacaatcttattcaaagtctgtgttacctcgggcccttcgtaatattctccaacagcagcaaggtatcgatcatgcgcatcaaaatatttgttagtacagcataaatccggcttataataaagataagcacagcgaatattgtaaaaaatattcaaattatctctaattgttccatcaaatcgtgccaaatcggttacaagtcgcagaaaattaaagtttctttccagtagagcgtcatatgacatttctttccagaatgcatgactacgattaccaatcgcttcttgaggaacaaatccgcgaattatttcctgaagacttttgtccgattttaagagaattataaaatcagacattttcatcttgccagtcaacatttgttctattaaatacatctatttattatactcctcattttaaaacataatgtataatcctatgcaaggttttacttaccggggaataattataaaaatcgtttgcaatgcccgcccaatgatgcagttgcaccgatgcattatcccagcctattggggccagccctcgacgcattctatcaatgttgtcaatatctgcaacataagcaccgtaattcttatttagttcagcactttgggctgtgtctttccagtatcgccgtctttcgctcctccatcgcgaattatgattacacgaattatgcaccaacacaccattgtcggatacataataggtatgatagtcctcgacctggaagttatagaccttgacagggctttcgagcagctcgtgctggattttttcgacgacgacatactcaccgttgacaaggacgagaatgtcgcccgcgcggaggtgcgctgcatccgtccagcccttgaccggacaatagaacgggtgcgtcggcgtggcaacaatttcctcgccgcccacgaaaatgtgcgtcagctccgtcgtctcgttgatataggtttcgacgaccggcttgagcgcaacgtccccggtttcttcatcccacgtccaaacaaggtcccccgctctgattttttcaattgcaacataccctgtcgctgtagcaaccagcgttccggcgacaaagcatgagccatatcttagatggttcgcatagccgctcatgccgccttgtattgcgccggtgattgcgccggtaagagcgccgtcacccatgccctccagtgcagcctgcccggcgcctttccagcttccggtttttaatcggtggctgacagcaccct

SEQ ID NO: 11159 - DNA, 1506 bp, Unknown
  gut microbiota DNA sequence
tgcgactgctgtggcaagacgacccatattttctataccaatccgttcttttccgtggaggatattgcatatctgtgcccggcgtgtatcgccagcggcgaggcggcccggaaatatgacggcagctttcaagatgatttctctgtggacgatggcgtagacgatccggagaagctggacgagctgatccaccgtactcccggctactccggctggcagcaggaatactggcgggcccactgtggcgattactgcgccttttggggctatgtgggcgccagagaactgcgggcactgggtgtgctggaggaggtgctggacgaccccatgtgggacgaggagcagaagggaatgatccgggaatccgtcaatggcgggcatctgcaatgctatctgttccagtgcctccactgcggaaaacacctggtctggatggattttgattgaaaaggagacattactatgggacttgacatctacgccgggacgctgacccggtactattctcacaactggaaaactgttgtgcagcagtgggcggaggaaaacggatactctttcaaccgcatcaccccggacggggaacctgctgataacgaggaagaaatgtccccggctgaggtccaggcggcggtggagaactggcgggatcagatcttgagcgccatttctcagccgggccagcccccctacgctccctggcttgaagataatgagaaaccttattacaccgacaagccggattgggatgccttcggcgctatgctgctggtggccgcctgtcatacatacgaggaaccggtgcctctcaccgtggagaaggactgggacttcggggagcatcccctgattgcccgccttgcatcggacgaggagcgggtgtggtccctgcttcggggcgcgacttggtggcttcccctcaccgacagctttctattccaaggccctctgcccaccgatgatcagacgatgatcgccaccttgggcggactgcggaaggagctggaaaagctgaaccagctggcatggcaggccgatgaggacactatccttggttgggcagacacggagggatacccggtagacggaaccgtagactcagatggacagtacagcaaggcagacatcccggaacacacccagtatgacacccaatccttggccaagtttgccttctccgtgttctggcgggccatgcggtttgccgaggagcagcaggtgcctatcctgcttgactattaaagagaattcgtcagggggtggagaccgtggaacaaaaacggccggcagatataattcaggaacttctggactacctgtggaacggcctgggcctggaggaaaagggctggaagcgtctgaaaaagggcgacttcaaaaagaaaatgaaaaacgggctgacctatcagatctggtttgaccggagccgctacaactacatagactacgaaatcggccatgggaatgtggaggtgggcttcacaggcattgacgatgatatccacg

SEQ ID NO: 11160 - DNA, 7405 bp, Unknown
  gut microbiota DNA sequence
ctgcgattttatgacaaggagtggctgctgccgtttgtggagcggttgccgggcggcatccgcatgtttcaggacaccgatctggagtggctgcagatcaccggctgcatgaaaaaggccggaatgtccatccgtgacatccggcagtatatcgagcaggcccagcggggagacgataccatcgccctgcgcctcgtaatactccatcgtcagcgcgaggtcctgcttggctggttgtctgctttttgcgtttatactgcatcgtatacgacggagaggacatagtcctccgtgacggtctgctcgaggcggcggccgaacagcgtttcgtgcaagccgtctgctgctgcggcgggcagcgtgcggaaatcgacgccgaggccttcgccggtgtatttgacccatgcctccttcgcggtccagagctgcaggaagcgcagggggtcgaagacgccgcccggcgcggcaaagaccagctcctccggcgtgcagatgcgcgcagccagcgcggcgcggacggggcggcgagcctcaaggtcgacaccgacggtgctcttgtgcacggcgcagcacacgaagcttccggagtggctgcagttgaaggccgggcctccgggcacatagggcttgccgttcctcccgacccggatcacgggcgtctgcgcacctgcctcgcggagcagcatacgcgccagatggtcggcgcagatgctgcgggcgcggtcatcgggtcggcggaactgctgccagcgggcgcggcgctccggctctgctgcggcttcccaccgggcaagctccgctgcggagacggtccggatgtcaagaacggcgcagcgcatagcttgaccaccacgggcccgtcaggcggacgtaggcatattccagcggaacggtgagtacagagccgatgagccatgcggcaaacagcggcaggccgagcgggtgcaggatgcagcagaacagcagccgcagcgacgtgcgcacggctgcgccgaacagcatgcgcggcccacaggcataacgcacgcggcggaagaccagaaagcggttgaagcagtagctcagcgccgcgctgcccgcaccacacagcgggatggaaaacaggaaaaaatgccacccgagcgtcagcgacagcagcaggatagcagctacatgcagcagccacgccagaacggagccgcgcgccgtatccagcattcggcgataaatgcgcagcgtatcgcgcagcgggtcaaagtgtgagctctggttgccgtcgagatagaccgtctcgatgggcagctgcgtgatggacagctcctgccgcgcggcgtagagcagcacgttcatttcataatcatatttctctccgccgatctccgtgagccacggcaggcagtctgtggaaaagccgcgcaggccggactggttgtcctccagaaagcagcctgccgccagcgaaaagaagaagcgcgacaggtcgttgcccacgcgcgagcggagcgggacgcttttgccgtgcagcgtccgggtggtgagcacgaagcggctgccggacagcagtgcctcgcgcacgcgcaggatgtccgccacggtatgctggccgtcggcatctgcggtgatgaatgcgcggcagccctgcgggtccgcagccagatggcgcagggcgcatttcagtgcgcggcccttgcccctgttctcagggcaggtcaggacctcggcatagggcagcagcgcggaaaaaatatccgcataggcagggccgctgccgtcgtccgtgacgatcagccggaagttctcccggtgcagggcctgcaccagcgagatcagaacgctatccggctgatacgccgggatcaaaactgcgatctccatttctttccccctctgtggtcggtctgcgctgcttcgtcatgcgtggaagcacagcagcagaagcccgcccagaaatgtcaggagatccagcagcccgagcgcccagtcatagccgcctggcatccggaacaggttgaccagcagcacgacggcactcagcagcaggaaaaacacaccgaagaacagcctggcaaggggatgcccctttttcttttccattcgggtacctccatacattatatcaatttattatatttccgggcccggccattgtcaaggacggcggcgcggaaacgggatttttccgccggaaaacgccgcgttggttgacgcgcgcgggcgggtatggtatgatacccttatataaccccggcggggcagcatgggcctgcgccggtagtgaggagacagaacagcatggttttttggaaacgggagctgcgggagctggaggcttccgggcaccggttcgaggatattttccgcattttttcgacggaattcacggacacgcccttttctctgcagtttacggccgggcagacgcagcgcatgagctatgcggagctgacggctctgacgaaccgcttggcgcgtgtgctgcatgcgcactttgccgggcaggagggcgcgtttctggcgatccgcatggaaaattctcccctgtgggtcgcggcgttttttggcacgctgatggcgggctttcggcctctgctgctgaacctgcggctggacgacgcgacgctggccccggtcgagcagctggcggcgggcgttctgacggaccggccgcgcgcgggctgtatcgatctgtccgcggccggtgatgcggcgggattcacgcccgtctgggccgatgagatcgccctgatgacctccggcacgaccggcacgccgaagctcgtgctctatgacggcgctgccatcacggcgcagctgctgcagtctgagagcatcgtgcgcaagtgcccggaggtcaagcacgaccggctggcgcgcgagctgcggatgctggcatttttgccgttctatcatattttcggcctgatggcctcgctcttgtggttcattttcttcggcgtgacgttcgtgtttctcgagcgctacgacagccgcagcatccagtatgcctgcaaggtcggccgcgtgacgcacttttttgctgtgcccgccgtgtgggagcagacggcccgccagctcctgcgcgaggcagagcggcaggggcagaaggaaaagctcctgcgcgccgtgcgcttctccaacgggctgcagtccgtcttcccgcggctcggcgcaaggctggcgcggcgcgtgctgttccgccgtgtgcgggaacaggcgctcggcacggagccaatgttctgcatcagcggcggaggcttcctgcagccgcaggcggccgagctgatgaacggcctcggctacggcatgcacaacggctacggcatgacggagacgggcatcctgtccgtcgagctgtcgcggcgggccaaatggcggctgtccggcggcgtcggtctgcctctgcaggcgctctccggcggctggcgcattgcggaagacggcgtgctggagctgcgctctccgcttctatacacggccatgcttgaaaacggtgtgcgcgtgccgcgcgatccggaggcatggttccgcacgcgggacgtcttccgcgccgagggcggccggtggtatatggaggcccggcagggcgacctgatcattggcgcgaacggtgaaaatctcagtccggatctgatcgagcagcgccttgccctgcaggccgggacggccagttgtgtgctcggcatggagctggagggcgatgagcgccccgtgctgatcgtgcagacggctgcggacgactatgcaagagccagagcctccgctgcggcctatgaggcggtcgcccgcctgccgctgacgatgcgcccggcgcgtattttcctgacggagcaggagctgcccatcagcttcggcaagccccgccgcgcagagctgcgcgaaaaactggcggacggctcgatcgtcctgaccccggcgcaccggccggagccggaggagctgacccggctggaggacgagagcagccgcgcgctcgtgcaggagctgtgtgagcttctcggctccgtgacggggcagaccgtcggcccggacacgcagctcctgcaggagctcggcgtggacagcctgacgtactataatattttttccgccgtttcggagcgctacggcatcagcctgacgatggatgccgcgcacccgctgttcacagcgcgggactttgccgacgcagtgcaggcggagcgggaggcggtcgaatgaagctgctgttccgctggatcaacaagctgctgtgcggctggaacgtcggtctgtatttccggccgcgcatccgctacgagggcaaaaagtgcctcccggccttcacacgcggcccggcaattatcatcacgaaccataagaaccagatggactttcttctggtgctgtatctgttctatttccgttatgtccgctgcctcgtcggtaagacgttttatgagtgcaaccgcttcctgaactggtgcctgcggatgctcggcgccatcaaggtcgatcgcttctcgttcggcatggactttttctgcgagtcggtcgaggcgctccggcgcgggcagctgctgctcatttttccggaggggcgcttttccacgaccggagaaattctggaattccgcagcacggcggccctgctcgcgctgcagaccgatgtgcccatcatccccatgtggcactccgtgaactatggcttcggcaagcgcacggacgtcgtcatcggtgagccgatccgcctttcggagctgtgcagcacggcaaacccggacgcggcggagctggaccgcctgacggccatcctgcgtgacaaggtcatcgagctgcgcggcatggcgcaggaggcgtgagccatgcggaagctgctgcagcggctgtgggatatcgccgcagattttgcaaatttcatgggcggcctcggcatgcgccttgtctggctgccgaagctccatttttcgcccggcgcggagcatgtgcgcacggaccccggtccggcgctgttcgtgctgaatcacagctggtggatggatgccccgatgctgtgcctgctgtgccgctgcagacgcatttccgtcgtggcggcgggcgagatgttcacgggcgtgcgcagccttgccatgcgctcgctgcgctgcattccggtcgaccgggccgcgggcgcggacctgagcttcttccatgaggcgctgcgccgcctgcgcgcgggccggtgcgtcgccatcttcccggagggggcgctcaacccgacggaaacgctcctgccgttcaagcagggcgcggcgctgctggccctgcaggccggggtgccggtcatccccgtctacagcgcggggaattatcagccgttccagcggctgcagctccagttcggcgcgcccatcgtgctgacgcagcggccgaacgccgcaggcgtgcaggaggcgacgcagtgcctgcaggaggccatggagcgcctgcaggaggagctttatctggagatgaaaccgaaatatcggacgcgcgcggcggaatttcaccgccgcttccgggaaacaacgctccggcggcagcgggagcagcaaaaaggagagagaaatcatgacgcttgaacgcctgatccgtgttgcgcagacggcgctggagggctcggaggcagatctcggccatgtgacggcgcagacccgcctgcaggaggacctcggcctgaacagcatcacgatgctgatgctcatgatcggcatcgaggacgaattttccatccgcttcccgacggaacgcctgccggagctgcacaccgtcggcgatgtggtcgccgtcatcgaggagctgctccatgctccggcgtaaacggctggcagacctgccggaacactgggacttcggcgagctgacgcccggtgcgcaggtgcgtgtgcggcgcagcgggtattaccaccatggcatttacatcggaaacggtgagatcgtccattttgacggctcgccgaatgagcaggatgctgcggccgtgcgggtgcgccgcaccggcatggaggaattcctgcgcggcggcctgccggaacttcgtatctatggccgcgcggagcgaaagctgctgcgcgcgccggatgagatcgttgcagccgcgctttctgccgtcggccgcagcggctatgactatcggacgaacaattgtgagcacttttccaacgaatgcgcgtttggagagcactacagccgccagagcggggagggaaacgaatgaaaaagtggtggatcgttttggcagtcgttctgacgatcgctgtcgcggcggtcgtcggctatatgctcagcacggcgccgcgcggcgtggagagcctgcaggccacgcagccggagacggccgcgcccacggagcccgcaacagagcgcccgacggagccgccgaccgaagcgccgacggagccgcccatggaggcgggcgagacgctggtcctcaacgggacggagcttgtcacggccgtttcggacggaacggaatacgtttcggcagacgcgctgcagcaggcggggcttcccctgccggaggcggagccgcttcaaaacggcgggatggactattatgtgctgtccgccgtctcggaggagaatcgctgcgcggaatatgtcgacgacgagaccggacttcgctatctgacgcccggtgcggcgcgcttttccatcgagcagagcgtgaacgtgccggtgctgatgtaccatgctgtcagcgacaatatgtggggcatcgatgagctgtttgtcagcccggcctccatggaggagcagctgcggtatcttgtgggcaacggctatgagccgatctggttctccgatctggcggagctggagcagtacgagaagcctgtcatcctgacgtttgacgacggctatgacgacaactacacggagcttctgccgctgctgcggaaatacaatgtcaaagcgacggtgttcatgatcgccgatgccatgggcatgcagcacaaaatgacggaggagcaggtgcgcgagatggcggattccggcctcgtttccatccagagccacggcctgacccatgcggatatggatgccatggacgaggagacgcttatccgggagcttggcgagtcgcagcgtatcctgacgcgcgtgacgggccgccagccctcggtgctgtgctatccgacgggccgctacagcgacctgacgctcgaggtcgcagagcgctactacaacttcggcctgaaaatggtaggcgggcagtacaatacggcggacgatcccttccttgtgagccgctattacgtctcgcggtatacgggccttgacagcttcgctgccatggtcgcccctgcgggcacataaacaggctggaaaacacgccaaaacgggtcccttgcggggcaccagtaatactgattcctgattaaaacatttcatcaggaatcccgtgtgctacgcacactcgcatcgtgctgacgcacgctgcgccgtctca

SEQ ID NO: 11161 - DNA, 1832 bp, Unknown
  gut microbiota DNA sequence
ccgcaggttagaaacccagcaaaccaagggtggtatcccaaggatgactccgcacgacctgacggccgtgtttccaagtctcccacctatcctgtacatgatttaccgaatctcagtattaagctgcagtaaagctccatggggtctttccgtctagttgcgggtaaccggcatcttcaccggtactacaatttcgccgggcgggctgttgagacagtgcccaaatcattacgcctttcgtgcgggtcagaacttacctgacaaggaatttcgctaccttaggaccgttatagttacggccgccgtttaccggggcttaaattcaagccttcgtgttgccactaagccctcctcttaaccttccggcaccgggcaggcgtcagcccctatacgtcatctttcgatttagcagagacctgtgtttttggtaaacagttgcttgggcctattcactgcgaccctctttcgagggcgtcccttctcccgaagttacgggaccaatttgccgagttccttaacaacccttctcccgttggccttaggattctctcctcatctacctgtgtcggtttgcggtacgggcacctcacttcgccttttctcgccacagagcatcatcgacttccctactataagttcggtccctttcgcccggcgcgaccaacggccgggttcgactatctccatgtgtcagctttctcgtgtgaggtggctacggaatttctaccgtatgtgcatcgactacgcctcgcggcctcgccttagctcccggcttaccctgggcggacgaaccttccccaggaaaccttagattttcggccattatgattcccacataattctcgctactcattccggcattctcactcgtgtacagtccaccgctccttccgatgcgacttcaccccatacacgacgctcccctaccaatgtctttcgacattcccaagcttcggttatacgcttagccccgttaaattttccgcgcaagatcactcgaccagtgagctattacgcactctttgaacgagtggctgcctctaagccaacatcctggttgtttatgcaatctcacatcgttttccacttagcgtatatttgggaccttagctgtgggtctgggctgtttcccttttgaccacggattttattactcgcagtctgactgcaggtaagcatttctacggcattcttagtttgttagagttcagtaagcttatcgccccctagctcagacagtgctttacctccgtgaaactcattacctacgctagccctaaagctatttcggggagaaccagctatctccaagttcgtttggaatttcaccgctagccacacctcatccccggacattgcaacgtacgtgggttcggacctccatggagctttacctccacttcatcctggacatggctaggtcacctggtttcgggtctatggcaactgacttcacgcgctattcacactcggtttcccttcgcctccggtactgaataccttaagctcgccagttactataactcgccggaccgttctacaaaaagtacgacaccaccctttaacgggctatgtctgcttgtaagcacaaggtttcaggtactatttcactcccctcccggggtgcttttcacctttccctcacggtactgctcctctatcggtcatcaggtagtattttggcttggagggtggtccccccggcttcccacgggattcctcgtgccccgcggtactctggatccggctacgttcacttcattttcgactacgtggctctcacactctttgactggccttcccagaccattcgtctaacgaagcttaccgat

SEQ ID NO: 11162 - DNA, 2688 bp, Unknown
  gut microbiota DNA sequence
cgttggcctcctcgcaatgacaaacctttggcttttgccattttaatgacagcctgttaatcgcagcagtgcgtcgccgggccgggctgtcccctcccctacaattgcatatcctcaaaaaaccagcgttttgatgacgaccgggaggacctgcccgtttgcgatgggggcggcgacatcgaggtagctgccaggcgggagctgcacgccgtcgaggcacagcagcggcacgcccggcagccgcacggcaagcgcctgcccgagggccttgcccacatcggccgccacggccacgagcaccgggccgtccctgccgcgcaggccgccggccagtccgtcggcaagggcgctcagcgctgcaaagcgcaggtcgcgccgcccctgcagggccagaacggccgggccgtccgcaaacacggccagccgcgcccggacggtctgtgcaagctgcgcgggcgggaggtgctcctcctccggcatcagagcggcgacgggcagatttttcagcggaaaggcgatgcggtcaaaatagaccgtgctgccggaaagctccgtggcgtggcagcccgcgccgatgacggtggcgcggatggtctcgcgcgcggggatgcgcgggccgacggcgcttttggccacggcccggccgagcagcacgccgaggtctccgtaggcaaacggctcgcgcggccggtcgtccatcaggtcggccacgccgccggaaaagctgtagaccgcgccgggcgcggggtcgggcaggcggtccgtgacgaagcggcgcagccgcgccggatcggataccgggcggaagccgagagcctcctccagaatctccgtgagcagggcaatggtcggcgcaaggtcctgcggcgtcaggcggtcgccgggggcgtagggcacgaacggctgcagcacgggcgagacataggtcacgcggccgtccggctccagcttgacgagccgcccgccgacattcaggcaggccgtgtccgtcagggccccgttcgtgaagcgggcgatgtttgtcgtaccgccgccgatgtccagattcacgacggtacaggcgtgcgcctgtgaataatccgccgccccggctccgcgcccggccagtgcgctttccagcgcgggtccggccgtcgccacgacgaagtccccggcatagcccgacagggcctcgagcacggcgcgggcattctcgcggcgggccgtctcgcccgtgatgatgacggccccggtctgcacggcgcggcggtcgatgcccgcggcggcgtattcggcgtccacgatgcgggcgatggcctcggcgtccagttcgcgctccgagcgcagcggggtgaagtgcacggcgctgcgccgcaggacctcacgcgcggcgacggtgtagttcggcacggagaaggccgagccctcgttgcggacggtcaggcgggaaaagacgagctgcgtcgtcgtcgtgccgaggtcgatgccgacggacagcagcgtttccgcgctcacagcacctgccgcagcagggcctgcagcgcgtcacgggtcaggggagcgggggcctgcgatgcgcaggggtcggccagcgcggcctcgagcacgtctgtttcagcctccaatacggcctcgcgcgggaccccggcctccggcaggcttgcaggcaggccgagccgggcgcgcaggcggacgatcgtccccgtcaggccgcgcacgccgggcaggccgcaggccgcggcaagggcggcatagggatgggggtcttcggccgcgtggtgggcgatgacgtgcggcagcagcatggcgcacaggcgtccgtgggccacatggaagcgcccgccgagggcatgagccagcgcgtggcaggcgccgaggcccgcattgtcaaaggccagcgccgccatggaggccgccagatggacgtctccgcgcacggccgtctcgcccgcgaacgagcgcggcagcagccgcaggagcgtccggcaggcgctgtgggccagcgcgtccgtcacggggctggcctcgcgtgcggccgctgcctccacacagtgagaaacggcgtccatgccggattccgcgatgaggcgcgggggcagggcctcgagcagggcggggtccagaatggccagctccggccgcagggccgggtccacgagggggtgcttgacgccgtccagcgtcaggatggcgaacgatgtgacctccgagccgctgccggacgtcgtcggcacggctacaaggcggacgggcaggccgccgagcgcggcaatgcccttggcgcagtcgatggcggagccgccgccgagggccagaacggtgtccggccgcagggcttgcaggcgggcgacgccctgtgccaccagagaaagcgggggatcgggcgcgacgtcggagaattgttcgacctgcgcgccgggaaaggccgcggcatagcgcgcggccgtgccgttttcggcaaaataggggtccgtgacgagcagcacgcgctcggcgtgcagcccggcgagggccgcgggggcgtccgcgccgaagcacagccgcgtgccgcagacaaagctttgcatgacatcgcctcttttcggcgatagtatttccgtccggccggaaaacatgtgacaaaattgaaaatttatgcccgccgggttgacaccggcgggcatttgtggaaaaatagaagaaaaactggtggatattatgatctggagg

SEQ ID NO: 11163 - DNA, 2222 bp, Unknown
  gut microbiota DNA sequence
atacaccacggcactacctgacgtgtcattgcgaggagcgaagcgacgtggcaatctcgggaaggcagctgcgttttcgccgatggctttcctgtgatctggtcgggtactgcgagattgccacgggcgcaaagcgccctcgcaatgacaaatcgggggccggtgctgctttcacggtggcctgcatcgatcggtgctgcagcgccgggccgggctgtccctgcgtgttacatgctttgcgcgggctttttccgcgtgaacagcagcgcggcgaggacggcgaggacgccgcccgtgagcttggccgcgatgacggggccgagcatggccgcgtcgtagcccgccgtgaagccgaggtggtcgccgaagacgaaggccgccgggacggcgaaggcgatgttcacgatcttgccgcgctcgtccatgtccttcaccatgccgaacatggggatggagtttgcaaggctcgccacgagcccggcggcggccgtgccgttcatgccgagcaggcgcccgagggccgcgagcgggcggcgcaggagcttcgtcagcagaaagacgagcgggaacgcgcccgccagcacaaagccgatgcccgcgacggtctgcacgccgccctccagcggggccatgccggggatgaccgtcacgcccgtcagctccgtgaagacggcggcggccagtccgaccgtgatgacggccagcacgccccggccgaaccacaggaagccgcggatcatcgcgcgctcccagcgccacagccccagcgcgatgagcacggcgaacagcacgatgggcacgaggttccgcacgagcatgccgagcgggaagcccgcggccagtccaccggcgaacgcacccggcgcaatggccagcaggcccgccagcacgccgcgcgccagcgcgggccggtcctccggctgcaggatgccgagggcgacggggatgctgaagacgacggtcgcgccgagcatggagccgacgatgaggccgccgagctgcccggccgcgcgcgtgcccgccagctccatggcaaggggcgcgccgcccatgtcgtttgccaggatcgagcctgcgaacatggccgggtccgcgccgaggaagccgtagaccggcacgagcaccggccgcagcagccgcgccagcacgggcgcgagcgtgaggatgccgagcatggagaggctcagcgcgccgatggcgaggatgccctcctcaaactgcttcccaagcccgaggcggctgccgaacatgcggtcgagcgcgccgaggaccatggcgatggccatgatccagagaatgatgttatccatgagttgcctccgtttcgtccaaaatggccacgatggccgcgtctacgggcacgtccggccgccccgcgcgcgccgccgcgccgaaggcgaggatgacccggtcgcccggccccgcgcccacaaggtccgccgcgaggtattccgtctcgccgcagcgcacgcgcagcaggctctgccccgtgagagcggggctttttttcgtggcccacaccgcgccgagcaccagcccggccctcatgcgcggccctccagcacgtcgcgcgccagcggcgtcagccgcccggtcacgggcaggccgctgtgcagcaggcggcgggcctcggccgccgtgacgagggcgcttttctgcgccagctcctgcacgccgagggcgcgcagccgccgctcggccgcaagcagggccgaccacagggcgcggtttgccgttttggcgtgacggcggtagtccagtccctcggggcagtagtagacgggcttgccctcgagcagggcctgcgcgctggcctcatccgggaagcgcagcagctccgcggccgtcagcgagccgaggatgacggcctcatacggcccgtccgtgacaaagcgccagccggcggccgcctgcggcgcgcggcccaccagcagcgccgggcgctgcccctgccgccgcaggacctcgtccaccacggcctgtaccagatcgtccatgggatcgctcctttctggttatgtaggattagcggccgtgcgttgcaggggaggggacagcccggcccggcgcactgctgccgacccgaacagggcggcgttaaaatggaaatggctcccgaattgtcattgcgaggagcgaagcgacgtggcaatctcgcagtacacagttggataacaggaaggccccggcgaaatcgcaactgcctccccgagattgccacg

SEQ ID NO: 11164 - DNA, 11063 bp, Unknown
  gut microbiota DNA sequence
cggaccttctgcaggtagctgccgagccgagcctcgcgcagcaggtcacggtttgcgctggaagcctcgccgtcgcagccgaagccgacgcgcgcgccggatgccagcagctccgcaatgggcggcgcaccgtccgacagcttcatatttgtcgagggacagtgcgccacaacggcgtgcgactgtgccagcagcgtgatctcctcctgcgtgagccagatggagtgcgcaaggatcgtggactcatccaggacaccgagatgcgccagctcctccgcctctccgcggccggtccaagctcggatacgttccgtctcggccttcccctcagcaagatgtgtgtggtagagcaggccgcgctcgcgcgcaaattgcttgagggcccgcattagctccggcgtgcaggccggacgtccctgcggcacggcagccgtgcgcagcagtcccctgccgtgccatttgtggtacagctcctccgcctgccgcaggcattcgtccaccggcgtgacgcggatctggtcgttctcggcgatatccgtcgcgccgatgccgaaggtcacgcgcagaccgacgtcctgataggcttgcacaacagcgtcgatgtgcggatagtaggtcatttcattgatggccgtcacgccatagcggatgctccgcagacagccgagcagcacgccatagtaccactcgtcctccgtgagcgaccactgtgcccggagcatgcgcgtgagccactgcgtgatgttcaggtcgtcgagcgggccctgcgtcagactctgcaccatgtgcgtgtgcagatcagccatgccgggcagcatcagaagaccagatgcctcgacaatggggcaatcagcctccagatggggtgcgatcgccgcaaagcggccgtcccggatgaggacgtcggcctgcgtggtcgttcctgtttcgaaatcggggagcattgccccgcggatcagcagcatcgcagtgcctccgccgctgccgtgaacagccgcccgcgcgcctgtgcgtccatcggagcggctgcaccggttgcatagttttctgcaagataggccagcgaggccgcatgcatgccgagaatggatgccagcacgaacagggcgctcgtctcgccgtccagcgcactgacgccaagctctgcccagcgggcaatgcgcgccgggccgccgggggcccacggcgtctcgagcgatgtgcagtcgtgactgcggaacaggcctgcatcgggtacgccgcagctcagcagcgcgccgagcaggggcatatccgccacggcgggataggacgggtcgatgtattcgcgcgtcgcgccctcaccgcggaccgcgccggaggctgccagcagcgtgcccggctccagctccggctggatggcggggcaggccgcgatcttgatgagggactccgcgccgagatggtgcagctcctccacggcgatggccataggcatacagccgaagccgcagctcatcaccgtgagcggttcgccgcgccatgtgccctgccaggtcgcatattcgcgatagcagccctgctgcacggggccctccagcagcgcggcatagagcgggacctcctgcggatccggcacaagaatgacgcgcggcgtcacggcatcgatgccgaggtggtgcatcgtaccgtcggtatggacaagtttctgacttccaaagctcatttcgatccctccagcagctcggctgcgcgcatggcaatgcgcgtggcagtttcgatccggcgcgccagatgctccgggtcggcataggccccgtagacgttggcgttcgggtctgcgaacatggagccgagcgcgacgcagatgctcgcggcgcgaaggccgagcaggtggccataggtgaaaagcaggccggactcgttctccacgacaagtacgccggtgtcgatccatttctgcatacgctcccgcagaccgggatgggcggccttggactccatatagaacgcatcgtggctgcggtacaggccgacgcgcacgggctcgtccagctcctgcgcagcgctgcacagcgcgcggacgagcagcgggtctgcaacggccgggaattccggcggcacaagcccatagcttgcgccctcgccgcggacgcagccactggcaatgacgatggtccccggggccagatcgggctgcacgccgccgcaggtgcccacacggataacggcctccgctcccgcggcagcaagctcctccagtgcggcggcaacgcaggcacagcccatgccgctgcttgtgacggcgatatccgcgccgcccggtgttttgccggtataggtcgcaaatgttccccggtgggccgtaaacgaggcctctgcgaacagcgcggccatcttgcggctgcgctgcggatcacccggcagaagcacaacgggcgcggagcggcgcaggccggtgcggcagagggtgccgtccggctcgcgccgcgggtcaagggtcaggtaggcttttttcataggctcctccaaattatctgtgatagactgcgcgcgttcgacaaattttgcggattctcaatttattccgacttcgttcatagatttttcaaatgtccccggtatactcatactcgtaagaacgataccgaacctgccgcggtaacgggcttactggtccatcttttcatttttatctctctttttattttcccctctctcatttctgtagcggatccccggtcgtccatccccctcggacggccggggatttgctgtattcagccgccggtcgaacgccgctccacctgcgtgccgaaataaaacgagatcacgaccgtaaagatcgtgaggaactgctgcgcgctgactgcgcccgtcacggccagcctgcagaatacgacggtcagggcgatcgtcacaagagacttgacgcaaagaagccgctcaagccgctgccgcatggcactcacctcccggccagactatgccgcagtacagcccgatgtgcaaacaggcgcggagcagagggatctgcttcgcgcctgcgttttgcgtatgaggatcagagaccgtcgtcctcgtcgaactcgaactcgagcggctcgccgcacttcgggcagtcgacggaatcgttgaggagcgtctcctcgtccagatggagaacctcgccgcacttcgggcaggtcacttcatacatggtgtcgtcgtcatagtcgaagtcttcgccgtcgtcgtccatgaagccgtcctcttcgtcatcgtcgtccatcaggtaatcctcgatggcgtcgagatcatcctcaatctcatcgagctcatccgagacagcctcggcgttttcctgcagatcgccaattgcaccggtgacctcctgcagcagctcgacgatcccggagatcatcttgccctcgggggcctcctggtccagcttcaggccgtccatcaggcccttcagatatgcggacttttcagagagattcatagcgttctcctttccagatgtgggccggatcagcccttggcgcggcccagatattcgcccgtgcgggtatcaatagagatcttgtcgccctcgttgatgaacaggggcacgcggacctcggcaccggtctcaagcgtagcgggcttcagcgtgttggtggcggtgttgcctgcaaggcccggctcggtcttcgtgacgacgagatcggcaaagttcggagcctcgacgctgaacacgttgcccttgtaggacaggatcgtgcactggtcgttctccttgacaaacttgaagctggcgtcgagaatgttctcgtcgaccggcgtcatttcgaacgtctccggatccataaaataatacaggttgccgtcgttataggaatagtccatctttctgcgctcgatgtaagcggtgggatacttgtcgttcgggttaaacgtcgtctcggtaacgccgccggtgatgacattgcgcatcttgacgcggacaaaggctgcacccttgccgggcttgacgtgctggaactcgatgatctgcatcaccttgccgtccatgtcaaacgtaacgccgttccggaaatcactgactgaaatcattggtttatcctcctgtgttcctctcgaataccatatctgttccgaaggtaaaaaaatgcgtttctattttaaccgatttgtcaaagaaattcaagtctttcagcaaatttctctgagttatcaccgcttaaaggatggtcagctccttcgggctgtgcgtgatgacctcgcagccgccctcgcggaagatcacgacatcctcgatgcggacgccgaatttgcccggaatgtagatgcccggctctgcggagcacacagcgccggcagggatcgggttctcgttgcgcggggtgcaattcggcgcttcgtggatctcgagaccgaggctgtggccatagctgtggccaaaatacgggccgtagccggcctccgtgatgatgtcgcgggcagcgccgtcgatgctcttgccgctcgctcctgcgtggctggccgcaataccggcgagctgggcgcgcaggacggtgtcgtagaccttacgcatctcctcggtcgcatggccgagggcgacggtacgggtcatatcggagcagtagccctgatacagcacgccgaagtccatggtcacgaagtcgccgtcctgcaggacgcggctcccggcgacgccgtgcggcatgctcgtgttcggtccggagacgacgatcgggtcaaaggacaggccctctgcgccgttcttatacaggcagtagatcagctcagcctcaagctccttctcggtcatgccggtatggatacgggtgcagacctcagtaaaggcgcggtccgtgatctcctgcgccttgcgcatgcgggcaagctcccagtcctccttgctggcgcggaaggcgttgatctccttctgcagcggaacgaacttggcgggaagcgcggcctcaaagccgttgagctctgcgacggtgagatattcgtcctcaaagccgagcgtctccacgccgaacttgtccagcgtggtcttcagcgcctgcatcatcgggttgttcaggccgatctccacgacctcaaagcccttgaggttcttctgcgcggactcgatgtagcggctgtcggtgaaatagcgagcgccctgcgcggaaacaacggcaacgccctcggcgatgtcaaattccgccgcatacatgcggctgtagcgcgaggtcagcagaaggccctgcacgccgtcgtgcagcagagaacggtatttttccagattggtcatgtttctactctcctttttcgcgccatggcgagaaacggcagctccagcaggtgccgcagcttcagccagacggtatgattatgaatggatcgcacggcgatcgccgtgatcccggcgcgctttgcgccgagcacatcggtatagatctggtcgcccacgagtgcggtctgctgcggagcggctccgtagcgggccatggcctcccggatgccgcgtgtgccgggcttggcggcatgcgtcacgcagggaacgtgatattgctgcgagaaatgcggcacgcgctgcttatggctgttggagacgatgcaaagcgtgatgcctgcatcctgcatcccggcgatccagtccagaagcggctgctccggccggtccgtcgtgtagggaagcatggtgttgtcaaagtccatcagcagcagacggatgccgtgctcacgaagaaacgccgggcggatctgcgtgatggtttggaaaatgaagtcaggtaaaaatgacagcatattctcctcgggtattccataggttgattctgaggttcccatgttcagggttctccttattatagcacgcagggggaggtttgtctattgcctgttccggtgtatttggcggcaaattgtaaagaaattgcaacatttaccggccgggccgccgtgctcggcctcggctttctgccggatggcggggcccgcatcccggcgtgcccgctgcagggacatatggccgtcatcgacgacgccgtcctgccgcagcgcgttccggaggagacgctggaccggcttgcggcccggtgcggcggggggtgttgtctggattttctgcgcacgcccggccccgtgcaccgcgccgtggcgcagggcctgcagcggcggctcgggaatgccccgatgctgctgcccgcggcttatcacgcctttgcgccggaagcgctgccggtcctctcctgcctgcggccctgcaatgcatgggacggctttgtccggtcggcggagcggcgcttcccgaacggctgggcgctggagctgacgccgtgggaggcagagcttccggccccgccgctcccctatcccggcggcatgctcccggccgcgctgtgcagctgcgagaaaagcccggcgggcctgcgctactttgacacgccggagtcgctccggcagaagctggcgcacgcagcggcacatggctgccgctgcgccatcggcctgtggcaggagctccagccgtttttcccggagcgggatggataagaccgggatgcggctgcgcgcagcttttccgtgtgcggcatagaaatgctccccatatgaggatggtgatctttacttcactgtctctcatagagggagcatattctgtttcgcgctttacgcagagatggacttggctcagccgatcagctcgcagacgagatccgtataggccgtcgggtcttcgagcgggaggtttgccatcagcaggccctgatcgtagagaagctctgccagttttttggcgcgctccggatcggattccctgctctcggacagacgctgcagcagcggatgctccgggttgacctccagaatgcggccgcagtgataatcggacgacgggtcgaccgtgtgcatgtacctctccatctcgaagctcatgccgccgtccgggaccatagtcacggcatggctgcccagctccgtcgaaacgcgtacgtccttgaccttctcaccgaggctctccttcaggaagtccacgccggactggaaggccttggccttctcctcggcggcttttttctcctcctcggtcgcaaggtcgaggtcgtcggtcagaatgttgcggaactcatgctcggcgtaggtattgagcgtctgcggaatgaacgtgtcgacctgctccgtcatgagcagcacatcaaagccgcgttcacgcagcagctgggtctgcggaagctgcgaaaggcgcgctgcgctgtcgccggtggcaaagtaaatgtgcttctgggattcgggcatggcgtcgcagtattccttgagcgtgatgtccttcccctctttgtcggaacggaactccacgaggtcctgcagcaggtccttgtgcatgccgtaatccgagacgaggccaaacttcagctggcggccgaaggcggcatagaatgtctcatatttctcacggtcgtccttcagcatgcgctccagctcggccttgatcttcttttcgaggttggcggcgatgaccttcagctctctcgtgtgctgcagcatctcgcggctgatgttcaggctcaggtcctgcgtgtcgaccacgccgcggacgaagcggaagtgctccggcagcaggtcggcgcagttttccatgatgagcacgccggaggaataaagctgcagaccggccttatagtcgcgggtgtagaagtcgtatggggcctttgccgggatatacagcagggccttataggtcacggcgccctcgacaccgaagtgcagcacgctcagcggcttttcgtagtcgaagaatttttcgtgatagaagttgttgtactcctcctccgtgacatacttcttggccttctgccagatcgggatcatggagttgagcgtctgctcctcgcggacggtctcatacttcggctcctcgccctccttcggctcgttcacgagcttctggctggagacctccatgcggatcggatagcggatgtagtcggaatacttgcggacaaggctgcgcaggcggtattcggacagataatcggaatacttgtcctcgtccgtgtcggccttgagcgtcaggatgacgtcggaaccggcggctgcgcgctcgcacggctccatggtgtagccgtctgcgccctcggactcccacttccaggcctcgtcgctgccgaagcggcgggaaataaccgtgaccttctcggcgaccatgaacgcggcatagaagccgacgccgaactgaccgatgatgtcgatatcgtcgctcttctccatttccttcttgaagcggagtgaaccgctgtgagcgatggtaccgaggttctcctccatctcctcgcgggtcatgccgataccgttatcggaaacggtcagcgtgcgcgccgtctcatccgtggacagatgaatggcaaaatcgctccggctcaagccgacggtgtcgtccgtcagggcctgataggccagcttgtcgatggcatcggaggcgttggagatcagctcgcgcaggaagatctcgcggtgtgtatagatcgaattgatcatcaggtccagcaggcgtttcgattctgcctgaaactgtttcttttccatatggatcaacttccttatttcgtattggcactcttagtgcctgagtgctaaatcctattatagccgcttttccgtgttttgcaagagctgtcacaatttttttacactttcttttctgcagaatctgtggtacactgttgccgaggtgattccaatgattacgatcagcgatcttgcgctgcaatatagcggaacgttcctgttccagcatgtcgatctgcagtttaccgccggcaattgctacggtgtgatcggcgcaaacggtgcgggcaagtccacattcctgaagctgctctcgggcgagctggactccacgaagggcacgatctccatcaagccgggcctgcgcatgtccgtcctgaagcaggaccagttccgttacgatgcttataccatcatggatacggtcattatgggaaaccagcgcctgtatgatatcatgaagcagaaggacgccctgtacgccaagcccgatttttccgatgaggacggcctgctggcctcggagctggagacggagtttgcagagctgaacggctgggaggctgaatcagatgccagccgcattctgcagggcctcggtgtgcccgtggagctgcacaacgaccgtatggccgataccgacggccgcgtcaaggtcaaggtcctgctggcacaggccctgttcggtcagccggacattatcctcctcgacgagccgacgaacaacctcgacattgagtccatcaactggctggaaaatttcatcctggactacgaggacaacggccttgtcatcgtcgtgagccacgaccgccatttcctgaataccgtctgcacacatatcgtcgatatcgactacggtaagatccgcatgtatgtcggcaactacgacttctggtatgagtcgagccagctcatgcagaacctcattcgcagcaagaacaagcgcaatgaggaaaagatcgccgagctgcaggcctttatctcccgcttctctgccaacaaggccaagagcaaacaggccacggcccgccgccgcctgctcgacaagcttaccgtggaggagatgcccgcctcgtcccgccgctatcccttcgtcgggttcacgcaggagcgcgaggtcggcaaggacatcctgtttgtgacggacgtctcgaagaccgtcgacggcgtgaagctgctggacaaggtctcgttcatcgtcaaccgcggcgacaagatcgcttttgtcggcgagaacgaggtcgcgcagacgaccatgttcaaaatcctcatgggcgagctggagccggatgagggcacggtcaaatggggcgtttccacgtcgcagagctactttcccaaggacaacagcgagtatttcgacggccacgacgagacgcttgtcgactggctgcgccagttctccgaaaagaaggatgacgtgtatctgcgcggcttcctcgggcggatgctgttctccggcgaggatgtgttcaaatccgttaaggtgctctccggcggtgagaaggtccgctgcatgctctcgcgcatgatgctctcgggagcgaacgtgatcctgctcgatcagccgacgaaccatctggacatggagtccattcaggccgtgaacaagggcctcatcgccttcccgggaaatatcctgctggccagccacgaccacgagatgctgcagtccgtggcgaaccgcatcattgaattccgcccggacggcacgatctgcgaccgcctcgggacgtatgacgaatatctggagtatcaggcggcgctgaaaaattcataaatccgtcaccgattcttcgccgcgccgtggtacgataggaatatcagaaaggagccgctggaaggatgcggccccgaaaaagaaagaggcgacgcatatggccatccgtctgaatgaagataaggagcttgtcgcgcagatccgcgaggggcttcgccgccgtgggggctactgtccctgcaggctcgaaaagaccgaggacaacaagtgcatctgcaaggaattccgcgagcagatgaaggatcccaatttcgaggggtactgccattgcatgctgtactataaaacaaaagatccgataaaggaggaagcatcccatgctgaagatcacagcgacaaattatgatgagctcgtcgcgcgggcggacaagcccgtgctgctggatttctgggcggagtggtgcggcccgtgccgcatggtgtccccggtcgtcgaggagatcgccgcgtcccatcccgagatcgcagtcggcaaggtcaatgtcgacgaggagccggagctggcgcaggcattccgcgtacagagcatcccgatgctcgtgctgctgcgggataacgccgttgtcgctgccgccgtcggcgcgcagtccaaagaacagctcgagcagaagctcggcctgtaacatagcgcaaaaaaccgggacggttagatgggtgttcataaaacagtcaatggagcgtatcgatacagatacgctccatttttcacgtcaacatactatgtaatggggtacagtcccttggctctccctttgggagagctgtcaccgcaggtgactgagagggccctgcagcc

SEQ ID NO: 11165 - DNA, 1926 bp, Unknown
  gut microbiota DNA sequence
tgtacagactgtaagtgcgtcgccgggcccggctgtcccctcccctacaacgcatcatcgatgccccggccctgtgaaataacatgtgtacatcctgcatctgcaggttaagctattgaaataccagacaagggggaggaccctccccggaacagagaggaaatttggcatggcggtaaaatatgtatttgttctcggcggcgttgtctccggcctcggcaaggggatcacggccgcttcgctcggcaggctgctcaaggcgcgcggctatgccgtgacgatgcagaagttcgacccctatatcaacgtcgaccccggcacgatgaacccgatccagcacggcgaggtgttcgtcacggacgacggcgcggagaccgacctggatctcggccactatgagcgcttcatcgacgagcgcctgacgcgcgtttcgaacgtgacgtccggccgcgtgtaccgcacggtgctcgagcgcgagcgccgcggcgacttcggcgggggcacggtgcaggtcatcccgcacatcaccaacgagatcaagcgccgcttctaccgcggcgaggacaagatcgccatcatcgaggtcggcggcacggtcggcgacatggagagccaggccttcctggaggccatccgccagttccagaatgaggtcggcaaggagaatgccatcatcctgctcgtcaccctcatcccgtatctcaaggcctccggcgagatgaagacgaagccgacgcagggctgcgtccgcgagctgcagagcatcggcctgcggccggacgtgctcgtgtgccgctccgactaccccctgacgcaggacatccgcgacaagctcgccctgttctgcaacgtccgcccggaccatgtgctgcagaacctcgacgccagcattctctatcaggtccccctgatgatggaggacgagcatctggctgaggtcgtgctgagcgatctgggcctgccgcagcgcgagccggatctgacgcagtggcggcagatgtgcgaccgctggatgcacccgaagcgccgcgtcgacatcgccctcgtcggcaagtatacgaagctgcacgacgcctacctcagcgtcgcagaggcgctgcgccacgccggtgtggcaaacgacgcccatgtggagatccactggatcgactccgagaccatcacgccggagaacgtcggcgaaattctgggcgatatgtccggcatcatcgtccccggcggcttcggcagccgcggcatcgacggcatgatcgaatccatccgctatgcccgtgagcaccgcatccccttcctcggcctgtgcctcggcatgcagcttgccattgtcgaattcgcacgccacgtcgtcggcctgcccgaggcgcacagcatcgagctcatgcccgacacgcccgatcccgtcatccatctgatggctgaccagaagggcgttctggacatcggcggcacgctccgcctcggctcgtacccctgccgcctcgacccggattcccgcgcctttgagctctatggcgagccgctcatccacgagcgccaccgccaccgctacgaggtcaacaacgactaccgcaccgcgctgacagacgccggtatgcgcctgtgcggcatgtcgccggacggccgcatcgtcgagatgctcgagctgccggatcatccgtacttcctcgccacgcaggcccatccggagttcaactcccgcccgaaccacccgcacccgctgttcctcggtctgatctcctccgccgtgctctaccgcagcgaggagctgtaagaacctcctgccgccccgtcccttttcggacggggcgttttttttgcacaaggccggttgaggattttcatgccatgtggtataatgcagggagaaatcgggagtgaccggcgcagaaccggttacggatcgtaggggcggggacagccgggccc

SEQ ID NO: 11166 - DNA, 3054 bp, Unknown
  gut microbiota DNA sequence
attgcgtctgtagcggcgctcactgcgcagccgttggcggctttgccgccttacggatgcggcgtgccccttgcgggttgtgagcgccttgcaggttgtaggtttggtggcaccccgccgaccgcacctgcccttgtaggggagcggcatgccgctcccggcgacgcacttgcaatctgtacaaaccgccgccaaaatggcaaacgctcccgacttgtcattccgaggagcgaagcgacgtgggaatctcctgcaaccggtcacgttttcgccgaggcctacttgttatccgacatggtactgcgagattgccacgtcggccgttggcctcctcgcaatgacaaagctgacagcctcacgccataaaatcaatgccgcagacaattggaggcctgcatggcgctcacaacccgcaatcggttttcacgttttatcgccgccctgtacgagtcggcagtgccttcccgagattgccacgtcggccgttggtctcctcgcaatgacaaacctttggtgtttgccattttaacggcagcctgtttcttgcacaggtgcagcgccgggcccggctgtcccctcccctacaatactgcatgcggtcggcgatggcttgtacgggctgcaactgcctccccgagattgccacgtcgcttcgctcctcgcaatgacacatcagggtggtgctgtggtgcaccagcgctctcctacggttgaatgtccctgtacaaggcggtcactacccgcaaggggcacgccgcatccgtaaggcggcaaagccgccaacggctgcgcagtgaccgccgctacaccccatacttcggcgtttaccattttaacggcagccggaggtatcgtgtaactttccatttcccactcgcacacgctatgccatgaaaataaacaatctatcaaatacggaggaaaaacttatgtactgtgtccgcaaggttctggaggatctctggtgggtcggcgggaatgaccgcagacttgccatgttcgagggcgtttacgccgttccgaacggagtttcctacaattcctatctgctgctcgacgacaagaccgtcctgttcgacacggtcgatccgtcggtcagcagggtattcttcgagaacgtcgaccacgttctggccgggcgcaagctcgactatctcgtcatccaccacatggagccggaccactccggcacggtcagcgaggtgctgctgcgccatccggagaccgtcatcgtctgcagcgaccgcatccgcgccatgctgcagcagttccgcggcggcgtcgccccgcagaacgccttccacctcgtcaaggagggcgacaccttcgagaccggccaccacacgctcacgttcctgagcgccccgatggtccactggccggaggtcatggtcagctatgatctgacgacgcgcacgctcttctcggctgacgccttcggcacgttcggcgcgatcaacggcgcgctgttcgccgatgaggtcgacttcttccgcgattatgtggacgaggcccgacgctattactgcaacatcgtcggcaagtacggcacgcaggtgcaggccctgctcaagaaggcctccacggttcagatcgaccgcatctgccccctgcacggcttcgtctggcgcaagaacatcggcgaattcatcgaccgctacgtccactggagcacctataccccggaggagcagggcgtcatgatcgcctacgcctccgtctacggcggcacggagaacgcggccgagctgctgtccgtccgcctgcgcgagcgcggcgtgaagaccgtcatgttcgacgtctccgtcaccccggcgtccgacatcatcgccgccgccttccgctggagccacctcgtctttgccgcgccgacgtacaatgcgggcatcttcgtcacgatggagaatctgctgcacgacatcgttgcgcacaacctgcagaaccgcaccgtcgccctcatcgaaaacggctcgtgggccccgacgtccggcaagcacatgcgcgacctgctcggcaagctgaagaatgtcaccatcctcgaccagcagctgacgctccgctccgccatggccgagagccagagcgcgcagctgggcgcgctggcggacgccctgtgcgccacgctgccgcagccgcaggtgcacgcctccgaacccggcacggtggacaatcaggcgatgttcgccctgtcctacggcctgttcgtcctgagcgcccgcgagggggagcgcgacaacgcctgcatcatcaacacggccgcgcaggtcacggacacgccgaagcgcatctctatcacggtcaacaagcagaacctgacgcacgacatgatcctgaagaccggcgtgttcaacctgtccgtcctctcgcaggatgcctcgtttgcgcagttccagcagtacggcttccgcagcggccgcgacacggccgacaagttcgacggcgcggaggcggtccgcacggccaacggcctgcgctatgagccggccggtacgaacgccgtcctctccggcaaggtcatccagacgctcgactgcggcacgcacacgctcttcctcgccgaggtcacggaggcccgcgtgctgtcggatgtcccgtctgcgacgtatgcctactatttcgagcacatcaagccgaagccccagcccgccgccgagaagaagaccggcttcgtctgcaagatctgcggctatgtctatgagggcgagacgctcccggaggactatatctgcccgctgtgcaagcacggcgcggaggattttgagcccctgaaataatacaggaatatagatcgcccgtccgcagcccaaaagctgcggacgggcgtttttcctattgcggagagatgccgtgactctccctccccggcatcgcccttggctcttcctctgggagagctgtcaccgaaggtgactgagagggcattgcaggcactgccgacaggttcaggccatcgctaaaatggcatgcacctccgatttgtcattgcgaggagggcgcaagcccgacgtggcaatctcatgcaggcacttctgaatggcaatcgcaatgaaaggg

SEQ ID NO: 11167 - DNA, 5924 bp, Unknown
  gut microbiota DNA sequence
aagggagagccaagctatgcggttccttccccggcggctgcgcctttatcgcggcatggcggggacggcgtccatatcctgccggaggttcgaatcggagatgagcttccgcgggcacacggccgcgcagcggccacaggagacgcacttggaatagtcgatgacggcgaggttattgacgacgtggatggcgtcgaactcgcactgcttttcgcacaggtggcagccgacgcagcccatgtcgcactcgcggcgggtataggcgccgcgctcgtggttcgagcaggcgatgacgatgtcggcgtcgtaggatacggggacgatgaccttgcgcgggcacacggcggcgcactgcaggcagccggtgcacttctcgggatcgaccttcgccacgccgtccacaacgtggatggcgtcaaagcggcaggccgagacgcacgagccgaagccgaggcagccgctcgggcaggccgaggggccgttgccgccgacgaacatggccgagcggcagtcgtggatgccgtcgtagcgggccttggcggtgtggtggccgcggcagcggaccatggcgacgacgcgctcggtctttgcggccgtgacgcccatgacggcggccatctgatcggcagaggcctgaccgcccgcgacgcacaggccgatctccgcgcggccctcgagcacggcctgcgcataggcctggcagcccgcgaagccgcagccgccgcagtttgcaccgggcagggcctcgatgagcttcggcagacgctcgtccgtcttcacggcgaagaccttcgaggcaatggcgagcaccgcgccgaacacggcgcccatgatgccgagcaccagcacggcatagagaatttctttcatgactcgccctccttacccgaataccttgaagccggagaagcccatgaacgacagggccagcagaccggcggccagcagcgcgatcgggaagccgcggaaggccttcgggcagtcgcagtcctccaagcgctcgcgcacggaggagaacagcaggatggccacggtgaagccgatgccgcccgtgatgccgtagaccagagactcgacgaagttatagccgtcctgaatgttcagcagggccacgccgaggacggcgcagttcgtcgtgatgaggggcaggtagatgcccagcgcctgatacagcgcggggacggccttctgcaggaacatctcgacgagctgcacaagggcggcgatgacgaggatgaacacgacggtctgcatgtacacgaggttcagcggcacgagcaggaactcgttgacggcccaggtggccgccgaggcgatgcccatgacgaacgtgacggcgatgcccatgccgagggcggtgtcctgctttttcgacacgcccatgaacgggcagatgcccatgaacttcacaaggatgaagttctcggcgagaatggcgttcagcgcgatggtgaacagggagatgaatacgctcattttgcttccgcctccttcttttcggccttctcggccagatggcggttgaaccactgcgtgaaggcgatgaggcaggccagcgtcaggaagccgccgaccggcaggatcatcagcatggccgggtactgcgacggcaggatgcgcacgccgtcggcggagaggacgcccttgccgaacgtgccgctgccgagcagctcgcggatgatgcacatgcacaccagggccacggtgtagccgatgccctgcgtcaggccgtcgacggcggaggccagcacgccgttcttcgaggcgaaggcctcggcgcggccgagaatgatgcagttgacgacgatgagcgggatgaacacgccgaggctctcggacagggccgggagataggcctgcagcagaaggtcgatgatggtgacgaagcccgcgatgacgacgatgtaggccgcgatgcggatcttatccggaatgaccttgcgcagcatggagatgacgacgttcgagcagatgaggatcagcgtgacggacaggcccatgccgaggccgttgaacagggtcgtcgtgatggccatggtcgagcacatgcccagcagctggcccacgacggggttattggtcaggagcccctcgcggagctgttttttgaaattcatttctgcacctccccggcataggccagcgctgcgttcacggcgcgggtgacggcgcgggacgtgacggtcgcgccggtcagggcgtcgatgtcgccgccgtccttgctgacggccagctcgccggtcttgccggcaaactgggcgcggaagtcctcgcgcgtgcagttcgcgccgagcgaggccgtctcggaatgggagatgatggccacgcccgtgaccttgttttcgttgtcgacgccgaccatgaggtcaatggcgccgccgaagccgttcgtcgtcaggcggacgacggtcccggcctccccggcgctccacgcggccgtcacgccggtggcggcctgcgcgtccgacacgggaagctccgtgtaatcatccgcggcgaggacctgcttcatggcggaacgggctgcctcggccgtgtgctcggcgatggtgtcggccgtcaggtagttgacaaaggccagcaggcccgcgacgatgacggtgatgagaaagagcgtcagcgtcagccgcaggacataggcggccgtgctttgcggttttgtcatgcttcggcaccgcccttcttctgctttttctgcctgactgcgccgaagcgcttcggcacgccgatgcggtcaaagaagccgacgcagcagttcatgatgaggatggcgtaggacacgccctcaacataggagccgaagtaacggaacaggaacgtcagcacgccgcagccgacgccgtaggcgagctggccgccgtgcgtgacgggcgaggtcgtgtagtccgtggccatgaaccacgcgccgagcatcaggccgccggacagcagctgcacgagcatccagtccagccgggccgcgccgccgcgcgggaacaggaaggccagcaccgcgaccgtgccgaggtaggcaagcgggatgcgggccgagatgacgcggcggacgagcaggtagatgccgcccagaagcagcagcatggccgagacctcgccgagcgagccgccggtgcggccgaggaagaggtcgagcacgctggcctccggcatggcgcccacatggaggctcgccatcggggtcgcggcggtcaggccgtcgagcgaggccgtcgtggggttcgagaacgcggggacatgcacgccggagcgcacccaggtgttcatgaacagcggccagctgaacaggaaggcgcgggccgcaagggcagggttgacgatgtttgcgccgatgccgccgaacagctgcttcacgacgacgatggcgaagaagtcgccgatgaggatcgtccagaacggcagcgtgaccgggcagacaaaggcgacgaggatgcccgtgaccacggcggagaggtcgcccgtggtattgtccttcttcatgatgcggcggtaggcccactcgaagaacacgcagcctgcgacggacagggccgtgagcgtcagggcgcgcgcgccgaagaacacgatcgcgccgatgagggcgggcagcagagcgatgcacacatcgagcatgatgcggcgggtggaattcgggctgtgcgcatgcggcgaggaggagagcgtcagcttcagggcttcttcgttcatttcgcggcggcctccttctttgctttttcacgggcggcggcgtcgcgcacgagctttttgccggtgcggaagctctgcacgagcgggatgcccgccgggcagccgtaggcgcacgagccgcactcaatgcagtccatgacgtgcagctcgtccagccgctccagatcgccgcggttcacggcgcggtgcaggaacagcggcatgaggtgcatggggcaggcctcgacgcacttgccgcagcggatgcagtgggggttgggcgtctcgtggcggtccttgtcgctgtagcacgtcagggcgttgttgcccttgatcgtggcggtgcgcagggtatactgcgcgatgcccatcatcgggccgccgcacaggatcttataggggggcagggcgaagccgcccgccgcctcgacgaggtcggaataggccgtgccgatgggagccaggaagttgccgggctttgcgatggcgctgcccgtgacggtcacggcgcggcgcacgagcggcaggccgagatagacggcgtcgtagatggcggcgcaggtcgcggcgttgaacacggcgcagccgacgtgggcgggcaggccgccggggggcacgcagcggcccgtcacggtctggatgagctgcttttctgcaccctgtgggtagcggacgtgcagcggcagcaggtcgatgccgctccccagcacggcggagatggccgcgatggcctcaggcttgttctgctcgatgccgatggcggcgcgcttcggctgcaggatctgcaggacgacgcgcaggccgccgacgacgcgctcgggcgtttcgcgcatcaggcggtcgtcggacgtgatgtagggctcgcactccgcgccgttgacgatgacggtgtcgaccttgcctaggccggaggagagcttgacggacgtgggaaagcccgcgccgcccatgccggtgatgccggcctcgcggatgacggcgatgaggtcctcggcgctcatggcggcgacggcctccggctcgcgcggcttgaccgtggggcagagcgtgtcgcggccgtcggactcgatgacgatggccgtctgcaggttcccgcccggatggggccgggcctcgatggctgtgaccgtgccggacacggaggcgtggacggggacgcagaggccctggccgtcgccgatcttctggccgacggtcacgcggtctccgactttgacgagcggctggcagggcgcgccgatgtgctgggacatggcgacggagacgacgctcgggtgcagcgggacgatggccgcctcacgcgaaagctccttatagcccttcggatggacgccgccgaaaaaggctcgtttcaagggtgtaccacctcagttcatgaagttctgggatcgggcgggcacaaaaagacccgccgcaaagattctgttctgcgccggcctgtcaaaaaatcccttcggacttttcgctgctttcaggatcgcaaaatcaatttttgcagcatgcttttgcaattctgccgctgcggcgggtgatcaagcgcgaaagggcaccctgacggtttccctttacacttttcttccctccgaaacgttcggctaagcaggtttttttgatagtctgactgcgtacttcaatataccacaccgggccggaaaaatctatgggtattttctcactttgttgatttttttgcggattttcgcagattcaatccggaaatatttatataaaaataccgaaaagaagagaatgggagagagtggaaaatcgaaaatggaaagtggaaagttttgcaaggctgtcagtcgtgtgttgcaggggagcggcacggaaatgaatgaatcctgaagactgaaaaatgaagaatgcggaaagcctccggccttgtcattgcgaggccccgaaggggccgtggcgccctgagcgcgaagcgcgaggaagtgcccttggggtgcaatctcgggaaggcagctgcgttttcgcggatggctttcccgcaattcggccgggtactgcgagattgccacgtcggcctgcggcctcctcgcaatgacaaacttgatggcattgcgccaatgaatttgtgccgtaagtattgccaccctgcagggcgctcattgagcgccattggcagttgcaggtattgcagtagtgattccgtggcgcaaggttcccggatttgtcattgcgaggccccaaaggggccgtggcgccctgagcgcgaagcgcgaggaagtgcccttggggtgcaatctcgggaaggc

SEQ ID NO: 11168 - DNA, 7226 bp, Unknown
  gut microbiota DNA sequence
agcgacgtgggaatctcgcagaacccggttggatcacatggtactcccggcgaaaacgtaactgccttcccgagattgccacgtcggccgttggcctcctcgcaatgacacatcagggaagcgcgaggtgcaccagcgccctcacgcggttgaattgccctgtacagggcgctcactgagcgccgctacaccccaaacttcggtgcatgccattttaacgatgccctgtacgagtcggcggtttaccgccgggcccggctgtcccctcccctacagcaccccgcggtctgccggattttctccattgtaccatattccccgggaaaaatccaccctgtcggaaaaaagcggtctctctccgtaaaatctatggaaaagcgcttgaaaaccggacccttttgtgatacgataaatttgtatcagaatgagtgtactgcgcgcaggcgcgggcttcatttgcacacagataccacaataataggaggcaaacaccatgaatgtagcagagatcatggaacagcgcaacgcattttcctttgaagtcttccccccgaagacggacgttggcatggagaagctgtgcggcgagggcggcgtgcttgagaagctctatacgctcaatccggattacatctcctgcacctacggcgctggcggcacgaacgtcggcaagaaccttgaggtcctgaagaagatcaaggccgacggcaagtgcacccccgtgacgcacttcacctgcgtggccaacaccaaggaaggcatcaaggaccagctccagacctatctggacaacggtatcgaccacatgctcgcgcttcgcggcgacatccccttcggctggaccggcacgaacggcgacctgcactatgccaccgagctggtgaagttcgtccgcaaggaattcggcgacaagttcaccatcgccgtcgcaggctcccccgagggccacattgcctgccgttctctggaagccgacatctccttcctgaagcagaagcaggatgagggcgcagactacatcatgacccagctgtgctgggatatggaccagttccgttactggatggacgcgatccgcgccgccggtatctggctgccggtcgatgtgggtatcatgcctgttctcgacgctgccgctaccatcaacatggcgctctcccgcaatggctgcgtgatgtcccgcgacctgtgcgagatcatctccaagaactggatcttcccgaatccgttcgctccgaacgagtccgaggagtccatcgctgccaagaaggcgtccttcaaggaagccggcatcgagtataccatcaagctcatcgacgagtatcgcgtctgcggcatcaacggcatccatctgtatgccctgaacaagtatgacgacgtcgcccgcatcgtcaaggagtccggcatcgtcgacctcatctgatttttttgacaacaccgcacaattgcagcttcggccttcgccgggcattttccgccgatccatcggttcggaaagcttgaggtacacaaagtacatctgcgctttccaaatctcggctcggcgaaaaatcctttgccgaatgctcttgctgaattgtgcgctgctgccggtttgggctgccggatttccggagctgccccaaaatttgctcaccttttcgcgctgccgggcggctccgccgtccggcagttcccccactgcacaaaggaggtttccccatggcctataccattgctgtcgccggaaagggcggcgtcggaaaaacgacggtctgcggcatgatgatcgacgccctcatcaagggcggcaagggcccgctgctcgtcgtcgacgcggatgccaattccaatctgaacgaggtcctcggcgtcgaagccggtgtctccctcggccagatccgcgaggagatcgcgcaggcggagctccgcggcgatacgatccccaagagcatgacaaaggcggactatgccgaataccgcttcgaatccgcgctggcggaggaggacgatttcgacatgctcgtcatgggccgcacgcagggcaagggctgctactgctacgtcaacggcgtgctcaagaccctgctcgacaagtatatcggcgcttaccgctatgtcgtcatcgacaacgaggcgggtatggagcacatcgcccgcgggacgcttccgcatgtcgatgcgctgctgctcgtctccgactgctcgcgccgcggcgtgcaggccgttgcccgcattgccgagatggtccgcgagctggacctgaagcccggcctcatgaagctcatcatcaaccgcgcccccggcggcgttctgtccgacggcgtgcgcgaggagatcgaggcccatcatctggagctcgccggcgtcctcccacaggacgatgccgtctacgaagcggactgcgacggcaagcccagctcgaagatccccgatgccagcccggtcaagcgggcgctgcacgggatcatgcaggacctgagcctgtgaggcagccccgcacaattgcatgctcccgctgaattgtgcggcgctgccgtaaaatccatttttctttcttatcggagaaccaacggaggcccggccgtccggtccggcttcccgatcaaccatttcaggaggaaaacacaatgtcttttgaacccaaaacgcaggcgttcaattcgtcgatcagctctgttaccatcggcactggtgacaaggcagtcacgctcggcggcattaacgttctgcccttctacgcattcgacgcgcccatcaccaatgcgccgaagatcggcgtagagatcaccgaccacggcatggcggcttatccgcaggccggtctgcaggaattctatgccggctgccagaccgtggccgacatggcaaagcgcgtggagacgatgcacggcgcatcgttcatctgcctccacttcgaaggcgctgaccccaacggcgataaccgctccgtcgaggagtgcgtcgagatcgccaagtccgttgccgatgcaacggatctgcccctcgtcatcatgggctgcaagaacatcgagaaggatgcggagctcttcacgaaggtctccgaggccctgcagggcaagaacatcctcgtcttctctgcccgtgaggagaactacaagtccgtcggcgcctccgccgtcatggcctatggccagaaggtcggcgcagagtccgccgtcgatatcaaccttgccaagcagctcaacgtcctgatgacgcagctcggcgtcgccccgacgtccatcgtcatgaacgcaggctccgccgcagcgggctacggctatgagtacgttgcctctaccctcgaccgcatccgtgcggctgccctcgcccagagcgacacgcagctccagatgcccatcctcacgcccgtctcccccgagacctggtccgtcaaggaatccatggtcagcgaggccgatatgcccgaatggggcagcgccgaggagcgcggcattgagatggagatcaccacggctgccgcctgcctcgccggcggctccgatgccgtcatcatgcgtcatcccgcggccatcaaggccatcagcgagatgatcgaagcgctggtctgagcggaaggaggaacatacaatggcactgaaaggcttggatatctttaagctctctcccaagaaaaactgtaaggaatgcggcagccccacctgcatggccttctgcatgaaggttgcacagggcgccgtcgctctggataaatgcccgtacttctccgaagaagccaaggcaaagctctccgaggctactgcgcctcccatgaagaccatcacggtcggcaatgacatcaagctcggcggcgagaccgtcctgttccgccacgagaagacccttgtcaaccgcaaccgcttcgccgttcccgtctgcacctgcatggacgaggccgctgccgatcagaagctggccgacatccagaaggtcgactatgagcgcatcggcgagcgcgagtacatcgagttcgtcatggtccgctgcgagaaggattccgccgataagtgggaagatctcgtcaagaaggccgccgcaacgggccgcaccctgatcctcaactgcacctgccccgagtgcgccaagaaggcccttgccatctgcaaggacggcaagcccatcctcaacggcgccacgccggaaaactacgaggagatgagcgccatcgccactgaggcgggcgtgaccctcggcgtccatgccgacagcctgtccgagctgcatgacctcatcgccaagctcgaggccgcgggcaacaagaacctcatcatcgacgtcaccggcaagaccgtcaaggagacgttcgccaacaccgtgctcgtccgccgcaccgccctgaaggacggcgaccgcaccttcggctatccctccatcgtcgatctggccaagctggccgcgggcgacgagcatcttgagaccgccctggccgccgtcttcaccctgaagtacggctccatcatcgtcatggagcgcctcggctatgcagaggccctgccgctgtacggcctgcgccagaacgtcttcaccgacccgcagaagccgatgaaggtcgcgcccggcatctacccgatgaacggcgcaacgcccgacgatccctgcatgctgaccgtcgacttcgccctgacctacttcctcgtctccggcgagatcgagcgctccaatgtgccggtcaacctgctcatcaccgacgcctccggcatgtccgtcctgacggcatgggccgccggcaagttctcctccagctccatcaagaagttcttcgatgagttcgagctggacaagaagatcaacaaccgcacgctcgtcatccccggcaaggtcgccgtcatgaagggcgagatccaggacaagctgcccgactggaacgtcgtcgtcggcacccgcgaggccgttgagatcgtcaagttcctcaaggacggcgagcacatcaaggctgcagaggccgtcgccgccacgaagaagccgaaggaagagaagaaggaagtcgtcgacgccgacgctcccatcgactattccaagctcgtcattccggagatcccgcacaaggatctcggcgtgacctacaagcagcgcaatgtcgagtccaagaagttcgtcaccatcggcgagcgcatccactgcatcagcccggtcatccgcgaggccatggccacgttcaacccggatcccatcctcgagcgtgctgcgcagcagatcaaggccggcgccacctatctggacgtcaacatcggccctgccgagtccaacggccccgagctcatgacctgggcggtcaagctcctgcaggagaacttcaacaacgtcccgctggccctcgataccgccaacaagaaggcaatcgaagccggtatccgcgtctataaccgcacgaacggcaagcccatcgtcaactccgccgatgcaggctcccgtatctccaacatcgacctggcagctgccaacgacgccatcgtcatcgccctctgctccgccgacggcatcgcgaaggacaacgacgagcgtatgcaccactgccacaccatgctcgatcgcggcatggcgctcggcatggaggccgaggatctgtggttcgacccgctgttccttgtcgtcaagggcatgcaggataagcagatggacgtcctgaacgccatcaagctcttcgccgatgaaggcctgaagtccaccggcggcctgtccaacaactccaacggcgcgccgaagaccctccgcccgatcatggactccgccctcgtcgccatggcgatgatgcagggcctgacctctgccatcgtcaacccgaacgacctgcgcctgatggagaccatcaagtcctgcgatatcttcaagaacaacgagctgtattccgacagctatctggagatctgatccgcaaaatctgtcacccagccccgagcattcggggctgggtgcagccgcattctcggagcatggagaaaatgcaggaaaatgaagaaaaaagcccgcattttccccatgccccgatggctttcagccggggaatgcagatgccctgccttccaccctgcgcctctccccggacgcggcaggtttcctgacttgtcattgcgagccttgcggagcaaggcgcggcaatctcgcagtactggccggaacacgggaaagcctccggcggacacggagtattcataaggtaattgacagccacagcagtatgaactactgcagcagtgcgttgcgagcgatacttggctctccctttgggagagctggcggcgcagccgcctgagagggaaacttggctctccctttgcttgctgttaccgttcgaacgcgcctgcaaggccctctcagtcacctttggtgacagctctcccagagggagagccaagggcctgcagctgaaccataatgatgcgggagggaagcgctttcaagcttgctcttgcgtccctccccaaaagcctgcgcaggttcagccggatatccggcccttttcgatgcccttctcttgcgttgcaatttgccccgcgatgcggaaacgcctgcgggtcagagaaataaaacatacagtgcgtgggaggaataatcatggcaagaccaaaacttaggctactgtgcacaagcatgttggttgctatactgctatttctatatgctgcccttctctgttcctgcaaaaccgcagcccccgagatcagcggaaccatgtgggtggagctgtcgctggacggacagtatgcgctgaccaacgcggcgggccagacgctccgctatttcgatctgctgcaatatgacggcacgatgccggtggaaaagacccacctgaacggcggagaggctgcatactctgcgtcgctttgcgtgccgcggacggagacgcttaccgttgaagtcacagacagcagcctgttttcggcctcatgggaggacgagagccaattccgcaaaatcgaaggcagcgtccggaagatcgtcctgagcgacaagacgactttcgtcgaggctgccggggaggcatacaccctgacggtccgcatgccgggcgacaacggaaaccggctgatcgtatcaactgccggagatcttacgctgacgcagaagggagagaaccttctccgctgcgatgccgagtatacctgtactctgaaaaacgggaacggcgatgccattgccgagcagacctatcctgccggtgcagaggcgcgtatttcgctggagcgcggcaccttgtcagacaacggatgagggatgacggcgtggaggcaaatcaatgaagaaaa

SEQ ID NO: 11169 - DNA, 11106 bp, Unknown
  gut microbiota DNA sequence
cgacacgagcagggaaaaggccagataagcaatataggaaaaggaactgtgcaacagaaacagtcctgctccggcgtagcacacgccgttgagcaggtcgccccacaccagaaaaggcttacgcggcagacgatccatcatgggagcgacgaccagcggcagcagcaccatcgggatcagctggatggcgaccaccagcgccgctgccagcgtgctgccggtttcatcaaagaccagaaacgatagggcaaactgactgatgatgccgcctgctgcgcccagtgccgtggcggcagtaatgcgggtaaattcccgcgtccagagtgtttgtttcatagtgttcacctcgcggctataattatcgcacagctccttacaaaaggaaagcatgtcatcatgggaaaattattcccagaatgacacgcttagattggcaaaaacactatattataggaaactcctccagcaggcggcaagcttggcggtactggcggttcgccttgtaccatgccagcacccactgcaggtggaaccgggtgaagcccatggggtatgtctcctgcagctgccggaagcaatccagcagctgagcgccgtaggcgctgtcgtgaaggtaatccgcatgctccagccgatagcgtaccagcgccagcatctgccgctctgtctcgccggtggccagagactctgcctgttggacggctgccaatgcctgctcccggtgccctaactgttcatggcagatggcgagcttgtgcaggtccagaaagctgggatgcgggaggctggaaaagtaggacagggctttttccggctggccgagctgcagctgcgtggcagcggtattgtagcggagggaggccagactgtccgtgtcgccaagagcctctgccagatgctccgctacagaaaaatgggtcatcatttcctccatgcggcccagatctgagtagcagtttcctataagaatacggcaggaaagcatcatatggggataacctgcgtctgccgccgagcggtaggcgtctcgcagcacctcgatggcggtcgtatacgccccctttgtgtagagggctttcccgtggagcgaggacagcagcggcagcggttccagccgcgcggcctcgtcccaccgcccctgcagagcacgctgcagagccagctgccgggtggagagaaacggttcccattcctctgacaggggctgcatggtatctgtgtaaaaggcagccagcaacaggatgtccgccgccagcggactgcaggcaagtctctcctgctggggcagtaccagctgctcatagcaaaggaaaaagccgggactgccggaaagcagggcgttccagcagggcttcagatcctccggctccggtatccagacaaggcccagacgacgaagcagaagctccgtcacctccggagagggctctgccttgccctgctcgatcttggataggtaggagggagtgcagatgcccaggcacaggccgtcctgactccagtcccgccggagacgggcctggcgaatcagcagcccggcgatcctagcgcccctcatctgatgagaccccgcagaatgcatgcagccgaatggagggcaaagagtctgcgcccgatgttggcagcaggacccgtctgtccgattgttccttttttcattttttgcttcctccagaaaatcaaattgcggatcgtctcgaccggaacaccgcttagcccctcccgcgtcatacttctgggcttctgcacgcggagccccgtactccggaaggaatacggggccaatacggtccgctcagagatcgaaatagcggtcgaactccgctgggtgcgggatgcggctgatctcctgcgcgtcggcgcggagcgttttgacgagcgtctcgagcagcggcatcgggaacacgccgtcgcgcgtgagatagtcgtgatccgcttccagcgcgtcgagcgcttcgtcgaggctggcgggcaggtggccgaggcgcttgcgctcgtctgccgggaggtcgaagagattgaagtcaaacggcccccagccacgtcctgccggatcgatctcgtgctcaataccgtcgaggcctgccatcagaatggcagcgtaggcaaagtacgggttgcacatcgcgtccgggttgcggagctcgaagcgcttcttgtccggcgatttaacataggccgggatgcgcacgacggcgctgcggttcgccatggcatagccgatggtgacaggggcctcgaagccggggatgaggcgcttgtaggaattcgtgctggggttcgtgatggcgcagaggctgcgggcgtgcgtcagcaggccgccgatgaagtgcatggccgtgcggctgagctggccatagccgttcggatcgtagaacacgggctgaccgttcttgcgcaggagcatgtgtacgtgcatgccgttgccggcctcgccgtagatgggcttcggcatcagtgtggccgtcatgccgttcgcggcggccgtattgcggatgacgtatttcgcggccatcgtggcgtctgccagacgggtcatctcgcccagctcgacctcgatctccagctggccggagccgccgacctcgtggtggtgatacttgacgtccacgccccacttggcaagctccagacagatctggttgcgcaggtcaaacgtgcggtcgccgggcagatcggcgtggtagccatcgtgcgggccggtgtgaaagccgttgttcgggaattccccggcggaccagacggactcgctgcactgcaggcggtagccgacggcatccgggcgcagggtgcgcgtcatgccgtcaaagacatggaattcatactccggtccgatgatcatctcgtccgcgatgccgagagcctgcatgtgggcgatggcgctcttggcgacattgcgcggatactggtcgaacgggcggtttgccggatggtcgatgaccatgacatcgccgatcatcgtgagcgtcggcgccttgacgaacgggtcgacgaccgccgtcgtgatgtccggcaggaagaccatgtcactgcgctcaacctgggcatagccgtagttcgagccgtcgaagccgatgccgtgcgtcatgatgtcctcgttgaagcgggctgcggggatggacaggtgcttccacctgccgcgaaggtcgatcatcttgaaatcgagaaatgcgatgccgttctggcggataaaatcctggatctgctgtacattctgaaacatgaaggttcctcctgctcacatagtttccgcggggatagtccgaactcggaaagactgcgattggtaaaaatgacggagattctggacttgtgcttgtctgcattatagtaaattcacgaaggaaaagcaagcccattccgggccctgtgaaaaattttgtatatcgctatgaatatacacggacgaatgtccgcgggcggtgtaatttgcggaaaaaccttgacaccgcggacccttgatggtaatataataccaataatataggcgttgtgaccgggaagagtagccgggccgtctgccgcagagagcgtccgccattggctgagagcgggcgcggcggactccgtgcgaagcgtgcgcccgtgagcgccggggagaccccgttggccgcgtcaaggccggagcaacaaatcagagtggaaccgcgagcactgcccgcctctggagcaatctgaggctggcagttttttgtttggaggcgaaagaatgcggttaaaagaaaccatagaggcataccgccgcaatgatcccgcagcgcgcagcggctgggaggtcttctggttatataacggcctgcacgccacgatgtattaccgcgtggcgcactggctctatgaacaccggctgcgctttctcggccgctgggtctcacagtttgcgcggcggcgcacgggcatcgagatccatcctgctgcgaagatcggcaggcggctcgtcatcgaccacggcaccggcatcgtcatcggcgcgacaacggagatcggcgacgactgcctgctctatcagaacgttacgctcggcggcacgggcatgacgaacggcaagcgccacccgacgctcggcaacaacgtcatggtcggcagcggcgcgaaggtgctcggtccgttcatggtcggcgataatgcccgtatcgcggcgaactccgttgtgctgcacgaggtgccgccggactccaccgttgtcggcgtgcccggccgcgtcgtccggcgcaacggcgagaagctcgaccatatccacacgccagaccctgtccggctggagctggacgccctgtatgcgcgtatcgaaaaattagaggaaaaattgaaggaggatcaagatgtatctctataattccctgagccataagaaggagctcttcacccccatcgacccgaagctcgtcaaaatgtatacctgcggcccgacggtctatcacttcgcccacatcggcaacctgcgcagctatattatggaggacgtgctcgaaaagagcctgcgctacatgggctatcccgtcaagcgcgtgatgaacatcacggacgtcggccatctggcctcggatgccgataccggcgaggacaagatgctcaagggtgcgcgccgcgagcataagaccgtcatggagatcgcaaagttctatactgatgcgttcttcgctgactgtgccaagctgaacatcaagcggccggatgttgtggagcctgccacgaactgcatcccggaatacatccacatggtgcagaccctgctggacaagggctatgcctatcttgcgggcggcaatgtctactttgatacgtccaagctggaaaaatactatgtcttcaacgaccacaaggaagaggaccttgccgtcggtgtgcgcgagggcgtcgaggaggattccaacaagcgcaatcagaatgacttcgttctctggttcacgaagtccaagttcgaggatcaggccctgaagtgggactccccgtggggcgtcggctatcccggctggcatatcgagtgctcctgcatcagcatcaagcacctcggtgaatatctggatatccactgcggcggcatcgacaatgccttcccgcatcacacgaacgagatcgcccagtccgaggcctacctcggccacaagtggtgcaactactggttccatgtgcatcatctgaatacggagtccggcaagatgtccaagtcgaagggcgagttcctcacggtgtccctgctggaggagaagggctacgatcccatcgcctaccgcctgttctgcctgcagagccattatcgccgcaaccttgtgttctcgtgggagaacctcgacaatgcggcacagacctacgaaaagctcatcgcccgcatcgcggccctgcgcccggaggacggcgcggtcgacgcggaggccttcgaggcgctgaaggagcgcttcctcggcgcgctgaacgccgacctcaacacgtcgctcgccgtgacggccgtctatgatgtgctgaaggcaaagacgaatgatgccacgaagctcgcagcccttgccagctttgacgaggtgctcggcctgaacctgctctctgcggcagagaaggcacgcagcgcccggccggaggaggagcacgacccggagatcgacgcgctcgtcgccgcccgtaccgaagcaaagcgcgcgaagaactggccggaggccgaccgcatccgcgatgagctgaaggcacgcggcatcgaggtcatcgatacgccgcagggcgcaaagtggaagcgcatctgatcgaaggagataccatatgaagctgatgatcctggacgggaacagcgtcatcaaccgcgcgttttacggtgtgcggccgctgacgacccgagacggactttataccaatgcgatctacggctttctgaatattctggaaaaggagcgcagcgaggaaaaaccggatgcgctgtgcgtggcctttgatctgcacgcgccgacgttccgccatctgcgctatgacggctacaaggctacgcgccaccccatgccggaggagcttgccatgcagatgccggtcatgaagcaggtgctcgccgcgatgaacatcccggtctatgcctgcgagggctgggaggcggacgatgtgctcggcacggtcggccgtctgtgcgaggaggccgggtgggactgcgccatcctgacgggagaccgcgacagcctgcagctcgtcgacgagcacgtctccgtgcgcctggtgcgcacgcagggcgggcagacgcggacggagcgctatacgccggacgtcttccgcgcggaatacgggctggagccgaagcgcctcatcgatctgaaggctcttatgggcgacagctcggacaatatcccgggtgtagcgggcgtcgggccgaagacggcaaacgacctgctgaagcgcttcggtacgctcgacggcgtctatgccaatctttcccgggaaaacatgaagggaaagctgtttgataagctcgaaaacggccgcgagtcggcctatctttcctatgagctggcgacgatccgcagcgatgcgcccatcgacttcacgccggagaacaatctcatccggccgccgaagcgccgggcgctgtatgacctgttcaccacgctggaattccagcgcctcatcgaccgctacggcctgcgcagcgccgctttggagcaggacgagtcggaggaaccggcgcagcccgtgacaggctcctgcacgcttctggacgtgcagaccccggagcaggcgcagccgctgttatcaggcgtgacgctcagcattgctgccgcagacgatctctcgatgctcgtggccgcgccgcacatggacggcccggaccagacggcctatgtgctgcgccgcgaaacgctcggaacggacttcgtgccgctgctgcagcgcctgtttgcggcggacgtgccgaagaccgtgcacgacagcaagccgctgctgcgcgcgctgctggctctcggcgtggagcctgcggggatcgtgttcgacacggctgtggcggcctatctgctcgatgcgacgcgcggggcatacgccctgccgcagctggcgcaggactatctgcacatcccgcctgcggacgagaccgcgctccagccggaaagcgtccttgccatccggacggcctgcatcgacggcctgacggaggagctcggcaagcgcctgcgcgagcagggcatgcagccgctgttcgagaacatcgagctgccgctgtgcccggtgctggcgcagatggagcacgacggcatcctcgtcgacgcgcaggccctgcatgacttcggcgagatgctctccgagcgcatcgacgcctgcgagagcctgatcttcggctatgccggagagacgttcaatctcaattccacgcgccagctcggcgtattcctgtttgaaacgctcggcctgccgcccgtcaaaaagacgaagagcggctattccacaaatgccgaggtgctcgaaaagctccgcgaccggcatcctgccgtgcaggccatcatggactaccgcatgctcacaaagctgaagtcaacctatgccgatggcctgcagaaggtcatcgggccggacggccgcatccgcacgacgtttcagaacacggtcacggcgacgggccgcctgtcctccacggacccgaatctgcagaatatccctgtgcgcacggagctcggcagcgagattcgccgcatgttcgtcccgcgccccggctgggtgctggtcgacgcggactacagtcagatcgagctgcgcgtgctggcgcatatcgcggacgatacgcgcatgcaggaggcgttccgctccggtgaggacttccatgccgtgacggcctcgcaggtgttcggcgtgccgctggaatccgttacgccgctcatgcgccgccatgccaaggccgtgaacttcggcatcgtctacggtatctcggagttctccctggcgcaggacatcggcgtgtcccgcgcggaggccaaggcctatatcgacagctatctcgaaaaatacagcggcgtgcgcgcctatatgcacgatatcaaggagacggcgcgcgaaaagggctatgtggagacgatcttcggccgccgccgcgccattccggagatcaaaagctcgaatttcaacgtccgctccggtgcggagcgcatcgcgctcaacacgcccgtgcagggcagcgcggcggacatcatcaagctggccatggtacgtgtgttccatgcgctcgaggggctgcaggcccggctgctgctgcaggtgcacgatgagctgatcgtcgagtgcccgcaggaagaggcgcagcaggtcatgcagatcgtcacgaacgagatggagcacgccgctgcgctgcgggtcccgctcgtggccgaggccaagcagggagaaagctggtacgctgccaaatgatcgaaattcaggaaatgaccgccgccgatgtggcggacatcgccgcgctggagcgtctgtgcttctccgcgccttggagcgaaaactccattgcggaggagctggaaaccggcttcagcctctggctcgtcgcgcggctggacggcgcatttgcgggctatgtcggcgcgcagctcgtgccgccggaggccgatatgatgaatctggccgtcgtgccggagctgcgccgccgcggtacggcacaggcgcttctgcaggcgctgcaggaaaggctggctgcgcgcggcatcggctctctgacgctggaggtccgtgcctccaatctcccggcccagcggctctataccgcagcgggctttgcctgcatcgggcgcaggcccaattactatctcgcgccccgagaggacgcgctgatcctcagaaaggagctcgatcatgcggatccttgccattgaatcctcctgcgacgagactgccgttgccatcgtagaggacggaaggcgtgtcctgacggactgtatcgcctcgcaggtggcgctgcaccgtgaatacggcggcgttgtgccggagatcgcctcgcgcaagcatattgaggccatctacggtcttgccgagcaggcgctggagaacaccggcctgacgcgcggcgagctggacgccgtcgccgtgacctatgcgcccggccttatcggcgcgctgctcgtcggcgtgaattttgccaaggcggctgcactggcgctcgatgtgccgctcattccggtccaccacatcaagggccatatcgcggccaactatcttgcctacccggacctggagccgccgtttctgtgccttgtcgtttccggcgggcataccatgttcgtcgatgtcgaggactatacgaagctgcgcattctcggcggcacgcgcgacgacgcggcaggggagtgcttcgacaaggtcgcgcggctgctcggcatgccataccccggcggcgcggcccttgaccgcgcggcgcagggcggagacccgtcgcgctatcccatgccccggccgcacctgagcggcaatccgctagacctgtcgttctccggcctgaagacttcggccgtgaatctcatccataacgccgggcagaagggcgagcagatcgtcatcccggacctctgcgccgccttctcggaggctgtgtgtggcatgctcgtgccgcgcgccatgctggcgctggaacagacggggcggaaaacgttggccgtggcgggcggcgtggccgccaacagccgcatccgcgctgcgctgcagcgggagacggccgcccgcggcgtgcgcctttgcatgccgccgctgtcgctgtgcggcgacaacggcgcgatgatcggcgcgcaggcctattatgagtatctcgcgggcaacatcgccgaccagacgctcaacgcctatgccacgcgctccatggagggcgaggccttataagacccaaaaaatcaatgcaggatgtcgatcggcatcctgcattttaatttcctgttacctgtctgtaaatttttgtcacaaacggggttatgtcaactccggaacatagcgctgctgtgcagaggcgtttttacaggcctgtgcacaactgcccgaaatcccccgcgaaagcccgctaaatcagggatcctgctgtgcacaaccttgtgcagaatgtgaataactcctgtggatggcagttttgcccgtcattattgtcaacttccgaccggatcggcctgcgggcagaaaaggaaatgattcctgcatttttgtcactgcgcaggaacggcaaacggcttcccggccagcacgacctcgcgcaggaagcggaacgtctccttttcgccgcggtcgcgcagcatggtcagcacatagagaagctcgcggcgcgtgtccgggtgcatcatcgagccatcgcggacctcctcggcgtggacgagatagttgagggcatcggcgtccgtgtaggcgctgccgtggtaaattttacaggcggcgatgcggtccatgaccatctccacaaagaatttgcgcggcatcggcacggcgcggtagaccttcgtcttcgggtcgatgtccgtccagtattcgtagtggtggcggttgcggcccttgtggtgcatccatgcggcggagtagccgtagagctcgcgctcataggagttcgggctgcgcgtgccctgatagtattttgcgccggtccagaactccgtgggggagtatttggacaggtcgtgcgtcaggccgcgccagtacaacccgacgcggaagcagtgactgcgcaccttccagcggtggtgcgtaatggtacagaaatgtttccatggatgcatttgtgatcgttcccttcaggtttcttttgtcagcgcgtcctccagcttctgcagggcgcgtttttcgatgcggctgacgtagctgcggctgatgccgcactgcgcggcgatctcccgctgcgtcagcggcttacggttgcccagcccgtagcgcagcagaatgatgcgctgctcgcgcggggtcaggcaggtgttcacggcggtgtggagcctgccatagatctctttttcggacagctgctcgaacagatcctcctccgagcagatcacgtccatcagcgacagcgcgttgccatcccgcccggtctcgatgcattccgagagcgaaacgtctgacgcgctcttccgctgcccgcggaagtacatgaggatttcattcgctatcctctcccaacggatacataggttggtcaatggg

SEQ ID NO: 11170 - DNA, 2371 bp, Unknown
  gut microbiota DNA sequence
ataatcgcgtatcgccacatgatccggataataaagatagtactccagcgtcggctgatcggcaaaggtttcgtcgacgcagagatcgaatgcttcctcgccctcatgcaggtttacgccgatggagcagctgagaatttccggaaggatcttctgcaggtcatccatcatctcgcggaaccggcagaccacgcgctcctgctcctccgccgttcccttcagcttccagcaaacaatatgtcgcagcatcgttttcactcctcctgctccgcgcactgcagagctgtattcctgctcattttatcgtgatatgctgaaaaagtcaatcgtgaaattggatttctgttgagaacagaaacgaatttccccgaatttcacactgtaatccatttaattcactaaattacacaaaattattttgcgattattattgacttgtgtggaatattgtgttaatatgggttcaacgtcatccgtaaccgcattcattcgtatacgacgattccatgcttcaaccgctgcgggagcagcacagatttcgagaggagtgtttttccggtgagtatccccaaaatgatgaaagcaatgaccctgactgcctatgaccacctcaagcttgcaagtgttccggttccccagcccggccccggcgaggtcctttgcaggattaagtctgtcgcgatctgtggctcggatcccaagatgatccatggcggctatgcgttcaccaactggcccccctattacccgtttatcatgggtcacgaatgggccggtcagattgttgcactcggcgagggcgttgaggatttcaagatcggcgaccgcgtcgcgggtgaggcccatgtcggctgcggcaagtgcgataactgcaagcgcggccattacaccgtttgcctgaactatggtcatgacggccacgacggcggcctggatctcggccatcgtcattacggcttctattggcagggcgccaatgccgaatataatgtctataagaccagcgcactgcaccggattcccgacaacgtgagctacgatgttgcctccatgtgcgactgcgcgggcgttgccttccacggtgtgcagctcgcgggcgttacgcccggcggcaccagcgtggtgttcgggcccggccccatcggcctttgcgccatgcaggagtgcaaggcgctcggctccggccgcgtgatcatgatcggccgcggcaagaagctggaaaaggcacgcgagctcggcgcagacgtctgcatcgacttcgaaaaagaggatcctgttcagcgcgttctggagctgaccggcggcgtcggcgcggacgaagtcatggagtgctccggcgctgccgactctcccatgaaggcctgcaagctcgtgcgcaagaccggcagcgtcgcactgattgcgacctaccatgatccggacgtcttgatcccggtcaacacggtcaacttcaacgagatccgcattgtcggctccaaggcaaacccgaacgtctccgaggaagtgctgaacttcttctcgaccggcgcgatccagggcgaaaagctgatcacacataccttcccgcttgaggaatatgaaaaggctgttgatatcttcgagcataagaaggagaactcgatcaaggtcgtgatccatccgtaagccttccgcgtgtgccgcgcggccggcgccgcagaagcgccccggcaaaagaaaatggaagtccggtcctcctgaaggtcttcaaacccccgtgtgccatcctccggcacatgggggttttgcgcattgcgccgcaaggcgtggcgccctgagcgcgcagcgcgaggaagtgcccttgttgcaatctcgcagtaccagcccgcagcaacaggaaagtccccggcgaattcgtgacagcctccctgagattgccacggatggagattcctgcgtcggactcacccccggcaatgaaacgggaaaaaaacgcaggtactctgctttcacggaacaggagcctgtatttgtcttttgaataagctgcagccgggacgaaataacggaactgcataatttgttcaaaacagtgaagaatcatgaaaaaaatataaatgattggttgcaaaactatgaaaatagtgaccgggtgtaaaatgaagttggatacctgagaaaaagaaatccatagtgacttcccgtatggtagaatgaagttccccaacacaagcgggggatgttttttgccgttccggcaattctgttgttccgggaaatgcggccgccgccccttcccggctgcccggcccggcatttggaaaggaatgcgggaacttttccgcacgattcttcccttttcccgggaaatatggtatgataaattatgataaattggaatcagggcagcacc

SEQ ID NO: 11171 - DNA, 7217 bp, Unknown
  gut microbiota DNA sequence
agttggggcgaaagacccgctgagcgccgcagccgatttattcagaggttccctaacttttaaggggggctacactcttacaatccgcattttgagacagccccaatctcagggaggcagctgcgttttcgccgatggctttcccgcaattcagccgggtactgcgagattgcaccccaagggcacttcctcgcgcttcgcgctcagggcgccacgtcgcttcgctcctcgcaatgacaaatcggaggcgatcaccattttaacggcggccggtacggactggaagtgcgcagccgggagcggcatgccgctcccctgcggcggccttgtaaaactttccgctttccggtttcaagtttccacttgccgctcccctgcgttttactttttatgctttgcaaacaggaacgcaccgatgagggcggacaggggcacggcgaggataacgccgacggagctggcgatggcctgcaccatctccacggagaagaacgtgccgctcatgagctgggagaacgacggctcgagcgacgagagatagatcatcagcacgagcgagctgccgacgagggcaaggatgagcgtattggtcatcgtgccgaccatatcgcggccgatgttcatgccggagcgcaggagctggcggcgcgtgagcgccgggttgacggccacgagctcattcatggcggagctgatgctcatggctacgtcattcaccgcgccgagggccgcgatgacaatgccgccgacgagcagatcgccgagctggagcgagtgcatgggatcctgcccctgcttgatctgcagcagggcctcgatggccggctcggcggaatacatcttatagccgttcacgcgcagcagggcgcaggccagctcgccgaacagggccgcgaaagcaacgccggagatcgtgccgaggatggcgcagagcgtcttacgattcacaccgccgaggataacgaactccacgaccgtcacataggcgcacatgccgagaatggtcggcagcgtcggccagccgccaaggagcagcgggatgaggatggagaaaatgcacacgaccgtcaggccgaggccgagcagcgactttgcgccgaccctccggccgacgagcaccgtgacaacaaggaaggccagcaccacgagggccagcggcacggtgcggtcatagtcctgcagcgtcatgctgctgatctccccgtcctcctccgtaacggcgacggtcacggcgtcgcccgctttcaggatcgtgccgtagagatagctcagctggttcggcagctcatagacctgcccgcggtatttgccggagcgcagctccacgcggacggtctgcttgccgaccgggatgtcctcatagtcctgctggccctgccaggcgttgtccgtgacctcgacgacgcggccgcggacatagtgcgtggcctgctgcaccgtcgacatcggtaccgagggggtctgctgcgcaagaccatagaacacaaggaacacgacggccgccgccagcagcacccacaggctgcgccgcaggccgggcgcgcaggagcgcagcgccagcacggtcaatgccgcgccgccgcaggccgtgagcacaagggcggcggcgtccgtcagcccggcctcgccgcggacgagccggacggcgagcacgatacaggcagcaaggaaaaacagtgcgcccagaacggcagaggccagacgcggcagggtgagcttcttcatggggcaacctccgaaaatgtttattaacgattctattataccgtccggcccatgggctgtcaaccctgcgggctgtatgagacgcagggccaaaaagcggaataacgcggcatatctttggcaattctgccgaaaaaagtaaaatctccgtatgagcatcctgttttctatggcaatcgcagagaaagtatggtatcataaactcatcatactgccctctgcatatacaggggggacagaaaaggaggataatctaatgaggaaacacctcagtcgggtcatggcggcgctccttgtgctggcaatggccctgacgatgctgcccgtcgtatcggctgcgaaggagcgcttcacggccacgcccatcgacggcatcccggagagcgggcagacgttcgtcatctacagtgcgcccgcaggcggcgtgttctcgccggaggcatccggcggcgcagtcggcgtttcggccgcttccggctccgaggagtctgcaaacctgaccgtgcagacgggcgcaggcgcctatcaggccgtgaagaactcggacggcacctactacctgacgtgcggcggtcagtacctgaccgtggacagcgccgaaaagctctcgttcgaggccgagccgcagtccggctcctccaagagctcgaagtggaagatcgccgacgcaggtaaggactacgacggcttctccatcgccagcgccgaggtcaagtacaacaactacgagatcttcctggagttctataccgccttcaaggcctggacgtacaaaccgaacagcgactggagcatttacgtcttccgcttcttctccgtggatggcacggctgacccggacaacgacggctacatcggcacgcgccccgaggcgggcgagctgccgaaggacggccagaccgtcgtgatctacaacgacaacgcgggcgccgtcatgggcccgcagacggatgacaccaccgccccctcactgacgggcgtcgaagccacgccgaagggcagcggcatcgaggtcggcaacggcggcctcatcttcaccgtccacaccgacggcacctactacacgttcgaaaatcagggcaagttcctgcgcacgtccgagaaccagtccgacggctcgaacgcagagtgcctgtacttcgacaccgtcgagagcgactacacgaagtggacgctcgagaagaagtcggagggctacatcatctataacaagacggcaaagtacaagaacaaaaaggtgtgcatcgagtacttcagcaacggcttcagcggctggacctacaacggcagcctcgagctgtttgccatgaagttctaccctgtgcaggacgagctgaacatcggctatgtcctgaatccgaaggtctccttcaaggcggccgacgcctatcagggcctggactacacgttctccgtcacactggacgacctgtccgacatcacggagatgaccgtgcagtatcagacgaccggcgctgccgtcaccctgacggccgcctccgtcgagggcaaggtctacacctacaccgtcccgatggccgccctgtccggccagacgagcctgaagctcacggccagcgcaaagaacagcttcggcatgacctattccggcgagacgaccgtgcaggtcctcgatgagccggtgctgacgaacgtcatgcctgcggccaacgaggccaccggcgcgaacaagcgcccggagatcggcgcagtcgccgccaacctcggcgaaagcccgacgttctccatgaagctcaacggcgagagcgtcacgcccgttctgaaggacggcagactcacctacaccccggcgaaggatctggcagacggcaagtacgtcgtcgagctgatcgtgacccgcaaggacggcaagaaggccgaaaagatctggtcgttctttgtcggcgaatccggcctcagcctgtatttcggccagatgcactcccacaccgcagagtattccgacggtgctggcacgctcgaggacgcttatgagcatgccatgcaggccaaggacgtcgatttcctgatcgtcacggaccactcgaactacttcgatacgaagagctccgccacgaagacgagctactacgacctgtcctcgctcgagaagaccgcggacggctccatgacgaagtgggaagaggccaagaagacggccgagaaatacaacgccctgtccacggacttcatcgccgcctacggctacgagatgacgtggtccggcggccccggccacacgaacaccttcaacacctacggcatcgtctcccgcaataacggcgagctcaatgagaagagcaacagctatgcgggcatgcacctgtataacgacctgatggtcaacgcgaacaagggcctcgatgtcaacggcgaagccgtcgcggctggcgtgaagacgaagtggctcgaaaatgctccggtcgtctcccagttcaaccatccgggcacgacgttcggcacgttcgatgacttcgcgggctataccccgtcgcgcgacgtcgttctgaacctcgtcgaggtcggcaacggcgaaggcgcagtcggcggcagttcctattggccgagctactccgagtatgacaaggccctgtccaagggctggcatgtcgcgccgacgaacaatcaggataaccacaagggcaagtggggtgactccaacacctgccgcgacgtcatcgtgaccgacgacttcacggaggccggcctctatgccgccatggctgagcgccgcgtctactccaccgaggaccagaacctcgcgatctactattatctgaacgataccctcatgggcggcatcatcccgctcgaggacggtcagaagctcgacaccgtccgcgtcaaggcgagcattgccgaccctgacggcgaggagctgggcaaggtcgaggtcatcggcgcgaacggcatcaccgtcaagacgttcgagatctccggctcgacctatgagctcgacgccgagctgccgaacaccgagccttactactacctgaaggtcacgcaggccgacggcgacatcgccgtgaccgctccggtctgggtcggcgaggccacacccatcacggcggatctgaagaacagcaccgccctgagcacggtcggcacctctgagaccatcacctccaccatcacgaacgcggccaccgcgaactaccagatcagcaaggtcgagctgaccgtcacggcgggcggcacgacgacgaccgtcgagacccagaccccggccaagacgctggctccggaccagaaggagacgttctccttcacgttcaagccctccgccgccggtgcgcagaccctgcgcgtgctctacaccggcacctacgagggcgaggaattccagtgcgccgcaacgctggagctcaaggtctatgacgcggccgacctcatcaacgtcggcgtcgaccacggccacgacaactactacctctccggcgactatgccggaagcgccggcaacttcatcagcttctgcgcagacaacggcgtgaagtgcagctacatcgaggccggtcagttcacctatgacaatctgaagaactataccctcctcgttctgacggtcccgtaccgccgcaacacggccaaggccacgatgtacaccgaggccgagatcgccgcgctgaagcagtacacggacaacggcggcaaggtcatcctctgctccaagtccgaccgcgacaacaagtatgacaactgcgccgagaactccaacgccctgctcaccgccatcggcgcgcactcccgcattgtcaacggcatcatcgtcgacaatgacctgaaggcgaacgaggcctaccgtctctacctctcctccaaggagaacttcaacaccgggcatccgttcaccgcgggcgcctacacatcctcgaacgccttcggcaccacccccgcgacggacaaccagaccggcttccagctctacaacggcggcccggtcgaggttctcgacgagagcaaggttcaggtcctcgtgcgcggctaccagagcacctggggcacgcactacgacggctactttgacggcagctccttcgtgccggagtacgacgagtccgtcgacggccgcgtgaccgtcaagaagggcgacgtcaatgtcatgacctacgaggatctgcccggcggcggctgggtcatcacctccggcgtgacgttcttcagcaactacgacatcaagagcgatcaggattatgccaaccgcttcatcctgcgcaacatcctcaactccctgaagcccgccgagaccgtcacgaagatcgcggatgttcacaaggctgcggagaaggaagaattcacggtcgagggcaccgtcacggccaatgcctccggctatgacaagaacaccgcgttcttcgactgcatctatgtgcaggacgacacgcgcggcatcaacgtcttcccggtcgcgggcaactatgccgagggcatgaaggtccgcgttcacggcggcgtgacctactactgcggcgagatcgagctgaacctcagcagcgattacaacggcagcatcgagatcatctccgacgacatcaccccgctcgagccgcagctcgtcacagcgaaggccgcgatggcggacgagaacatcggcaacctgatgcgcgtcgagggcaagatcaccgagatccataagacggcaggcgtcgttgacaagatctatgtgcaggacgagaccggcacggccctcctgttcatcaacggctacatcacgagcacggacacgagcctcgacaagctcacggtcggcatgaccgtcagcggcatcggcatcggctcccgcgacgtcgatgaagagagcgccgacagcgccatcctcgcccgcctgcgtgtgcgcgaccgcgcggatatccacgagatttccgaaacacacacccacacctggggcgcgtgggagaccacggagcctgcgggctgcttccacgagggcaagcagacgcgcacctgctccggctgcggcgcgacggagacccgcacgatcccggccaactccgacaactgcccgtccagagccttcacggaccgcccggacaagggctggtaccacgagagcgtggactatgttctcgaggccggcctcatgaacggcatgggcaaggggaagttcgagccggacaccaccctcaaccgcgccatggtcgccacggtcctctatcgcctctccggcgacaaggtcagcgcgacgaatgcgttcccggacgtcccggcgaacgagtggtacggcgaggccgtggcctgggcccagcagaagggcatcgtcacgggcttcgaggacggcacgttccgcccgatggaggagatcagccgtcaggacatggcgctcatgctgcatcgctatgcgaagaccgtcaagggaacggacacgaccccgacgggcgacctcagccgctggccggatgccggtctggttggctcgtgggctgttgacgcgctgcgctggtgcgtcggcgcgggcatcatcaacggcaaggacggcggcctccagccgaccg

SEQ ID NO: 11172 - DNA, 15272 bp, Unknown
  gut microbiota DNA sequence
aatgaaacgataacaaaaaacgctgcaaaccatcaaaaaatggcttgcagcggtgcttttggcacccccggctgggctcgaaccagtggcctgtcgcttaggaggcgaccgctctatccaactgagctacgggggcttttacagaaaatattcaattttgcagagctccaggattcgaacgattcgatttttaggaggcgtgtgctctatccagctgagctactgggacatatacttttaccgaatcatcttagcggttttttgaaaaaatgtcaagaggcagcgccaaaagtcgcgcgatttttcccttccggacgcatacaatgggaggcctgagcgtcaaaaggcggaaggggggaggaccatgccatggtgggagcaggtaggcggagatgtggacgatcttatcttcgcggacgaggaatatgagatcagcgcgcgctgaacgggcagaaaatttccctttacaggagggcttctttcggctatactatatatgatattccgaaactggagaatactgtcatgatcgaatttgaagaatataagagcaaactgaacgacctgaagccgaagcttgaggagctgcgcgccgcctttgtgccgcagagcctgcttgatgagctggagcgcctgcacgccatggcggaggcccccggcttctgggacgaccccgcgcgctcgcagaaggccgtcatgcgcacgaagacgctcgagcgcaagcgcgacaagttccagtccatgtgcagcgaatgggacgacctgatgaccatctgcgaaatggcgctggaggaaaacgacgactccatgctcgaggagctgacggcgggctatgccaagctcgaggccgacatggaggaggcccgtctggagacgctgctgacgggcgaatatgacgcgaacaacgcgctgctgtccttccacgcgggcgcgggcggcacggaggcgcaggactggtgcgccatgctctaccgcatgtatacccgctgggccgaggcacacggctttacctataaaattctcgactatctcgacggcgacgaggccggcctgaagtcggcggacatcatgatcgagggcgacaacgcctacggcttcctgaagggcgaggccggcgtgcaccgcctcgtgcgcgtctcgccgttcgacgcggctggccgccgccacacgtcgttctccgccgtggaggtcatcccggagatcccggacgacgtcgaggtcgaaattcgccccgaggacattgaaatgcaggtctaccgctcctccggcgcaggcggccagcacatcaacaagacgtcctccgccgtccgactcatccataagccgaccggcatcgtcgtctcctgccagacgcagcgcgaccagttccagaacaaggaaacgtgtatgcgcatgctgcgctcgaagctcatcgagatcaaggagcgcgagcatctggagaagatttccgacatcaagggcgtgcagcagaagatcgaatggggcagccagatccgctcctacgtcttcatgccctatacccttgtgaaggatacccgcacgggctttgagagcacgaacgtcaacgccgtgatggacggcgacctcgacggcttcatcaacgcctacctcacctgcgccgcaacgggaacgtgggccacgaaataacaaaggaagctctgaataaatcatctgcggcggatggcggatctttttcgtcaatccatcggtatgaaaaacttgaaatacacaaagtattcctgcgttttccatacctcgacttgccaaaaaatctctcgccatccactcttgttgatttaatcagagcttcccaaaaaaagtgcttgataattccggcacattatgatattattgtaggcactgtatgtatattcgccctttgggctgattccggcaggccgctgccgtaaccgcggccgtttttggaggttttttactatggataccctgaagctgattctcctgatcttccagatgatctcctgcgttgtactgacggtcgtgatcattctccagaatggcgcagaggatggcctcggcgcgatcgccggcggttccgacacctatcttggcaagggcaaggccggcacgctggacgcgaagctctcccgcctgacgaagtggatcgccgctgtattcgtcctgctgacgctgttcgtcgctctgctcggctctctgtaagataagacagctaatccccctgcgtgcgcagggggattttttgtattttggagaaggtcgttgcaggggcaggggcgtgccctgcccggccgcgcctcctcgcaatgacacatcagggcagtgcagaccagcgtccttacgcggttgaatagccccgtacagggcgttcactacccgcaaggggcacgccgcatccgtaaggcggcaaagccgccaacggctgcgcagtgagcgccgctacaagccccgtcgggaccggttccgttttaacggcggccggtacgagtcggcagtgccttcccgagattgccacggcccctttggggcctcgcaatgacaattcggggggccggttccgttttggcgatagcctgttcggatcggcagcattgcgccgggcccggctgtccgatcccctacagcgcatcatcggcggcctcgcgtcattttccacttactcttcccttgcccaatcgaggctcctgccgacggcctttgcccagccgcggcgatttttttcgcgctgctcggccgtcatatgcggcaggaagctgacatcgcaccgccactggcggcgcagctcgtccggatcgtgccagatgccgacggcgagcccggccagatacgccgcgccgagggccgttgtctcgcggatgacggggcggcgcaccggcgtggccagcatgtccgcctggaactgcatgaggaaggcatcgcggctcgcaccgccgtcgacgcgcagctcgcgcagcggcacgccggtgtccttctccatggcggcgacgaggtccatgctctggtaggcgatggattcctgcgcagcgcggatgatgtgctcgcgcttcgtgccgcgcgtgatgccgacgatggccccgcgggcgtacatatcccaatacggcgcgccgaggcccgtgaaggccgggacaaaatacacgccgccggtggagtcgaccttctgcgcgtagtattccgcgtcgcttgcctcgctgaggaagcgcatctcgtcgcgcagccactggataacggccccgccgacaaagacgctgccctcgagggcataggtcacatggccgccgagcccggccgcaatggtcgtgacaaggccgtggcggctgacgcagggcgtctcgcccgtgttcatgagcagaaagcagcccgtgccgtaggtattcttggcctcgccgggggcgaagcagcactgaccgaacagcgcggcctgctggtcgcccgccgcgcccgcgatgggaatttccacgccctggatgttgcaggtgccgaagtcgccgctgctcgggcggacgtccggcagcatgcagcgcgggatgcgcaggacctgcaggagcgtctcgtcccagtcgaggcggcggatgtcaaagagcatggtgcgtgaggcgttcgtcacgtccgtggcgtggacgcggccgcgcgtcagcttccagatgagccacgaatccaccgtgccgaacagcagctcaccgcgctcggcgcgctcctgcgcaccgggcacatggtcgaggatccaccgaatttttgtagccgagaaataggcgtccggcacaaggcccgtgacggcccgaatgtgctccgtcagcccgtcggcgcgcagccggtcgcacagggcggccgtgcggcggcactgccagacgatggcggggtaaatggggcggcccgtggccttttcccagacgatggtcgtctcgcgctggttcgtgatgccgatggcggcgatctccgcggggtcgatgccgccgcgcgtgatggcctccatcatgacgccgtactggctggagtataattcgagcggatcgtgctccacccagcccgcctgcgggtagagctgggggaattccttctgcgcggaggcgacgatctgctgggagcggtcaaagacgatggcgcggctgctcgtcgtgccctgatcgagggcgacaaggtattttttcatggttcctcctcagtaaggcagcgtgctgccgccgatgaattcgcgcaggagggaatcctgcggcacgagattcgccgggacgtccggcagctcccgcatgacctcgaccacatctgacagctccggcagggcaaggcgctccagttcgtcccgcagcagcgggcggtagacgccgagctcggcggaatagaacgagtcgatgctgccgtgggcgcgcggcttgaagggcatgatatagcgctgctcgccgcggtcgacgcgctcgcgcatggcgatggtctcggacagggcgcggccacggcccgtgctgtcgcgcagcatacggcggacgagacggatcttcgacggatggagcggatggccgctgcgcggggtgatgcgcgtgcggacgctgacatagatgcgcgtcgtgcggccgtcatagcccgtgacctccgggttcagggcgtggatgccctccagaatgaccagctcgccgggccgcctgcgcagcgtgcggccatcgaagacacggacgctgtttttgaagtcatagtgcggcagctccacctcctcgcccgccagcagcttgccgagctgctcctggaaaaacggcacgtcgacgcgcgacgggcgctcgaggtccagctcgttgcggctgaaaagctccagctcccgctccgtgagcgggcagaaatagtcgtccatggagagcgtgtgcgtctccatgccgcggcggtccagctcccgctcgatgagcagggcggtcgtcgtcttgccggagccggacggccccgccagcagcacggccgggcgctcctgcgcatgggcggcgatgagatcggctgcgcggacgatctgctgttcataaagtctgcggtcatgctccagcaccgcggcggggtcctgcgcaagcagggcgctgagctgatcggtcgtcatagggcgttcctcctctgggtcccggaaaagccggggcgtgtttccttccagtatagcacaacgcgcgggaaaatgttgacggatttctgatttttgtgcaaattgccggttctttcgacagcccgccgcatgccgcggcagggccttgcacagcttgtcaaaaaagtccctccgaaactttcggctgggcagattttttgacagtctgcttgcattccttacctgtctcctctataatataaactgtatgattatggttaggagaaagaaagcaatgagtagtttgaaggaaaataaaatgggcacgatgcccattgggcggctgctgctgaccatggcgctgccgatggccctgtccatgctggtgcaggcgctttacaacgtggtcgacagcgcctttgtcgcgaaaatttcggacgttaatcaggacgcactcaacgccgtttcgctggccttcccggtgcagaacatcatgatcggcatcgcaacgggcacggccgtcggcgtcaatgccctgctgtcgcgcgcgctcggcgaacgcgatgcggacatggtgaaccgctctgccctgaacggcgtctttcttgccgggctgggcatgctgctcagcgctctgttcggcattttctgcgcagagctcttcatgcgctcccagacgtcgaacgaagccgtcattgcctacggcacggcctatatccgcatcatcacgatcgcctcgttcggcattttcggcgagatcatcttcgagcgtctgctgcagtccacgggccgcacgatctacaccctcttcacgcagggcaccggcgcggtcctgaacatcatttttgaccccatcctcatcttcggcctgttcggcctgccgcgcatggaggtcgcaggcgcggccgtggccacggtgctcggccagatcgtggcgtttattctggccatgatcctcaaccaccgcaaaaatccggacgtccgcctgcatctgcgcggcttccgcccggactggaagctcatcggccgcattctggccatcggcgtgccgtccatgatcatggtcgccatcggctcggtgatgtactacggcatgaatctcgtgctcatgcgctttgagcacgtccgcgtgggcctcggtgaggtcggcacggccgtcttcggcgcatactacaagctgcagagcttcatcttcatgccggtgttcggcatcaacaacgccgcgctggctattgcggcctataactacggcgcgcggaagccgaagcgcatcctcggcgtgctgaagtgcggcatcctcggcgcaacggcgctgatggtgatcggcgtggcggccttccagctcatcccgcaggtcctgctcggcctgttcaacgccaatacggacatgctggccgtcggcgacccggcgctgcgcaccatgagcctcgccttcgtgttcgcaggcgcgtgcatcatcgtcggcggcgtgttccaggctctcggcaacagcgtctacagcatgatcgtctccatcgcgcgccagctggtcgtgctgcttccggtggcctacctgctgtcgctttccgggaacatcgacgccgtctggttcgccttcccgatcgcggaggtcgcctcgctggcgatgacggtcatcctgttcctccgcctgtatcggaagaagatccgcccgctcagccggatgccggcggcagaataagcgagaaggaggaacggcccgatggtcattctgctgaaacagcatgccccgcaggcggagcaggagcgcctgcttgcctggctgcgggagcttggcgcggaggtccgcgtcaccggcacgccggagcggccgtttttctgcctgacgggcgacatttcccgcatcgacccgagccttgcggcgcgtttcccggccgtggaggacgtcctccggctgacagagccgtaccccctgtgcagccgccgcctgcaccccgagccgacggtcgtctccgtgggcggcgcgcgcttcggcggcgggaacttcggcctgatcgcggggccgtgcgccgtggaatcggaggagcagatctttacggcagcccggcaggccaaggccgcgggcgtctgcctgctgcgcggcggggcgttcaagccgcgcacctctccctatgatttttccgggctgggcgccgaggggctgcgcctgctcatcgccgccgggcacgagacggggcttcccgtcgtgtccgagctgatgagcgccgcccagctcgacgcgttcgccgatgtggacgtcatccagatcggcgcgcgcaatatgcagaattttgacctgctgcgggcgcttggccgcagcgaaaagccgatgctgctcaagcgcggcgtcggcgcaacgctgcaggagcttctgctgagtgcggagtatcttctggcggcgggcaacccgcgcgtgatgctctgcgagcgcggcatccgcacgttcgacacgtttacgcgcggcacgctcgaccttgcggccgtgcccgccctgcatgaaatgacccatctccccgtcctcgtcgacccgagccatgcggccggtcgcgcggcccttgtgacgccgctggcgctggctgccgcggcctgcggagccgacggcgtgatggtggagatgcaccctgacccgctgcacgcccggtgcgacggggcgcaggctctgctgccggaggagctggcagcgctgtcacagcggctgcacgccgtgcgggaggcctgcagatgaagatcgacattcccgtttcgcagccctaccgcgtggacatcgcgccggggctgctggacgacctcggccgctatgtttcctcgggaacggcggcccttgtcgtaacagaggaccatgtggctccgctcctgctggagcgcgcctgccgcgcgctgcgtgctgccggcgtgcgcgccgttccggccattcttcccgccggcgaggagacaaagtcgctggcgcagtatgccgccctgctccacaggctcgccgaggcgggcctgacccgcgccgacacggtcgttgcgctcggcggcggcgtcatcggcgatctggcgggctttgcggccgcgacatggctgcgcggcatccgtctggtgcaggtgccgacgacgctgcttgccatggtggattcgtccgtcggcggcaagacggccatcgacctgccggagggcaagaacctcgtcggcgcgttccatcagcccgccgccgtcgtgtgcgacccgcagctgctggacacgctgccgcccgccatcctgtgcgacggctgcgccgaggcgctgaaaacggccgtgctgttcgacccggacctgttttcccatctggccgcgcgcggcacggacttcgaccgcatgacggtcctgccccgctgcatcgcctgcaagcgggacgccgtgtgcgccgacgaattcgaccgcggtgcgcggcagctgctgaacctcggccacacggccgggcacgccatcgagacactcagcggctaccgcattgcgcacggccatgccgttgcgattggccttgccatgatggcgcgggccttctgccgcgacgccgcacagatcgaggccgcgctcacgaagctcggcctgcccacccggacggaattcccgccggagcggctggcacaggccgcgctggcggacaaaaagcgcgcgggagagcgcatcacgctcgtcattccccgtgccatcggcgactgcgtgctccgggaggtcccggtggacacgctggcggatatttttgaaagaggaatgtgacatggagctgttcctgccgcacggcccgctcggcgggcgcgtggacgccattgcgtcaaaatcgcagctgcagcggctgctgctgtgcgccgcgctggccgaccgcgagacggtcgtgcacggcgcttcggacgccgcggacgtgcaggcgatgtgccgctgcctgcgggcgctcggcgcgcgcatgacggcggacggaaagacactgcgggtgcagccggtcacggagcgagcgcgcggcgcggcggattgcggcgaaagcggcgcgacgctgcgctttttgctgcccgtggcggcggcgctcgggagagaaacgacgttccgtctgcacggccgcctgccgcagcggccgctcggcccgctgtgggaggcgctggaggcacacggcatccggctgagtcgccccgcgccgggcgagcttctctgcgcgggcagactggaaagcggccgttttttgctgccgggggatgtttcgtcccagtttttctccggcctgctgttcgccctgccgctgctggatggcccctcggagctgatcgccgtcacgccgccggaatcggcgggctatatcgccatgacgcttgcggcactccggcgcttcggcatcgtcacggagccgctcccggacggctgggccgttcccggcgggcagcggtaccgctcccccggcgcggtccgggcggagggcgactggtcgaacgcggccttctggcttgcggcgggcgcgctctcgcggccggtgacggtcacaggcctgcaggcggagtccgggcagggcgaccgcgtgattctggagtatctgcgccgctttggcgcagaagttgagcagaacgcagacgccgtgacggtccgtcccgcgccgctgcgcggctgcagcctcgacgtgcgcaacacgcccgatctggctccgccgctggccctgctggcggcctgcgccgccgggacgacgcggatcacgggcgcggcaagactgcgctataaggaaagcgaccggcttgcaagcatcgccgccgcgctgcgcgcccttggcgcaggcgtgcggacgctgccggacgggctggagatcacgggcggcaggctgacaggcggcacggtggacgcctgcggcgaccatcgcattgccatgctggccgcgatcgcctcggcacgctgcgatgtgcggctgcgcggggcggaatgtgtggaaaaatcggacccgcatttctggcagacgcttgccggactgcggagcggaacggaggagagcagatgagcagcagcttcggaacggtgctgaaattacagctttttggtgaatcgcacggcccggccgtgggcatgtgcctcgacggcttccccgcgggcttccggcccgatcttacggccctgcaggcctttctggaccggcgcgcgccggggcgcagcgccctgacgagcgcccgccgcgaggcggaccgcccggaattcctgagcggccttgcggacggccggacctgcggcgcgccgctgacggccgtgcttcccaacggcgacgcccacccggcggactatgccgggctggaggatacgccccggccgtcgcacgcggactaccccgccaccgtaaaatttcacggcgcacaggccgcctcgggcggcgggcatttctccgggcggctgaccgcgcccctgtgcgtggcgggcggtctgtgcctgcagctgctggcggcgcagggcgtggagattttcgcccatatcgcgcagatcgggcgcatcccggaccgcgcgttcgacccccttgcgccggagcggccgggcagcggctttccggtgctggatgccgcggcaggcgtggccatgcgcgcggagatcgcagcggccgccgctgtgggggattccgtcggcggcgtggtggagtgtgccgtgacgggcctgcccgccggagtcggcgcgccgatgttcggcggcatggagaaccggctggcgcaggcgctgttcgccatccccgccgtgaagggcgtggagttcggcagcggctttgcgggcgcagccctgcgcggcagtgaaaacaacgacccctattacatggaaaacggcgcggtacgcacacgcacgaaccacgcgggcggcatcctcggcgggctttccaccggcatgccggttttattccgcgcggccttcaagcccacgccgtccatcgccctgccgcagcagacggtgcgtctgtcggacggcgcgcccgtcacgctggagctgcgcgggcggcacgacccctgcatcgtcccgcgggccgtgccctgcgtggaggcggccgctgcgatcgcggtgctggacgccgcactggaggcacggatatggaagctttgaacgatctgcggcaggatatcgacgcgctggacgcccggcttgcggccctgtaccgccgccggatggacgtggccgcgcgcattgcggccgtaaagcgggagcagggcctgccggtcctgcagcccgagcgggagcgggagctttgcgcccggctgacggagctggcagccccggccctgcagcccggtatgcaggcctggttcggggctctgcgcgccgcgagccgtgactggcaggaaagcagccccgcccccggcgcgagcctgcgctgcggcctgctgggcgagcacctgcgccacagctattccccggaaattcacgccatgctcggcgcgtattcctatgacctgttcgagatcccgccggaggggctggcggactttcttcacggcgcggcgtgggacgggctgaacgtgaccattccctataaacgcgccgtcgtgccgttctgcgcggcgctctcgcccatggcaaagcagaccggcagcgtgaacacgctcgtccgccgggcggacggcacgctgtacggcgcgaacacggacgcgggcggcttccgtctgctcctgaagcggggcggcggcatcgcgcccggcgaaaaggctcttgtgctcggctcgggcggggcctcgcagacggtgcaggccgtgctgcgggcgcagggggccgaggtcgtcgtgatctcccggcgcgggccggtgacctacgacatgatcgagcagcatgcggacgcgcggctcgtcgtcaacgcgacgcccgtcggcatgtatcccgaaaacggcatctcgccgctcgacctgcggcgggtgccgcagtgccggtgcgtgttggaccttgtgtataaccccgcgcgcacggccctgctgcagcaggcggaccggctcggcctgcgggccgaaaacggcctttccatgctggcggagcaggcccgctgcgcggcggagctgtttttgcagcggcccgtcgacccggcgcacacggcggtcatcacggatacgctgcaaaagcgcatgcgcaatctcatcctcatcggtatgcccggcgcgggcaagacgaccgtcggccgcctgctggcgcagcggctgggccgcgactttttcgatgcggatgacgagctggtgcggcgcttcggctgcgatatcccgacatttttcgcgcgcgagggcgaggccgccttccgcgcagaggagacggccctgctggcggagctgggcaaacgctccggctgcgtcatcgccacgggcggcggctgcgtcacccggccggaaaacgagccgctgctgcggcagaacgccgccgtcatctggctgcagcgcgcgcttgaccggctgcccgtcgccgggcggcccgtgagccgacgcacgacgccggaggcgctttacgcgcagcgcgccgcggcctatgcccgcttttccgacggcacggccgacaacaacggcacgccggacgagaccgtccggcaaattctggaggcatggacatgaacattctggtgctgaacggcccgaacctcaacctgctgggcctgcgcgagccggagctttacggccgcgaggactatgccgccctcgagcgcttcatccgcgcggcggcacaggaggccggggccgcggtcacgatccggcagagcaattttgagggcgagcttgtgacgtgggtgcagcaggcccacggcgtgtttgacggcctcgtcatcaatgccgccgcctatacgcacacgtccgtcgccctgctcgacgcgctcaaggccgtccgcctgcctgcggccgaggtccatctgacggatatcgatgcgcgggagccgttccgccgcatttcctacgtcggcatggcctgcggcgcgcacttcaagggtctcggcttcgagggctaccgccgcgccatccgctggctctgcggtctataaaaagcgcgccgtcagcgcagcgaccagaaaccccgtcaggtcggcgatgagcgccgcaggcacggcatagcgcgtgcggcggatcccggccgcgccgaaatagacggaaatggtataaaacgtcgtctccgtgctgccgagcacaacggcggccgtccggccgatgagcgaatccgcgccatactgcgccataaggtccgcgccgacggccagcgccgcagagccggagaccggccgaagcagcaccagcggcagcacctgcggcggcaggccgagcacgcgcgcggcgggcgtgagccagcgggtaagcagatccacagccccggaggcgcgcagcagatgcacggccgtcagcagcatgacaagggccggaacgatggacacgagcagccgcagaccgtccagcccgccctcgagcagggcggcatagaggtcctgccgccgtgcgagcgccgcaacggccacggcggccagcagcatcggaatgagcaggtcaagcacggctcgccctcccgaagaggaacgccgcaagcagcccggccgtcacggagcacacagacgtgagccagacagcgggcaggatgtcgaacggcgcggcggccccgtttgccgcccgcacggccgcaacggtcgttggcagcagctggatggacgccgtgttcagcacgatgaggcggcacatctcgtccgtggcgcgggcgctgccggagcgctgctgcatccggcgcacggcggcgatgcccatgggcgtggccgcattgccaagccccagcaggttggccgcaacattggccgtcaggtagcccatggccgtctcatcctgcgccgtctgcgggaacaggcggcggaagaccggccgggcaagccgggccagcgcccgcatgccccccgcgcgctcaagcgcctttgccgccccgctccaaaggcacagcgccccggcaaggccgagcgccagccggatcgcagaggccgctccctccagtgcggcggccgtcagcgcgccggtctgccccgtgagcaccgccgcgccgagcgcaagcagcaccattcccgtccagatccatcccatgaccatcgtgtacccctcccggacatcttctgtagcactatatggaaagcttttccgaattttgcataaagagcttgacagagttagacaaaatgctataatgaagatgtaatctgaccggattctgcgcaaaaacagaaatggggggactgcgcaatgagagcaatgggtatcatccgaagactggacgaactgggccgcgttgtgatcccggtggaaatgcggcgcatgctggacctggcggaccgcgacatggtggagatcgccgtggacggcgaccggatcgtgctgcagaagcacacgccccgctgcgtgttctgcagccgcagtgaagcgctggtcgaatatcacaaccggcgcgtatgtgcgtcgtgcatgcgcgagctgagcgccatgggcggcggaacaaaggtcgcgcggcggcgcacggaggactgaaccgctccgtctcccctctcgccgcgccgaaacggagaaaaagcaatgaaggatatcccggtcttttcctgcccggacggcatcgccacgctgatcctgcgtgaggtcccgttccgcggcgagggctatatactggtacgcggcgtgttcggcaccctggagggtctgcttgccgaatgcgcaggcttttgccgcgccgcaggtgcggagcggctgtttgccgcgggcgaagcggatttttccggctatccggccgccatccgcattctcgggcgcagcgcgccgcgggagtcgctgctgcccgcgccggaggcggtgcgccttgttcccgtcacggaggaaacggcagcggactgggcgcgggaatacaatgcgcgcttccgggccgtgcccgcagcggagagctgcagcccggcggaggagcgcgcgctggccgcgggcggcgaggccctgtggatctgggacggtgcggagcgcatcggccttggccgcgtgcgcggcagtgagttgctggcagtggcggcgctgctgcccggcgcgggcgaacgctgcgtgcgggcgctggcggcccggtgcgcagggccggaagtgcgcctgacgtgcgcagaggagaacgggcgcgccatgcggctgtatgaccggctcggcttctcccgcggcgcggaggagcgcgtgtggttttccatttgatactagaatctgataaaaagctttaaaagctttttatagcgccgagggcgcgtcagattctgcatgagacggcgcagcgtgcg

SEQ ID NO: 11173 - DNA, 1709 bp, Unknown
  gut microbiota DNA sequence
aggaaaacggcggcaggaagcgcttcctgccgccgtctaattttgaatcagaaaagagtatgacaatgagctttaccggattttatcccgagacgatcgattttctgtggggaattcgcctgaacaacaaccgcgaatggttcgaggcgcacaaggccgactatcagcgcttcctctgggagccgatgaaggcgctggcggcggacgtcgaggccgcattcacgggcatcgagggcctgcggatgcgcgtttcacgcatttaccgcgatatgcgcatgcacccgcccgtgccgtataaggaaacgtcgtggatgtgcctgcgccacgacggcgcaagctggctggagcacccgtgcctgtttttcgagctgacgagcgagggctacagctacggcctgctgctgtggaacccgcgcgcggccgccatggagcgctggcgcacccagctcggcgaccggacggaggaattcctgcagatggctgcccgcgcagagcgggaaacgggcctgcggctcggcggccgggcctatgtccgcccgaagcagacgccggacgagcgccttgcgccgtattacagcctgcgcaatgtatcaatggtgcgcgagtgcccgctgggggatgagctgtatacgccccggctggccgagaccgtccgcgatacgctgcacgccctcctgccgctgtatgagttctgcctgtccgcggtgggatgaccggcagagactgccccgctgcccgctatgttgtaggggggggacagccgggcccagcgacgcacttgcagttcgtacaagctgccgttaaaatggaaaacgcccccgatttgtcattgcgaggaggccgcaggccgacgtggcgccctgagcgcgcagcgcgaggaagtgcccttggggtgcaatctcgggaaggcactcacgatttcgccgatgactttcctgttatccaacttggtgctgcgagattcccacgtcgcttcgctcctcggaatgacaaatctggaagcctgtcaaatttctgcgattttctccaaaacacgcaaattgatacttgactttttctctatatatgttacgatataattgtggaaacccgccgtccatggttgatcccgattgacggtgtacggttcagagacggttgcctgtcatcccgcgggtgcggaatggaggcagaaatgtatagcccctgcgggaaataacccacgggaggtgatacatataacacttcaggatctgttctgggttctttcgatcatctggctgatttgccagatcatcgactggctccgaaatggaaaaaagtgagccgtctgacgcgaccagacgactcactggtttgtaaatgctaaaattcacaaaccggaaagatgttttatgatcgtggcaaccgtccgggtttccacatctttattatatccgctcgcagcagaaatgtcaaatacattttgacggaaaatgtcccggtaaaacgttttgcgctttcgccggggctttttgtgatccgggcatatgccgcgagattgcaccccaagggcacttcctcgcgcttcgcgctcagggcgccacgtcggcctgcggactcctcgcaatgacaaacttgagaacttcacgccacagaatgtgtgccgcaaagattgccagcctgcatggcgctcgctgagcgccgctacagacgcaattggtttttacgtttttatcggaaaccggcac

SEQ ID NO: 11174 - DNA, 11603 bp, Unknown
  gut microbiota DNA sequence
gcacggccgaaggcctgcgtattattcattattcattcttcagtattcattttccacatgcccctgctttttccctgcagatttacggattcacgacattctgcggcttgcctgccaggaaggcgcgcaggttttccgcgctgatggtctgcaggcggcggcgcgtttcaagcggagcccacgcgatatgcggcgtgaggaagcagttcggcgcggtcagcagggggttgtccgcgcggatcggctccgcagagacgacgtccataccggcggccagcagcttgccgctgcgcagcgcgtcggccacggcctgctcgtccagcagcccgccgcgggcggtattgagcaagatcgccccatccttcatctgcgccagcgcgcccgcatcgatcatgcgggcgttttctgccgtctgcgggcagtggagcgacacgacgtcggactgcgccagcagctccggcagggagacgaagcgcgcgccctccggcacgggcttttcatgccgcgccgtgacgagcagcttcatgccgagggcctgcgcgactgcgccgacggccgagccgatggcgccgtagccgacgatgcccatggtcttgccgtccagctcgatgagcggccggtcccagaagcagaaatccgggcaggtctgccaccggcccgtgtgcacggccccggagtgcaggccgacctgctggcagatctccagcagcagggcaaacgtcatctgcacaacggcgcgcgtggaatagccaggcacgttgcacaccgtgatgccgcggcgctttgcggcggcgaggtcgacgatgttgtagcccgttgcgaggatactcacgagcttcaggttcgggcaggcggcaaaaatttcgtccgtcaggcggaccttattgatgaaaacgacctccgcatcgccgatgcgggcggcagcatcctcctgcgcggtgcggtcatagaccgtcagctcaccgagggcggcaaattcatcccagctcaggtcgccgggattggcggcataggcatcgagaatgacaattttcatgactcacgccccccaatattcgcgcgcggcatgacggctgacaaacgaataccatgcaatggccgcgatcgggaaaacgatctccagaatattgcacaccagcgtatccatcgccgggatgaatacgacgagcgccgtgaacgcgccgcacagcaggaacgcggcgccgatgatgatcagacgcggcaggatgtagtcgatgaagccgtccggatcgatgcagtcgtccttcgtgcagccgccgggatagagcagcttgttatcaaacaggacgcggtcccgcctgaggcggaagacggtgtagaacaggtagagcgccacggcgggcagcagcacgatcatgacccagtcgaggatgttggtcagctgggtcaggtcggcgccgttcgagccgctctgcgcagcgtccgcggcattggcggcggtttcaagcaggcgtgtgagcatatggggtctcctcctatatttcgataccatgattatagcaagtccggccgcgcaatgcaactgcgattctccgggcgggctgaatgcatattcgggttgcatattcgtcccccgcgtgatatgatgagagaagccaaaaaacaaaaggaggtacatcatgaaaacaaggatccttgccgtgcttctggcgctggccgtcgtgctggcgctggcgctcccggcgctggcggccattcccgccgattccgtaccgtataacaccggcacacgccatgagacctgcacggccctgagcacacaggcggagcagtattacaccgacggagcggaaaccctgctgaagctgtccggcagcacctcagacagctctcttgagagcatggacagtgcgctttaccgcgcgctgcagtccctgatgacggataccatgaccgattccgtcacctataagtccctgcctacctactgggcacgcacggacgcctcacagggcaaagacggtctgctcctgttctacagcgacacgaccggcggccgcatgagccgcgagcacgtctggccgaagagccgggcaagcttcatgcagcagaatggcggcagcgacctgcaccacctgcgccccgaggattccggcgtgaactccacgcgcagcaactataccatgggcaacgtgctgggtgtctatcccgactgcaccacgaaggcctttgacggcaagaccgtcctgtggtacagctcgaagaacgaccgcgtcgaggtcgccgacaatgtcaagggcgacctggcacgcgtgctgctgtacgtctactgccgctgggggcagccgaatctgtttgagaaggtttcgacggacaatctgccgccgtatgacagcgacgaccgcgagaacaccggcatgcccgtcatcgagagcctcgacaccctgcttgaatggatgcaggaggaccccgtggacacctgggaaatgagccgcaacgactgtgtccagcaggtgcagggcaaccgtaacgtctttatcgactatccggagtttgcctggctgctgttcggccgcgagcttcccgcagattatgacacgccctcgggctacgcccacgagcacggcagcgatgtcgaaaacttcacgctcacggccgcctcgtccgatgagacgcgcggcacggtcaccgtccgcagccacactgtcacggccttcccggccgagggctactgcgtgggcggctacacccttaccccggcggacgccgccgttgtaaagcagaacggcaacgtcttcaccgtcagccgcatgacgaaggactgcacactgaccgtgcagtttgacccgcgcaccccgtccaccgtgcacttctccgtgccggagggcgtgacggcccccgccgatgcggcgggctacaccggagacacgttcaccttcccgcagccgtccggcacgccgtctgacacggcgcacgattacacgttcctcggctgggccgccgccccgcagacggacacggacagccgcccggacttctccgccgcgggcgcagagcagatgttcacgcaggcggagcagacgtattacgcgctctactattataaagtcgatgatcccgacgccgtcggcgacgagtaccgccgcgtgatggtcgctccggacgactggacgggcagctactgcatcgtctcgtcggacaaaggcaagatcatgacgaacacccccggctcgaagccgacgtatctggaggcggccgacatcgagatcgacagcggcagcgtccgcgacccgaagtgggtctacacgctcacggccgccggagacgggacgtactatgtgcgcgacgcggcgggcctctacctcagctgcaccggcaagaagaacgtctctctgacggaaaccccggatgacacctgccgctggacgccgacgctgaacggcctgcagtcggacaacggcatgctgcagtacaatgccagttcgccgcgcttcacgacctacacgagcagtcagagcgcggctcatctctacgcgcccgccgcgggctcgaagacgtggtacacgactctcggcggctcggagccgacgccgcacgagcacacctggggcgtctgggagatagtcgaagcggcgacctgctttcatgacgggcttgaagcaagaggctgcacgggctgtgacgctgtggaaagccgcgtgatcccggccaactccgataactgcccgtccaaggcgttcaccgaccgtccggaccggggctggtaccacgagagcgtggactatgtcctcgagaacggcctcatgaacggcatgggcaagggcaagttcgagccggataccaccctcaaccgcgccatggtcgccacggtcctctatcgcctctccggcgacaaggtcagcgcgacgaacgccttcccggacgtcccggcgaacgagtggtacggcgaggccgtggcatgggcccagcagaagggcatcgtcaccggcttcgaggacggcacgttccgcccgatggaggagatcagccgtcaggacatggcgctcatgctgcagcgctatgcgaaaaccgtcaagggaacggacacgactccgacgggcgacctcagccgctggccggatgccggtcaggttggctcgtgggctgttgacgcgctgcgctggtgcgtcggcgcgggcatcatcaacggcaaggacggcggcctccagccgaccggcaacgccacccgcgcagagttcgcgaccatcctcatgcgctacgcgaagctgtaacagaacaaagcacaagggcaggccaagtccgcattcacttaaggacgaaaggtgctcaaaagaatacggcatagcttacgatcatgtaggctatgccgtttctttttgctcttgttgtgagatatcgactacgccgataaagttccaccatatgaccaaggtctgcttttttgaccgtcaatcctttcgcttattataccacgcagatataatacctatgttaagcaagaggcttttgggacgattggaacaccgaaaggctggcttttacgacccggctgacaaaatggatcatttcctctttgctgtacttgtcatagccctccacaacgacatgcatcaaaccgtttgacagatgggtatacatcatttcaagctctgtttcgctggcattgggcagttctttccgccagtaagcaatgctgtcctccttggccaaggcgatcatccgcatcaggacggtcgagcttgtgttgcccaggatcagcacccggcaggcctcctgattctgatcgaccatatcgtagatggcctcgatcagcgccgtcacatcaaaggaattgacatagcgaagggatttttcgaatgcatcgatgagttcattctcaatgctctccatcagggcaaagcaatcgctgtaatgggcatagaaggtggcacggttaagctgcgccagcgcgcagacctccttcaccgtaatcctactgaccggcttttccttcagcagctccaaaaaggactgcttgagcaccatttgcgtatagcgtttccttgcatccagcttctccattttgcgctcctcacaaaaagtttacaaaattctgcaacactccggcacgccgtgttgcttttctttcaattgcagggcaaatgccgattgtttctgatctgcctctccagtatactatacttgtgaaagataatcaacacctgtatgattatcttgagaggaggtcttttgaatgtatgataaatatcttgttacaggtgctaccggcttcctcggcagggctgttgcggagaggctggtgcgccgcagagcgcaagtgtacgcgcttgtgctgcagaatgacccctatatcaatttgctccccaaagaagtccataccgtcatcggtgatgtgtgcgcaaaaaactcgctggcagacttctttgcggatgccgacagccgtacctgtgtgattcactgcgccggtatcgtctccgtcgcgtccagacccggtccgaggctctatcaggtcaatgtaggtgggacagggcagctcctgcagcaatgcatggcgcataaagtgggcaagctggtctatgtcagctccgttcatgccatcccggagcagccaaagggctgccccattacagaaaactgtgaattctcgccggggcttgtggacggtgattacgccaagagcaaggccgctgccaccgagctggtctacgacgcggcggcgtgcgggttgaacgccagcattgtattcccctccggcatcatcgggccggacgatttacagggagggagcttcacctcaatggcaagatcctttcttgccgggaagctgcctttcgccgttcgcggcggatatgactttgtggatgtgcgggatgtggcaaatggcattctcgcctgttccgaaagcggagagcccggtaaaggctacattttgtccggccactatgtcacgatccgcaggatgctgcagatcatcggggcggcggcaaaacggcggtatcggcccatctgcttgcctctgggtcttgcaaggctggccgctccgtactacgagcgccggagcttgaaggatcgaaagccattgtttttcaccccatattccatttccgttcttgcctcaaacggctgcttcagccatgcggctgcatcgaagtgctttgcatatcagccgcgcccgctggagcagaccctgcgggatatggccgcatggctcattgcacagaaggaagcgggcaaggcgctgcctcatctcatccggcgccccacgatcagcggtgcccgctgctgagctgctctgtgcgtcggccttctgcagcacatccgggttatttctccgggtgtgctgctttttatcgctccgcttgtcctcttgcttttcttccgagattcgtatatactgaaattgtgttgtacttttttatcggtatggaggggacggcgcggcacggctgtgcaagcgtctgacaggctgccctgcatcctgaacggctgcaaaggaaagggaacgttatgacctgtgacgaggttttttaccgccaatatctaagcggcgacgacgcagggctggaggccctgatggaaaaatacggcgaccccctgaccctgtatattgacggctatctgcacgacgttcacgaggcggaggagctgatgctcgacgttttcgcctatctgttcaccaaaaagccgaagatacgggacggcggcttcaaggcgtatctctataaggccgcgcgccacacggcgctgcgccacaagagcaggcggaagcccttgttcagcctcgacgcgctgaccaacgaaccggacgggcggctgctggcggaggaggttatccggacggaggagcgaaaccgcgtcctgcatttctgcatgggtgaaatgaacccggactaccgggaggttttatatctcacctattttgaagatatgagctacgcgcaggcggcggaggtcacggggaaaacgataaagcagatcaccaacatggtgtatcgcggaaaagagagcctgcgaaggctgctggaacgggagggaatcacaaatgcggagtcatgaggaacgggtcgcggagacaaagcggcgcatcgccaaaattgagcgggagaaacggctgcggcgcaataagattaccatggcttccgctgtggcggcgtgtcttgtgctgctcattggcgcgtccctcgccatgcccggcattgccgcaagcatccggaccggcgactactccggctttgaaacggcggccagcatgtatggcggcggcgctctcggatatatcgtcatcgggcttttggcgtttcttctcggtgtgtgcgtgaccgttctgtgcttccggctgcatcagatgaaccgggaggacgatcagaacaacgaaagcgagggaattcatggagctgattgagaacctgctgcagctgctggtcacgttcgccggcgcactgctttcgggtctatcctaccgcagaagccgcaggcaggcgtattttctgctgctttgcttctacggctgctttgccctcggcgcgctctactggacgctgtatctgctgctgttcgacaccacaccccgggtcttttatgtgtcggagttcggctgggtggcaagccttatcttcctgcggatcttgcaggccacgctggcaggaacagaggaacgctgcttccgctgccgcagagcatggcttgcgcctgcgttcggcgtgccgctgctggcgttctactgcaccttcggggacattctctccaacctgctctggtgcggcatgatgatatggctctccttctgcgccattcgggggattgcttgtgcgaaaacgcagacgggcgcggcgcggaatatgcggtggtttcacatcggcgtgttgtgctttgccggttcggaatatctgctctggacggcgggctgcttctggccggatacttctcctgcaagccccaccttctggttcgatatgctgctgacgcttgccattttcgggctgctgcccgccgcgagaaaggcggtggaagcatgacctatattgaaaatatcttcctctgcatggcatccccgctgctggtagctgctttgtgcatgggcaggcggcagctccgcttcttcctgttctgcattgccgggatgggggtgtgcctgctttcggcttatatcaacaccttcctcgcggcggtatgtcaggcggacgcccttgccgccacggcggagatcgcgccggtggtggaggaaatcatgaagctgctgccgctggtattctatcttctggtattcgagccggagggggataaaatcaaggctgccgccatcacgattgcccttgccttcgccacctttgaaaacgtgtgctatctcatccagaacggagcggaccgcttctccttcatcttcttccgcggtttcggaacgggagccatgcatgtgctgtgcggcggcatcgtcggcgaagggctggcgtatgcctggcagcggacgtggctgaagatcgctggcacctgcggtctgctgggcgcggccatcacctttcacgccacctacaacctgctgatcgtctacggcggcgcggcgccgtacgtcgcttacgtcctgccggtgctgctgatggcggttggaaagctgtctgccctccgccttacgcggagagaataaccaaagccttccacttgagagctgcttttgagcggctctcaatttttttgaaaatctttatatttggggtgagagtttttccgtttttctgtacctatatcagtgaagggacttttacgtcaccacgttcgagccatgaagagaggagtgggccagagacatgtatgataccgcaaggcgggtcgcgctcgtcaaaaagcggaggcacgagtacgcccgccggaagcagcagcgtgagatctgcggactgtccgccgcgtgtatgctgctgttcgcggcgctgatgcagacggcgagcacagtcgtcgggccggggcagagcgccgcacgaggtgtgttcggtgcgatgctgctgcgggaggacgcgggcggctatgtgctggtggccgtcgtctcctttgccgcagcggcggcgatcaccgcgctgtgcttccggctcagaggcagggaaaaccagaaaaaagacgggacaggtaagccagacccgcagaaacaggagggaaaaacgacatgaaaaaacgaatacttagcatcctgctgctgtgctgcatggtgctgaccatgctgccgacagtggcgtttgcagcggtgagcgattcgctgggcaacacacctgaggaaaatcaggcgattttggagcagctctccgccttgaccggcggcagcagcgaccaagtgctttccatgctgaacgctttggggctgctggatgaagacggcaatttcaaggtggatcaaaccatcacgctggacggccaggtgttgacactggcggctgtcatggagctgctggaaaatcccgccacggatctcacccgtatcgccgacgtggatgggaccccggtggcgctgggcgatttgaaaaccatgatccaaatcgaacaggagctgcagcggatcaaggacacctatttctccggcagggagtttaccggggaagcactggagaatctcaatagcctgatggagcagctggagctgcagggcatcagtttgcagtattccgcctctgccacaaagcctgagggcgttgagacggtggatatgagcagcatgatgagccaaacgctggaggttctcgcaaacaacacctggaactccgggacttttactatataccgcggaaaaccggtcggcttttcctaccgcattcaaaaaggccagctcagcaagtatatcaccaatgtggaggtctcgatagacggggtgagtggggtcgagcaaagcgacgggtcctacaagctgacctatgacgcaggctcaacttacaatttaggtggtcgtaaaatcactgtcaatgttcaaaccagaggagggaactcagactggctcgcgaattcttattcctatggcgacctgctggggatgatcgaattttacgatgcggaaaatctggtgttctatgacggcgccggttatgccgaccactgtcagctcaagctaatcaagacggttggcgtccccgcaatacaaacagtaatgaccgcgccgaactatgaggaaagatacgaaagtacagccacaatacagggggatatgtatattcctttgctggcaaatgaatacactacagcccttggtgccaacaatccggacttcgttgcgctaagcgataccatcagaattctggagggcgcccgcaactcggtgcttcccgccggctccgacccattttatcagccataccaaatcgacgccagcatcgagtttaactggagtaccgaaaaagctgcctatactggcgatgcgccgtatggctggtataaaaaccagccctatgccccgttctatctgacggagtacaagttcaatggaaaatctctggagctcagcaacaacagaacaaaagcgctgaactgtacgatcaacaagggcagtacggtcagcatctccctgcagtctaccacgcaaaacagaggggatcagcggtactatctgcccttccgactgtatatgaaaagtgtacagggcgaaatccaaaattcctgggccaccaccaagaacagcaacgtcaccgccaggttggtggacacggacgcccccaccattcaaagcgtcacggccccggcgggaacctatgccagcggacagcacgtccccatcacagttacctttgacgagttcgtggatcttagaagcgccagcgtgaccatcaatggcaaagagtataccgccgctgagctttccatgaacaaatacggtgtcacggcaatgctctggtatccagtgcaggatacggatgccaccacggtcaccgtcaatggtatgaccggcgtgaaggatgttttcggtcatacgctggataccacgccctatcaaagcaacccgattgccggcgttgagctgaagagcgtcttgatgcgcaacgctcccaccgcactgaccgccgactacgacaacggcaaggcatcgttcacgatgaacgccaacatggagcaggcctacaagaccgtatacagcaattatcacaccccggcaggcacagacccgaagcaagccccattccgcctcgagctgaggtacgactccgcggttgaaccaatccatctgcaggtctatctggacacagagaaggaagccttcaccattagcgactatgcaatcgcacccgcggcttacacccgcacctatacggtgacgctgcaggccaacgagggcacgaaagacgctccgaactgggtgaatgttcttcccctgacccggcagttcacggtggcaaagaaagtttccgcgcacacggtgaccatcgtcccggaagcgaatgacgccgactatacgatttccctcgccgaagccgcccgccccacgcttcaggcagaggttttgggggaaaacggtgagcaggccacctacaccaccggcaaatggagcagcagtgacacgctcattgccaccatcaacgaggataccggcgttgttgccaccacaggaaccaaggtgggagccgtcacctttacctttacggcggacaacgggactgtggaccctgccgatgatgtga

SEQ ID NO: 11175 - DNA, 5940 bp, Unknown
  gut microbiota DNA sequence
tgtacgaactgcaactgcctgcacgagattgccacgtcggctgcgcctcctcgcaatgacaagcctttggttttcaccattttaacgatagcctgttcgggtcggcagcgttgcgccgggcccggctgtccgctcccctacaacgcgcatcgatggctgcctgcgcaacacgcaggcagcggaagccgggctcccgctgtgcgttacctttggaattccttatttcacggcactccagccggtgacttcgccggtgaagatctggcggatctgctcgaggctcaggttatcgacggtgctgtcgttgttcacgaccactgcgatgccgtccatgcagatcgtggtgacttccagaccctgctccttctcgctgtccttgacatcgcgggaggccatgccgatgtcgcacaggccctcaatggcggaggtcatgccggtggaggagtcggactgctggaccttgacggtcacgccgctgttgagcgccatataggcctcagcgagcttttccatgaccggggtgacggaggaggaaccctcgatgacgacggtgccggtcggattactggaggtgaaggcgccggtggagccggtggagacgcagcccttatcggtgatgacctgctggccctcgtcgctctggataaaggcgatgaaatccttcgcagcgtcgctcaggtcgcccttcgtggcgatgttgaacgggcggcagatggggtaggtgccgttcttgacgttgtcggccgtggcctcgacgccgtcgaccttcacggccttgacggagctgtcgagggagccgagggagatgtagccgatggcggccttgttgccggtgacggtctgcatgacgacggcggtggagctgctgatctcggcggtggcgacggtcttgtcgaccttgtcgacctcgacgccggtcagctcgacgaacgcgccgcgggtgccggagccttcctcacgggagatgacggcgatggcatcgctgccgccgttgccgccgcaggcggcgaagcccagcgccatggcgccgataatgccgatggcaagaattgctttgaagatctttttcataactcaaaactcctttttgattgtttcctttgatttcggatcacgcgcctatcataccggctcgctgtaaagcctgacaccgtgaagatgttaaatccgcgtaaaatcatggacttcttaacacaaaatacacttgacgggagcggcaaactccgctacaataccatcgtaaccgaatatcgacagttcgagaccatcctgtcgtaaaataaaactatggacagctgcgcagcgtccatgctgcgccttttttgtcccggaatggagaaaacatgaaatcaaaacagatccgtatgatcacgcacggcgcgatcctggccgcgctctatgtggccctgacctacctgcagaactggctgctgcccggcacaacgtcggccgccattcagttccgcgcgtcggaggcgctgtgcatttttgccctgttcactccggcagccatccccggcctgacggtcggctgtctgctgttcaacatttccaacgcgggcgcgctgccgctggactggctcgtcggcaccggcgcgacgctgctggccacgacgtgcatgtatctgctgcgccgtgccgcgctctggaagctcccgctgcccgcgctgctcatgccggcggtctggaacgccgtgctcgtcggctgggagctgacgtattacatcggtgagatcccgttctggctcaacgcggtctacgttgcggccggtgaggccgccgtcctgctcgtgctcggcacggcgctgtattttgcccttggctcccgccgcctgcaggagcgcctgttcccgcagggcgtttgagaattcctccccgtccgccgcgtgttcggttaccacgctccggagggggagtttttttcgccatcggccattgcaggggagtggacagccggtcccggctccgcaccggcaaccggcgcaggttgacgataaaacagtaatagctcccgacttgtcattgcgaggccccgaaggggccgtggcaatctcgggaaggcagctgcgatttcgccgatggctttcccacattccgatcgggtactgcgagattgcaccccaagggcacttcctcgcgcttcgcgctcagggcgccacgtcggccttcggcctcctcgcaatgacaaatttaggggcattgcgccactgaatttgttccgtaatcattgccaacctgcatggcggtcactgaccgccgctacagacgcaatcggtttgtacgtttttatcgtcagcctgtttcttgcgctggtgcggagccgggcccggctgtccgctcccctacatttccctttgcggtgtcgaaaaattcccccggggagggttttcattccagccggaatgtgatatgatatggtagtaatgatttaatctctgcagcgaggaattccgccatgcatgaaccaaacgaattcggcgtgccgacgcacgcgcattcccataccgaagcccattcccactcccacccgcacgtccacgagagcaagaaaaacgtcgtcaaccgtctggcccgcgccatcggccatctggaaaaggtcaagcgcatggtcgaggacgactgcgactgtgccgaggtgctcatccagatcgctgcggtacgcgccgccatcgagaacaccggcaaggtgatcctgcaggaccatatccagcactgcatcgtcgacgccgtggaggagggcgacgatcaggccattgcaagcctgtgcgccgccattgataaattcatgaagtaagaggttgccccatgaccgatttgaaccacatccggaatttttccattgtcgcgcacatcgaccacggcaaatccacgctggcagaccgcctgctcgaggagtgcaacaccgtggacaagcgcgagatggaggaccagatcctcgactccatggagctggagcgcgagcgcggcatcacgatcaaggcccgcgccgtcaagctgacctatcacgccgacgacggcgagacctatacgctcaatctcatcgacacgccgggccacgtggacttcaactatgaggtctcccggtcgctggccgcctgcgagggcgccgtgctcgtcgtggatgcctcgcagggcatcgaggcccagacgctggccaatacctaccttgccattgacgccgggctggaggtcatccccgtggtgaacaagatcgacctgccgtccgcccgtccgctggaggtcaagcacgagatcgaggacgtcatcggcatccccgccatggaagcgccggaaatttccgccaaaaacggcatcaacatccacgctgtgcttgaggacgtcgtgcggaacattcccgccccgcagggcgaccgtgaagcccccgtgcaggctctgatcttcgacagtcaatacgactcctaccgcggcgtgatcgtctatctccgcgtgaagaacggcgtgctgcgccccggcatggacatccgcatgatggccacgggtgcggaatacaagatcgtcgaggtcggctacctgcacccgaacggcatgatccctgccgatgctctcggcgcgggcgaggtcggctatctcacggcctccatcaagaccgtggcggacacccgcgtcggcgacaccgtcaccggcgtggaggacccctgcagcgagcctctgcccggctacaaggccgtgcagcccatggtctactccggcgtctatccggccgacggcagcaaatacggcgacctgcgcgacgcgctggagaagctgaagctcaacgatgcctccatgtcctatacacaggaaaattccattgccctcggcttcggcttccgctgcggcttcctcggcctgctgcacatggagatcatcatggagcgcctggagcgcgaatacaacctcgacctcatcacgaccgcgccgaacgtcgtctaccgcatcacgaagacgagcggcgagaccatcgaggtctataccccgctgaattaccccgaccccgccgaaattctgcagtgcgaggagccgttcgtccgcgccagcatcctgacgccgccggaatacgtcggcaacatcatggagctttgccaacagcgccgcggcgaataccgcgacatgacctacctcgacgagggccgcgtggagctgcactatttcatgccgctcaacgagatcatctacgacttctttgacgcgctgaagtcccgcacgcgcggctacggctcgctggactacgagatggacggctaccgtccgtcgcgccttgtgaagctcgacatcctgctcaacggcgagatcgtcgacgcgctgtccttcatcctgtttgcggacaacgcctacgcccgcgcgcgcaaaatttgcgaaaaactcaaggagaatatcccgcgccagatgtttgaaattccggtgcaggcggccgtcggcggcaagatcatcgcccgcgagaccatcaaggccctgcgcaaggacgtgctggccaagtgctacggcggcgacatcacccgcaagaagaagctgcttgaaaagcagaaggaaggcaagaagcgcatgcgcaccttcggcacggtgtccgtgccctccgaggcgtttatggcggttctgaaaatggacgaatgaagcacatcaccatctataccgacggggcctgctccggcaaccccggccccggcggctggggcgcaattttggagtggaacggcacggagaaggagctttccggcggcgaggcgcagacgacaaacaaccgcatggaactgaccgccgtcatctccgccctgcgcgcgctgaaggagccgtgcgaggtgtcgctctacaccgactcaaaatacgtctgcgacgccgtgcagaagcgctgggtctatggctggcgcgcgcgcggctgggtcaaggccgacaagaagcccgcgctgaacgtcgacctgtggcaggagctgctgcccctgctcgagacgcaccgcgtgagctggaactgggtgaagggccacgccgacaacgccaaaaacaaccgctgcgacgagcttgccgtggcgcagagccgggcacacgcccgcgcgtaacggagggagaacgcatgttttacggaattctggccgcccttgcggccgtgatcgtcgggctggatcagtggacgaagtggctgacggtgacgcacatcccgagcacgaacggctcggccgtcgtcagggccattccggggtttttccacatcacacacatcaagaacaccggcgcggcgtggtcgatgctcgaggggcagacgtggctgttcgtgctggtgacggtggcattcttcgccattgtcggcgtgctgatctggaaaaaggtcctgcagaagaaatttgagcttgtatgtctcgcgatgatcgcgggcggcgcgctcggcaacctcatcgaccgcgtcgtctccggcgcagtgacggacatgatccgtctggaattcgtcaatttccccgtattcaacgtggccgactgcttcgtgacaacgggctgcgcgctgctcatcgtgtatgttctgtttttcgaccggccgaaaaaaacgccgcccgagacggacggcgaagcggaataaagcgtctccggggcccatacgggtcccggagcttttttgtgatggagccgcccttggctctccctctgggagagctgtcaccgaaggtgactgagagggccttgcaggcactgccgataggttcagggcatcgctaaaatggcaagcacctccgacttgtcattgcgaggagcgcagcgacgcggcaatctcgcaggacccggttggataacaggtcactcccggcgaaaacgtaaccggttgcaggagattcccacgtcgcttcgctcctcggaatgacaaacttgggggcattgcacgttcaccgggaatgcctccatatttgcaactgccaatggcgctcagtgagcgccgctacaccccatactttggcgttt

SEQ ID NO: 11176 - DNA, 14596 bp, Unknown
  gut microbiota DNA sequence
gccggtacgggacggcggtgccttcccgagattgccacgtcggcctgcggcctcctcgcaatgacaattcgggagccggtgccgttttagcggcggccggtacgggctgcgagtgcagcgccgggagcggcatgccgctcccctacaatgcctatactaagacgccaaatggccggggcttgcgccccggccatggcttttatacccgcagggaggaaggatggaagacctgcggtgggattctgcttacttttcgagccagcgcatgaggatcgtggcgatctgtgcgcgggtcgcggtagcctgcggctcgaggttggccgtgccgttggcatcggcgacaccgttgatcaggccgctggcaactgcccagttcagggcttccttcgcccagtcggacgtcttggcggcatccgggaaggcggagagcttatcttccttggcagcctctgcaccggcgtaacggtagagcattgcggcgatctgctcgcgggtgatgctggcatccggcgcgaagacattcttggcgacgccgttgacgatgccgttgttcgcggcccagatgacggccttcgtgtaccaggcgtcgtccgccacatcggtgaacgggttgacctgcttgccggtgtcgggctcgcccgctgcgcggtagagcacggtgacgagctgcgcgcgggtcagctggccgtccggctcgaacttgccgctgccgacgccgttcatgaggccgttcgtcagggcgtagtccacgccttcgtggtaccaggcgtccgcgtcaaggtcggtgaaggccttggacgggcagttgtcggagttcgcgaagatcggacgcgtctcgactgcctggcagacggagcaggtgcgggtctcttcgccgtcctcgaagcaggtagcctccttcgtgacggtccagtcgccgaagctgtggccggtggccgggatgacctcggtggagatggtctcgccgcagtcctcgcagacgacggtcttgctgccgctctcggtgcaggtggcttccacaacgatttccttggtgtgctcgtgcttgcagccctcgtagacgatgttgtcctcgccgaggatgactgcgtccttcgtgatggtgagctttgcgtcgtgcgggacaatgagcttgccctcgatgcagagcttgccgtcgatggtaacattgccgcgcagggtgacggtcacgccctcggggatgcaggagccgtcattgtagccaatgtcggtcttaccgtcccagatgacggtgggcagctcattcagatcggtgaagcccgcgaccttgttgcgctggctgttcagcacggcgatgaccttggcatccgggcggaagacacgggcgccgatgttgctgagggagccgttcagataaatggtggtcgggccgacccaatacttggagctgtagtccgcggtgtacatctgcgtgccgaaggccgtatcgccgagatactgcaggttctccggcagatggatggtctcgccgtccagatcgcccgcgaaggcggacttgccgatgtactccaggctgtccggcaggttgatctttgcattcctgcagtcatagagtgcactttcctcgacccgcttcagggtgctgggcagattgatctccttggcctccttgttgccgtacagggagtagtagctcaggtaggtgatgccctcgccgacgttgatggtcttataacggttgcccgcaaaggcgcactggtccatgaattcgatgctgccggggatgtccagtacgtcggtctgccaggccgggatcaggccctgctgctccagccgcatctcccagccaaggtagccgaaggactgatagccgacggacttcaggttggcgggcagcttgccgaaggtacggacattgaacatctggtcaaaagtgcggtcgccggtcttctcgatggtatcgggcagatccagcatggtcagaaccgactggttctggaacaggaggcggtccgccagctcggtgacggcataggtgcggccgtcgccctcgttggtaacggtggccgggatggagaaggtctcggtcttggcgtcgtcgctgatggcagtgacacggacggtggtgtcggaggtgggcatatagctgatgccgtccacggcgaactgaccgccaaagtaggaggtgtagggcgcgccgttgatcaggatctcgtgaccatagccggagtagcgcaggagcttggcctgctcggtggtcttagcgtgcatgacaccggtctgatcctcaaacttgttgttccagaagtagaaggcgtcctgaccgatctccttcacgccggagccgaccacgcagttctccacgccgtcgcagtagataaaggcacggaatccaatggtcccgacggaatccggaatgatgatttccttgagcttcgtggagcagaaggcccacggctcgatcttctgcaggccgtccggcaggttcagcttctcgatgccggagctgtagaaggcagcgtttccgatttccctgacagaggacgggatgtagatacgcttgaggctggtgcagctccagagcaggccgttcgggatcttttccatgttctgcggcagctcgacataggtgacattggagcagccatagaagatgttggggccgtaggtctccaccgtggagggcagggtgatgctcgtcaggcccgtgcaatttgagaaggccttatcgccgaggtaggtcagcccctccgggagatcgccgtccaccacgccggagccgctgaaggcggagtcgccgataaattcaacggaggccgggatggtcagcggcgccttggaaataccgttgagcgccatcgcaccgatggatctgatgctgtcaggcaggttcaggctggtcaggccgcttgcaaagaagaacgccgcattgccaatggtctccaggccctcgggcagggtgatggaggtggtcttggagttgaagtagaaggcctcggcggcgattgccgtcacgcggtaggtcttgcccgcatagctgacggtcgccggaacgacgatctcggccatggaggaataggagccgctgtagttctgggtcttgttgttctccggcaggagcacgacggtgtccgggccggaaactctccaccacaggccgtcctcggtcgtgaagatctcgccgagattcccgcactcgccgaagttccgctccgtggaaacgccctgaccgaccgtgaccatgcagtaggaggacaggcgggagaaggcggtggcggtgatgcagacggtgccgtcggacaggccggtgacctcgcccttttcgttgacggtggccacggactcatcggaggaggtccaggtaaaggcagtatcctgcatggaggcgggatagaccttgtagctcagctgcttcgtctcgccgacggcgatctcggcaggctcgatctccatgccctgcgggccgatatcgatgaaggtcgtggaggtattgttcgcgcagtcgccgagcatgatgccgacgcggccggggttggcggccttcagggacagctgctggaccagatcggaggcatcgagcacgacacggaccgctgcaccctcttcggcgtccttgaactcgtcggcagcctccagatagaagaactgctgtgcggaatcgatgacccagaggaactggagatacttgttgtcggagacggtgacagccagcttcaggtcgccgttctcgtcctcgaacagctcggcgctcttcagctcgggcctggtgttatcgacatagaagctgtagctctgataatcgtccacattggagccgacgccgcggccgcggacggagaaggtatactcgccctcgggggcccagtcgccggcattatagctgccgtccgcaccgggcaggcggccgttccagcccttctgcacaagggtcgccgtggcctgatagccggtctgcgtaacggtgatgtaggtcttgcggacagcaccgaggtcgccggaatcccacatggtctcgcccttggcgttcttgaccgtgatctgataggcctcggaatttcgcaggaggctggacagatgcagcagcatacggccaccgcgcgccgggccgaagcccatccagcggcgtgcgaaggtatccgtgcggttgttcacgccgacatagttgccggagagggcagcgttgacgtcagccagaacggaataggtcacgttggcggggccttcatcataggtgccctggaagacctgcaggctgttccagtcgccatagaagccgaggatcggaaggctcaggctgacgccctcgtcggcggtcaggaaggtgaagccctcgacataggagccgttcgggaagttgtcggcataggccttcttgccggcggcggtcagctcgagcttcacggagaaggtcgcctcgccgttggcgggggcggtgatcctgttgtccgcggtcaggccggtataggtgatggtcacttcatcggccgtcaggtcgcggttggagttggaggcgaagttctcgccgttgatgaccgtgatggtctcgatcatggccgtggtgtcgacggtgtagctcttgtcctcaccggtcatgttgtggacggtcgcggtgtaggtatagacgccgtccttgctggagccgacctcggccttcgggcgcttgcagccctcgacggagaggtatgcgccggactcgatggcgtttgcgatattggcaacgcctgcgccctggcggcggatcgggtaataggtgccgtccggctcaacggacggaacagcggtgctcatgagcaggctgttgacaaggtcgcccagatcttcgcccgtgatgttcggataattcttgttcaggtactgacgcagcagggccgcttcacctgccatgtgcggggtagccatggaggtgccggagtagacctcataggcatcggccgcaccgaggacggaggagaggatgttgccgccgggggcggaaatttcgggcttgatgctcaggtccggagccgggcccttgctggagaacgagctgacgccgccgccaacggggttgtccacaaggccgtagtactccttggagaaggagaccttcttctcggcagccgcagccagcttttcgccggaagccttcgtaatggtgatggtcgggatgaaatacgtctccagagcggcgttcagcagggagccgctgacgttgtcgtagataatgcacgcgactgcaccggccttggaggcgttctccgccttcgtgccgaagttcagggtgccgcgctgcacgaccgcgatcttgccggtcaggtcgagaccctcaaagtccttctcctcgccgaggccggggaccataacgtactcaagcgtcttgccgtccatggtctcgaggatatcataggggttggaggttgcgttatccaccgcattgttataggggatcttttcctcgcccagcatcagataggtagaggtaaacttcacgttatccacagaggcgaccgacaggctggccgcgaccgtggagggcgacgcaacgatgccgttatccggatactcggcatacgtcaggttgctgtgggccgtcacatacatcgtcgaggcagtctcgttgcctgctgcgaccaggacgttgacgccggccttctcggcacgggtataaacgccgtagtacgtcaggtgctcttcctcgctctcgttttcatcgccataatccgtaaagccggcgggggagccgagggacatgttgatggagtccgcgccgagcttgacggcatcgtcaatgcccgcgaggatgatatcgtcggaggtggagccggagttgtcgccgaagatcttcatgatcatcagctgggcattcggggccacgccgtggaagtccttgccgttgttgcccgcgacggtgcctgcaacgtggacgccgtgcgcctggccgatggcctcgggatcggcgtcgccgttcgcgtagtcatagccgtagggggccttttcgttgatgtacacggaatcggcatcctttgcgccgctggcgagcgtctggctctgcagcagggaggcgatgtcgtccttggaatacttcgtattcgtcggcatgacggagaaggcctcgtgcgccttcatgaagccggtgtcaaggatggcgacgatggtgccggtgccgtcatagcccatggcattgacctcggtcgagccgaccatgccggtggagctgttcatggagatcgtgtcgtcatcggcactgaggtcctcgggcaggctgtactgctccgcgacccagacgttcttgacgccgttcagcgagcggacctcgtcaagcttgccgtaggggagcttcatggagaagccgttcaggacggtcgtataggaataggtgaggtcgcttgcgccattgacggaagcggtctcggtctttccggtcagtgcctcgatctcggcacggacggaagcctgctcattcaggaggtcctgctcgagctgcagacaggcgggagagctgataaacgtgtcgagttctcccatggctgcgtctgccagaggctcgctctccagctccacgatcaccgtaacgatgtcggaggccttgagagcgttttcgtcgttcgagagatcaactccgtccgcagacgggatctcaccctcgacctcatgcggggtgatctcctgatccgcgggggacagggaattcttatcggtccagcgggcggagatcgcatcgtcgctctcttcggccgcgggttcgacggccatggccggaacaacgccgagcgttgtcaggcacattgccagaaccaacagaatcgccagaaaccgtttcattttcatggtccttcttcctttcatttcgatagatggcagtgctaactttctgccttggcggtattctaccacgtcgctcaaagaaaatcaatagaaattctatattcatcttatcaaaattcgatagacgttggaatttaaattatcccaagaattatgctctatattcggcatattttcaagataatgattgatttcgctcagaatttatatagtcccgcctttcattcttccgcatttgtccgcgtatcgtgcacatctgttgtgatttttcccgataaattctacattttgcacgagatatttcgtcaaacttcgatatccgtccgaatccagtgcttgacttttccgctcatccgggatacaatatacatgaattacgatagaaatcgaaagactaccttcaggaggacttctgacttgcagatccaatattttgagcgcctcaatccggagatggagtgcatctatctgctggagcgccgttatcaggccggggaggatgccccgcacagcattcccgccctgcgcgattatctctccgggaagtacaatatcccaatgtttgagctggaggccatgctgcagccgctcatcgatctggaaaactacgtcgtctccaatctgcaggtcagcgaggagcagctgcgctttttcttttcctcgcgcggcggcacgacctcggcgctggcccggccgctctatgccgtgctgcacagccgcccgcactacggcagcctgccggaggccgaaaagctcggcgcgctcaagcgcgtgctggcccgcgtgctcgggctggagacggaggaccttgccgggatcgacagcttcgacgctctcatccgcttcctgctgcaaagcccggcgactgaggatgtgaagtggatctgcacagcgctgttctattccattgatgaatatatggaggagctggacatcatcctgcgcaaggcgacggccctgttcctcgagcatgtgccggacacggccgcgtcgctttgccgcagcgcaatgaaggacgcaaaggccaagatcggcgacgatcccgtggctctgttcgtcaacctgagcctgccgcagcgcccggagcgtctgaccgtcgtgccgtcgatgatggcgttccacggcgtgcagtgggactttgcggcggaaacgctgtattacggcgtgtactacacccagctcggcgagctgatcgtgaaatattccgaccagtcggcctcgcttgtccggcggctgaagtccatcggcgacaagagccgcctggagatcctgcgcgccgtgaaggacggcccgtgcaacgggcaggatatcgccgaaaagctgtccctcgccccggccacgatctcgcaccacatgaacctgctgtgcaacgaggggcttctcacggccacgcgccgcggcacgagcctgtattatgagccggactgcgaaaacctcagccgctttctccgtgagctggagcactatttgctgtaaaatttgttgtaaaatatgtaggggcggggacagccaggcccggctcaaaaccgccgatacggacaggctgccgttaaaatggcaccagcccccgaattgtcattgcgaggagcgaagcgacgtggcaatctcgggaaggcagttgcgttttcgccggggctttcctgttatctaccccggtactgcgagattgccacggccccgttggggcctcgcaatgacagccccggaagcctcatgccgttgaatccatgccgcaaatattggcagcctgcatggcgctcgctacccgcaaggggcacgccgcatccgtaaggcggcaaagccgccaacggctgcgcagggaacgccgctacggacgcaattggttggtacgttttatcggcactttgtacgaactggaagtgccttcccgagattgccacggccccgttggggcctcgcaatgacaaatcgggggcgttcaccattgtaacggcaactggcacgagtcgttcgtgcggcgccgggaggggacagcccggcccctacaaggcgcgtgcgtttgcccggcggtcggtacaaatcggcagtgcctttccgagattgccacgggcgcaaagcgccctcgcaatgacaaatctggaggccttatgcattccacgctcaatgatccattctacacttgcccaccccgcttgacccggatcatgaggatccagcacaggctggacagacggttgagggccttgacgagatccgggcgggcgagggtgccgtccggccgggaaaaggcatggcaggccagcagctccgtctgccgcacggcggtgcgcaggcggttgagccgcagcaggatgggcgggtcctccggcgcggggagaaagtgcggctggccctcctcgcgctccgggtgatggctgtgctcacgcagaccgtcgccgtccagcccgaggaagcggacggtctgcaccggctcgtccagcacgtcggcgcggatgaggctgcggacgaagtccagcatggcgcagagcgtctggcgcagcgggccgtccgccgcctgcgcgcacagcagcagctcagcctccagcgtgtcgatgccgccgcggaaggcgatgcgcgggtgcgtcttcggaacaagaatattgccgcgcaggtgggtcatgtgctccggcttttcggcaaacgacgcgccgtccggcgtgcggtaggcggcggggggcgtttcggcatgcggcacgaccgtcacgccctcctgccggagccagtcgcgcgccgccggggtcaggcggctgccctccggcaggtagaacacgcgccgcccgtcccgcacacgcagccccgcgcggacggcctcctcggtatagagcatcaggccggggccgcgtcgcggccgtggggcaggatgccgtcgacctcggtgtgcgggcgcgggatgacgtggacggagatgagctcgccgatcttctcggcggccgccgcgcccgcatccgtcgcggccttgaccgcgccgacgtcgccgcgcaccatgacggtgacgaggccgccgccgacctgctccttgccgacgagctggacgttcgcggccttcaccatggcgtccgcggcttcaatggcggcgacaaggccgcgcgtttcgaccattccaagggcattcgtgttgacattcattgctggttcctccgtttatcgtagttttttcaggatctcctcggtcaggcgcgcgatgagcgcgctgtccggctcgggctgcggttcgggctgcggcggttcgggcttttcgtttccccacgccacgcggcggaggttgatgaggtcgagcgggccgatgttattggacgacgagctgccgcccaccgcgccgcagccgagcgtgagcgcggggaacagggccgtctccgcgccgatgccgccgagcgacgcgggcacattgacgagaaagcgcgaaacgggcacggtcagcgcgaagcggcggacgacggcctcgtcctttgcatgcaggacgaacgtgtggcccgcaccctcgcccgccagcacctcgcagatgcggcggaggatggtgtcctcgtcctcctcgacgaaaaatgccagaatggggcagagcttctcgcgggaatagggccgcgccggcccggcctccgtctcgtttgccagcagcacgggcgtggactccggcacggtcacgcccgccatgcgcgccacggcgcaggccgtcctgccgacgaccttcggattgatcgtgccgtccgggcggagcagcagccgcgccacgcgcccggcctcctccgtgttcaggaaatagcagccctgcttccggaattcctcgcggacgcgggcctcgcagcagcgctcaacgatgacgctctgctccgaggcgcagaccgtgccgttgtcgaacgtcttcgagcggagaatgtcccgcacggcgcgggggatgtcggccgagcggtggatataggccgggccgttgcccgcgccgacgccgatggcgggcttgccggacgaataggccgcgcggaccatggccccgccgcctgtggccaggatgaggcgcacctgcggggcgtgcagcagctcctgcacggcgtccaaggacggcatcgtcaggcaggagatcgcgcccttcgggcacccggcggcctcggcagcctccgccatgaggcgggcggcgtggagcgtgcagcgcacggcgtgcggatggggcgagaagacgatgggactgcccgccttcagggcgatgagggatttgtagatcacggtggacgtcgggttcgtcgagggcacgatgcccgcaatgacgccgacaggcacgccgacgtcccagacgcgccgctcgtcgtccttccgcaggatgccgacggtgcgcaggccccggatggcctcgaacacgcggacggcggcgaagcggttcttctccgtcttgtcgcgctcattgccgaagcccgtttcggcgcaggcctcccgcgccagctccgccgcatgcagagcgcccgcgcgggacagcgcctccgtgatgcggtcaaggccgctctggtccagtttctgcaggccctcgaaggcctgctgcgcctgctgcgccagcagacggacctcctgccgggcgcgcagatcgcggtcaaattccatggtcgttcctccttgttccttctgcttccagcggccgggccgccgcctcgcagaccgcctcggcaaaggcggtgcaggcggcaaggcaggccgagcgagtgccagtgagcagggctccggcaaagttcgtttcggtgggcggggcataaaattccgcaagctccacgcctgcggccttcagggcagcgtccagccccagcagggccgggacgggcggcgcgatgagataggccagcggctgccctgcggggatgtgggccgcgcgggacaggtacgtccccgtgcgcgcggcgcagtgggcaaggtagaaaacgccgttttccgcctcgcggaagcgcggcccgttctgcaggaaggccagcgcggcggcaaggccgctgcgggcgtcggcgggcgtcggccccgcaagaatgccgatgacctcgcccgtcaggggcgtgggcgcgttcccggccccggcatagaggctgcggccgtagacgacggagacgttcgcggccttcgtcgcctcgtccagcgcgaggtaggtgacgtcgtcgcagtccgtcgccagcagcgcgatcgaattctgaccgggatcgagcgaaagtgcgcgggaaaggccggggctgacatttgcgatcgtgcgggcgcacaggacccgcacggggacgggagcgccggtcatgcgccgtcctcccgcaggccgatgccggaggccttttgcgccagaatgcggccgatgagcgaggcgatgtgcgccccggcctccacggcggacacgccctgccggtggatgttcgacacgacggtgcggcaggactccgcgatgcccgtgtgcgggcggtaggtcaggtaggcggacatggactcgttcgtcacaaggccgggccgctcgccgacgagcaggcagatgacctcgcagtccgtcaggtcgccgatgtggtcgcccgcgccgacgcggcagaactggatgaacgggacggggccaagctcaatgccctgcgcctgcaggccctgccggatggcggcgcagcagtccggggcgttggcctgcacggccgcggacgacaggccgtcgccgacggccagcacgacgcgctgccccgcgagcaggtcgcgcaggacggcctgatttttttcgtcaaagcggcggccgaggtccggccgggtcaggtattcgtccttgcttttgcacatggtctgcacaaagggatagtgattttcctcccagaagcgctccggcacgagggagaacacgctgtcctgcgcggcggcgtggtcggcgcggaagcgcagcagcgaggccgtggggtagcgcgcgccgcagcggccgaggccaaggcgggcgggggttttggccttgagggcgcggaattccgcgccgtgggccgcgttcgggacgagatactgcgcccgcaggtcgaccgtcgtgaggtcgggcagcacgccgtcgtccggcggggcttccggggcagtctccgcgcccttgacgggcggcggggacgggggcgtttgcgcgggagcaagctcgcgcagcatctgcgccacgatggccttgagttcttcgcgatccatgccgcgcctcctttacagcagcgccgagccgtctccggcccgcgcggtgagtttgccgtcctctacgaagcccatgcgctcgagccagcgctggaacggcgcgatggccgtcaggccgaacagctcgcgcagggcggccgtctcgcggaagccggtcgtctggtagttcagcatgacgtcgtcgccgtgggggatgcccatgaagtagttgcagcccgccgccgtcagcaggacggcgagcttttcgatgtcgttctggtcggccttcatgtggttcgtgtagcaggcgtcgcagcccatggggatgccggagagcttgcccatgaagtggtcctccagcccggcgcgcaggacctgccgcgcgtcatagaggtactccgggccgatgaagccgacgacggtgttgacaagaaagggcgaaaaatgccgcgcgaagccgtagcagcgggcctccatcgtcacctgatccgtgccgaaatgcgcctcggacgacagctccgagccctgccccgtctcgaaatacagcacgttcggcccctcggccgtgccctgcgtcagcgcaagctgccgcgcctgctcgatggtggccgcgtcgaagccgaaggcggtattgcccttctgcgagcctgcgatggactggaaaatgaggtcggcgggcgcaccggactcgatggcgcgcatctgcgtcgtcacatgggccagcacgcagatctgcgtggggatgccgtggcggcggcgcacctcgtcgaagcgtgtcagcacgcggcggacgctctcggccgtgtcgcccgaggggttcaggccgatgacggcgtcgcccgcgccgaagctcaggccctcgagcagggaggcgaggatgccgtcgacgtcatccgtcgggtggttcggctgcaggcggcacgacagcgtgcccggcaggccgatggtcgtgttgcagtgggccgtgaccggaatcttgcgcgcggcatagatgagatcaagatcgctcatgagcttgcagacggcggcgaccatctcgctcgtgaggccgcgcgaggcgcggcggaggtcggccgtcgtcgtggtctcgctcaaaatccactcacgcaggtccgagacggtccagttctgcatctccgcatagatgcgctcgttcaggtcgtcctgaatgatgcgcgtgacctcgtcctgctcatagggcacggcggggttctcgcgcaggtcgcgcagcagcagctccgccagcacggccttggcggcgacgcgctcctgcgcgctctcggcggccagcccggcgagccggtcgccggatttcggctcgtttgccttggcaagcacgtccttcacatcgcggaaggcataggtcttgccgaacagcagcgtcttcagcttcaaatggtacccttctttcaaattcgttcagattcgatcggaaatatataatttgcgcgtgatattgtaggggcggcggggaatggctgtggcacaaatgaaatggcgtgaggctccctgatttatcattgcgaggaggccaacggccgacgtggcgccctgagcgcgaagcgcgaggaagtgcccttggggtgcaatctcgggaaggcagttacgttttcgccggggccttcctgttatccaactgtgtactgcgagattgccacgtcgcttcgctcctcgcaatgacacatcaggtagtgcggcggtgcaccagtgccct

SEQ ID NO: 11177 - DNA, 25567 bp, Unknown
  gut microbiota DNA sequence
aggcagatgccgtaattgttggctctgcgccgcaaattctgctgcgggaacgcctgcgggagggaaagctgatcctgcgatatcaggagcgccctctgaaaaacggcttggagccgctgaaatttctgccgcggatggtgaaatggcaccgttggaatccctctaacaagccggtgtatcttctatgcgccagtgcctatgccgccggggattacgcaaaaatgggattgttccgtgggaaggcctataaatggggatattttcctgcagtactttcctatgatacggaagcgctgctctcacaaaaagagccgggcagtatattctgggcgggccgcttgctggatttgaagcacccggatgatgcaatccggcttgcggctcggctgcgggatgcaggctattcgttttctctgcgtatagcgggaagcgggacattggaaccgaagctgcgtggaatgatcgcacaatatgctttggaatctcaggtcttccttctgggcagcctgtcaccggagcaggtgcgccgggaaatggaacgcagcgcaatatttctgtttacttcggatcggcacgaaggctggggcgctgtgttgaacgaggccatgaacagcggctgcgcagtcgttgccagtaacgcagccggctcgacgccctatttggtcgagaataacgtaaatggctgtgtctatcgcgctgggaataggaatgaactatacgaaaatgtcgtacggttgttggagcagccatctacacgggaagcaatgggcaaacatgcctatgagaccatcacaaacacctggaatgctcaagaagccgcccgtcggctggtcgatttgatccgggccatttcagagggggttccgtcccccgaactctattcggaagggccgtgcagccgcgcttagccactgctggcatatatcgcaaatatgaaagtatcttttttcagccgacgtgccgccaaaaacgcgggctggctggtcgcaggtagaatcctgcacatggcactggcctttctggtcaatctgctcactgcacgctatctggggccgagtaactatggtctggtcaactatgccgccctgtataccgcctttttcacatcctttgccactctggggttgagttcactccttttgaaggactttatggatgacccggagggtgccggaactacagttggaacggcgatcgcaatgcggctgctgtccagtacgctgtctgcggtcagcattctggccatagtggccgctgtggaccgtggagagcgcttgaccatgaccgtggtagcgctttacagcatgtccctgatctttcaggcgtttgataccattcagtactggtttcaaagtcggctggagtccaaatacgcaacgattgccacatcggttgggtatatcatcgtctctttctacaaagtactccttctggttttgggcaaggacgttcgctggtttgccatctccaacacaatcgattatgccgtagcagccattgtatttctggggctgtacaagtggcggggcggtccccgtctgcatatttcgcctgcaaaggggcgcgcccttctgcgccagagcgggagctttattctctgcggccttatggtgtccgtctataactgtacagaccgctttatgctcaagcatctgctggatgaggcctccgttggctactacgccacggctaccagtctggctaccgtgtggaccttcgtcctgtcagctatcattgattcgatcacgcccggtatcatgcaggcccatcggacggatcgagcgcagttcgtccggtataaccggcagctgtatgcccttgttttctatctttctgttgccgtctccgccgtgatcacgctgcttgcacgaccggctgtcagcctgctctatggggaagcgtaccttccggctgtcatgccgatgcaggtcattacttggtacaccgcattctcttatctgggcgtggcccgcggcgcgtgggtagtatgcgaaggaaagcaaaaatacctgacaccgctttatatcggctccgcgttggtgaatgtggctctgaattttctgctgatcccctgctggggcgcaacaggtgctgccgttgcctccctgctgacgcaaatatctacaacgttcgtatttccgcttctcctacgtccgctgcgtcccaatgggctgctgatgtgtcaggcaatcctgctgcgtgatgtgtttccaaagcgaaagaaaaccgataattcgcagagaaaggcatgctgattatgtcaagatttgaaaacaaagtcctcctcatcacgggcgggaccggctccttcggtcacgcggttctggaccgctttctgaccacggacatccgcgagattcgtatcctctcccgcgacgagaaaaagcaggacgacatgcgccacgcctatcagctggcctgtcccgcctgcgcggagaaaatcaaattctacatcggcgatgtgcgggactaccgctccatcgccccagccttccggggcgtggactatgtgttccacgccgccgccctcaagcaggtgccctcctgcgaattttttcccatggaggccgtcaaaaccaatgtcatcggctccaacaacgtcattgatgcctgcgtggaaaaccgggtcaagaaggcgatctttctctccaccgacaaggccgcctatcccatcaacgccatgggcatgtccaaagctatgatggaaaagaacgtcatcgcccggtcgaagcagatgctggcagacgatcccgtgctttgcctgacgcgctatggtaatgtcatggcctcccgcggctcagtcattccgctgttctgcgaccagatcgacgagggaaaaccgctgaccgtcacgaatcccaatatgactcgcttcatgatgacgctcagcgacgccgtcgatcttgtcctttacgccttcgagcacggcgagcagggcgacctgttcgtgcagaaggcgcccgccgcgaccatcgagacgctggcacaggctgttcttgagctgaagcagtccgagctcggcgtgcagaccatcggcacgcgccacggggaaaagctctttgaggtactcgtgacctcggaggaaatgctgcgggcggaggaccttcccggtttcttccgcatccacgccgacagccgcgatctgaactacgacaactatttctccaaaggaagcgcggagctgtctcagatcgaaccgtacacctcccataacacccagcggctggacctggatggtatgaagcgcctgctgcagaagctcaagctctttggaggaaattgctgatgaacattcttgtcaccggcgcgcgcggctttgtggggaaaaatctcgtcgcagcgctccgaaacatccgcgacggcaaggaccgcacccacctggagctggacatccgcgaaatcttcgaatatgacacggacggctcaccggagcagcttgccgattgtgcgagatccgcggatttcgtattccatttagcaggggtaaaccgcccaaaaacggcggaggaatacctctccggcaataccggctctctggaggcgctgcttactgccctgcaaagtgcgggcaaccgctgccccgtaatgctggccagttccgcccaggcctctctcgtctggcgctatgcgggcagcgaatacggcaaggcaaagcttgcctgcgaaaagctgctgcggacctatgccgccgagaccggtgcggaggcgctgatttaccgcttccccaacgtgttcggcaagtggtgccgaccgaattacaattccgccgtggcgacgttctgtcacaacattgcaaacgatctgccaatcacggtcaacgaccccgcgacggaattggagctggtctacattgacgatcttgtcgcggagctgctggcagcgctgtccggccgggcgcaccgctgcgattatgacggcctgacgcaggtgcccggcggagatttctgccgcgtgccggtgacgcaccgcgtgacgctgggcaaaatcgtggagctactgcaatcctttcacgtccagccggaaacgctgctacttccggaaattccggcgggcagctttgaaaagaagctctattccacctatctttcctatctgccgccggaaaggacggcgttcccgctcaagatgaatgtcgatgcccgcggcagcttcacggagctgctgaaaacgcagagttgcgggcagttttccgtgaatatcacgaaacccggcgtcaccaagggccaacactggcaccacagcaagtgggaatttttcattgttgtggcagggcacggactgatccgcgagcggcggctggacgcggacgaggttctggagtttgcggtcagcggcgagcggatcgaagccgtccacatgctgccgggctatacccacagcatcacgaatctcagcaagactgatgatctggtgacgctgatgtgggccaacgagtgcttcgacccgcagcacccggacacgttctatgaggaggtctgaaatggaaaaactcaagctgatgacgatcctcggcacgcggccggagatcatccgtctttctgctaccatccagtgctgcgaccgctatttccagcagattctcgtccacacggggcagaattacgactacgagctgaatcaggtgttctttgaggatctggggcttcgtgcgccggactattacctgaatgccgccggtgcaaacctcggcgagacgatcggcacgattatcgccaaaagctacgctctcatgcagaaggtcaggccggacgccgtgctggtgctgggggataccaactcctgcctgtccgtcatcgccgccaaacggctgcacattccgatcttccacatggaggccgggaaccgctgctttgacgagtgcctgccggaggagacgaaccgccgcattgtggatgtaacctccgacgtaaacctctgctactccgagcacgcaaggcgctatctgaacgccgcaggggttcccaaggagcgtaccttcgtggtgggcagccccatggcggaggtgctgcatcagaatcttccgcagatcgaggccagcgacattcacgcccggctcggccttgaaaagggaaaatacatcttgctctccgcccaccgggaggaaaacatcgacacggaggagaatttctgttcgctcttcacggcggtaaacgccatggcggcgcaatatgacatgccggtgctgtactcctgccacccgagaagccggaaacgattagaggaaagcggattccaactggacaggcgcgtcattgcgcacaagccgctgggctttcacgattataactgcctgcagatgaacgccttctgcgtcgtgtccgacagtggcacgctgccggaggagtcgagcttttatctgtccgtgggcaagcctttcccggcggtgtgcatccgcacctccaccgagcggccggaggcgctggacaagggctgctttgttctgtctggcatccatacggagcagctgctgcagtccattgatttggcagtgcagatgcagcaaaacggcgaattcggcaccccagtgcccgactataccgcggaaaacgtctccgtgaaggtcgcaaggatcatccagagctataccggcattgtggatcgttttgtttggagaaaatagtatttctgtctggcagtccgttcgagtatccatctcgggcgggctgttttttctttttccgcgctgcagcgatgtttctggggtatccacgcaaaaatttttttggctgggtaagttgaaatgtatcggaaatgtattgttcctgtacctgcaaatgtatcttttttggtatcgggaggggcaggccggggctatcgaaatgctgcataattacccccggattctgcgccggaatgtgacaacttcaggacagttttgtatatattttcatgtcgatgaatagcgttcccaatggcatcacggaaatgtatctatttttcgcattcaatcgtctcattctcaccttgtgaaaatgcacatttttgttttagttttatctactattttgttgaaatcgcaaaaaatatgcttgaaaaatcggatttttagtggtatgatacaaacgtaagcacaacgcatcccttttccggctttcaatcctcttaagtaacaggatggataaatatgagtatctcttctaaaaaaccgctgtactatcagttaaagcagacattactgaaatggatcgagggcggcgactatccgcccggttcgatcctgccgtccgaaaagcagctgcaggactccttcggcatcagccggacgaccgtgcgcatggcgctcaaggagctggagcaggagggcttcctcgtccgcagtcccggcaaaggcacgttcgtcgccagcatgaagatcgaaagcggcccgcggcgcattctcagcttcacacaggagatgctgaacatgggccttcaggtcagcaatcaggtcgtctccctcgagaaggagctgccggtgatccgcacggcgaacaagctgcagatcccgcaggaccagcccgtctggcggctcgagcgcatccgcatggcggactccgtccccatcgccacggaggtcaactatatcccggctgcgcttgtgcccaacatggaggcgcagcttgcgcagaaccagtcgttttattcctgccttgaggaggaatacggcatcatcatcgtctatgcgcgcgagcgcgtggagtgccgccttgccaacatgcgggagagccggcacctcggcattccgaagggctctgcgatcctgtacgtcgagcgccagaccttcggctaccgcaagagcaggccgatggagctgttccccgtcgagttcgtcaagatgtcctacaacgcagagaagtatacattccaccagatcatccgcaaggagtaacatcgttgtctgctgcggccgcagtacacatagagagtttcagacccacaatatcaggaggtaaccatgaaaaccacaaagtgcatcgccctgcttctcgccatcgtgatgacgctggcactgtttgccggctgttccaacagccccgcaaatgaccccgccacggacgctcccgcgaccgacgcccccagcaccgcccccgacaacagcgataacaccgatggaaacgacattcctgccgaaggcctgaccttcccgaacccggtcgaagcccccgagaccatcaccaccgtcggcccggacggcagccccgctgcctggtatactgagctggagctgacgccggaggagctggcgcaggtccgctccatgaacctcaccgcctgctttgagctcatcaacgccagcgagtgggacaacgcaaacctcatcggcttccaggatgcctgcgaggccatgaacatcaagatcgtcggccagggctgctgcgatctcgaccctatccagcagaagacgaacatggaatccttcgccgcgctgaacccggacatcgtgacctgccagccgcaggacctcgacgtctgcgcgccgacgtttgacccactgtggcaggcaggcgtcaagctgacgttcatgagcaacgttcccacgggctacacggcaggcaaggaatatgtcggcgctatcacggactccatcgtcgacatgggcatcgacagcgccgagatgatggctgatgccatcggcggcgagggcgagatcctcgccatcacggtcgccgacgtcaactacgtctgcaacacccgcgacgacgccttcctcaagaccatcgccgagcagtatccgaacatcaccgtcgccgaagtcggcggcttctcctccccgaacgaagcagcgcagatcacctccgctctgctgacgaagtatccgaatgtcaagggcatcttcgtctcctactccaccccgtgcatcgacgttctgcagaccgtgaaggccctcggccgcaccgacatcaagatcgtcaccatggacctcgacaccacctgcgcgctcgatatggcacagggcggcaacatcgtcggcatcgcctgcgatatgccgtatgccatgggatacggccgcgcgctgatggccgcctatgcctgcatcggcaaggagtgcccgggctatgtcacatccccctctttcaaggtcacccgcgagaatctgcttgagggctaccgcacctccctcggtatcgaggctcccgctgacgttcaggccgctctgaacggctgataaccaacgccgggcggtgttttcccgcccggcgtttttcgatcccattccgctgtatggcacagcgacccgaaatgaggtaacgcaaatgtccgaaacacaaaccgctgtcaacgcgatcgaaatgcatggcatcgtgatggaattctccggcgtccgcgcgctggacggcgtcgatttttccctgcggcaggggcaggtcatgggccttgtcggcaaaaacggtgcgggcaagagtacgctgatgaagattatcaacggcgtctatacccagacggcaggcaccgtccgattttttggcaagaacattgataaatccgtttccgtccgggaacgtgagcagaccgttgccatgatctaccaggactacagtctggtcggcgaaatgacggtcgcagaaaatatatttctgaacacagagccgatccgcggcgcgctgatctccgaccgcgactgcattcggaaggccgcggaattcttccgcgatatgggcatccgcatcgatccgcggcagaaggtcaagtccctctccaccggcgacatgcagatggttgagatcgccaaggccatcatgaagcagacaaagatcatccttatggatgagccaactgccgcgctcgacgccgatgccacgacgaagttctttgagatcatcgaacgtctgaaaaagcagggctactccatcgtcatcagcacccaccacctgcagcacattctcgatatctgcgacgccgtgacgatcatccgcgacggcagggcctgcatggcaaaggagatccgtgacacaacgctcgaggagatcatcgcccagatgctcggcgagagcggctttcaggccgtgaagagccgcaagccgaaggattttgacggtctgacaccgctgctcgaggtgaaggacgtgacctcgaaggtcattccggagcctctgagcttcaccgtccgcccgggcgaggtcgtcggtctggccggtctgaagggcgccgggcgcacggagatcttcaatgtgctgttcggcatcgacccggcgcgcagcggtgagatccggctggacaggaaaaagctccgcgtccgccagccgtgcgacgccatccgcggcggcatttttcttgtcccggagaaccgccacacacagggcctgtccctgatgcacagcgtctatgacaattccctgctcccgctgctccccatgctgagcaaaaagcgctttttcattgatgacaggcagggcgcacagatcgtgcaggagatcattgaaaccatgcaggtcaaaacgccgggcagcgacatcgccatcagtaagctctccggaggcaaccagcagaaaatcgttgtcggcaaggcactcgagagccatccgaagatcctgctgctcgacgacccgacctacggcgtggacattcacgccaagggcgacattaccactgcgatctcccgcttcacggacgcgggcggcggcgtggtcttcgtctcctccgaactgacggagatgatcgaaaactgcgaccgcatcctgctcatcaaatacaaccgcatcgtcggagagcttcgtgacgttccccggctcggattaacggaagacagcctgatggctgcgattcaataggaggaccaccatgaaaacgaagatctccgcgcgcaaatttctttcgaagtacatgatctatctcgcctttgtcgccctgctgatcgtcttttccctgacgctccgcaatgtcggcaacggctttctggatatgggcaacgtctggaacatcatccggcagacggcgctcatcgccattctcggcgtcggcatgacctatgccctcggcgcaggccagatcgatctgtccgtcggctccgtcgtcggcctgacgtcccttgtgacggcctggaccgtgcaggccgcaggcctcatcccaggcgtgctggccggtctggccgtcggcgctgtcgtcggcgcgatcaacggggcgctcatcgcatgggtaaaaatcccgccctttatcgccacgctcggcacgcagatcctctttgccggtgtttcacgcacggtctccggtctgaaatccgtccccatcacgaacccgacgttcaactttgtgttcggcggcggcgacttcggcggcgttcctgtgctgcttctctggatggtcgtgatcgtggtcgttggccagctcttcctgcgcaagcgcccgttcggacgtcaggtcatctccgtgggcggcaaccccaaagccgcactctattccggcgtgcgcgtcaagctgacaatcttcaaggtcatgctgctctccggcgtacttgcgtcgctggccggtattctctgggccggacgcttcggcggcggccgctactcgctgggtgaggcggaggagacctctgcgatcgcagcgaccgttctgggcggcacgagcatcaacggcggcaaggcctccgtggcgggtgcctgcgtcggtgccgtcatgctcggcatgatcaataacgcgctcgtcatgtatggtctggatgtctatcagcagatggtcgtccgcggcctcatcatcctcgccgccgttgccttcaccgtcaacgcggagaaggacgcctgagcgggaggagcctatgctggatatcattggagtcggcgatacaaacgtcgacgtgatgatccgcgttccgcacattgcttcgcatgacgagaaggtgcgcgggcagctgctcgggaatttccccggcgggatcatcggaaacttctgctgcgccgcagccgccttcggagcgaaggccggtgccgtctgcaaggtcgggatggacggctacggcgagctggcaaaaagcgacctgcagcgccgcggcgtcgatgtcagccatatggtcgtcgatcctgcctgtgagacctatttctgcatggtcctgctggacgacaccggcgaaaaggcgctgaccattgtggagacgtccggctttctgccgaagccggaggaggtcgaccttgcctatctgaaaaccgcaaagcgcgttcacatgacctctctggacatgacccttgccgcccatgtggcgcaggcgctggacggtacgcagacgctgctgtccatggacattgaggcaacggcgggaactgcgcccgccgccgtgtgggacagcgtcctgcagcgcgtagacacagcctttccgaacgaagccggtctggctgctctgacgggctgcaccaatctggaagcaggtgcgcagcagctgctggcgcgcggcgttcggaccgttgtggtcacctgcggagaaaacggagcatgggtcttccgaaagggatactcccaccactgcccggcattttccgtcccggtgcaggacacgaccggcgcgggcgactgcttcaacgcggtcttcctctccggacttgtggagggctggaccatggagcgctgcgcccagtatgcctctgcagcagctgccatcgctattggtgcggttggctcgcgtacaaagctcccgtcccgcgcagaaacggagcagttcattctggaaaagggggaagcactatgcagctgagagccggtatttaccccagccgtcatccggagcagacggacggctggcgcatcctgtgcgatcaggaaaaaacaccgtattttctgacaacggaaaagccggactgcccggtcctgctgtgcgagggcgaaacgcccgtctggcttcccgactatctgcaggagggcggcatcgccgtgctctccggcatgcatccggaggagcttcccttccccacggactatatcggcacggcggcgctcgaatttgccgacctgacggagcttggctgcggcacgccgcgcattgcgagcctcgttcccgtctatgcgggcagcggtctcggcctgcttcgcctgcatgagagccgcaagatcaaatgcggcctgcacccggacgaatatcccgccgttgtctggcagagtgtcggaaagggaggctgctggtatacggggatcccgttctcggagctcatctgcgcactgggcgacaccctgcgccggacaacgccggattccgactttaccgagcgcatcacatcggtggacaagcacctgctgctgcgcgccatgcgggagctgctcatccgctcctatggcaaacgcggcctgccgtatgtctacctgcactattacccaggaaactatcagtccgtcttcgtgttccgcgtggacattgacggcatttacggcgaccatctccgccgtatcagcgatgccgcgaaaaaggccggcatccgcgtgacgttctatacaaacaaatcgctctgcgagccggaggccgagcgtctgcgggacattgacccgagccacgacatcggctgccacgccgatgtccacaatctgttcaccacgcaggaggagaacttccgcaacgtgcacgactgccgcgcgtggatgaaggagctgggcatcgactattcgaccggctttgtcgcaccgcgcggcatgtggaactttgccctgaaccgggcgctggaggaagacggcgtcacctatacctcggacttcggctatgccgttttcgggctccccttctatccctatgaccacggcacgcgtatggcggtcaagcagctgccggtcgacccgttctccacggagcgcgccgttgccaaggccgaggaggagggcacggcgctgccggagggttctgtggcggactatttctgccggtccgtgcgccgtcaggcagaggcaggacttcccgtcatcctctacagccatccgcagcacttcggcctgctggccgaggagacattcccgcgtctggccgaggccgtccgtgctctgccgctctggcatgctacgatgggcgagctggacgcatggtggcagaagcgcgacggtgcggactacgctgccttctgggaggacagcctcaccgtgaccggagacctgccggagaacgtcagcatccgtgtgatcgagccgaaaggagaataatcatgtttgttgtcccctgcaaatggcgggagctgctcgcgccggaggcgcaggagcgctttgacgacgtcaacgagcagcgcgtcctcggcgcaagcagccatatccgcatcatcggagacattttcctcagcattgccgaaaacggcgcggacgatcccttccccctgctccgcggcatcgccgaccactttatcgcaacgcgcggcgagtccagtcaggccatcacgaatgccattggcctcatgctgcgcaatgtgcacggcagcagccgagcagagcttgcacaaagcatccggaagggtgtcgagtgctaccgtacggaggccgcaaaggatctggaaaagatccgttccctgctctggaccgttctggaaggcaaaaggacgctgctgctctatgactattccagtaccgtggcggcaatttccgctctggggcaggagcatggcgtttcgttccgctgcatcgtgcccgagagccgcgcgctcgacggcggcaggccctatgtcgcaccgctgctccgcgctgggcacagcgtccatgtcattccggactgcgcgctgtatcaatatattccggcgtgcgatgccgccttcatcggttccgagacgtactatccggacggaacatgctttaacacggtcggctcggagctgacggccctgctgtgcagccggttccatgtgccgttctatgtgccgacgcccctgctgaagctcgacctgcgtgcgctggacggctatcgaaagaagccgatcctcgacgatcaccgccagcgcatcggcggcagctggacggccgacgaaacggcaggcgtggacttcgtctgcccggagcttgtggccattgcaccggagttcatcaccgcttatatcacagaggcaggcattcttccgccgacggccatgtataccgccgggctgaactatgctgcaaaactgggaggtgcgaacgcatgaagggcagagtcatcggcatggtgcagacccgtcccctgcccggcagctaccgtaaccggggcgaacgtatcagcttcatcacggagcaggcgctggaggaaacgcgcattctggccgaatgcggcgtgcagagcgtgattttacaaaacatgggcgacatgcccatccggcagcagtccacgccggaggctatcgcctatctcagcgttgtggcgcaggccatccggcggagcttccccgcgctgtgccttggcgtgctcgtcaactgggacggcgtggccgcgctggctgtggcggatgccgccggagcggactttgtgcgcgtggagcatctgtacaccggtgcagaggtcacaagcgccggactgctgcagggccagtgctgcgagatcaccgcactgaaacggaagctggggacggacattcccgtctatgctgacgtctgggagcgccacggcatcccgctgtgcccccagccgctggacgaagcggcctggcagtgcgtccacgaggcgtttaccgacggtctgttcctctgcgggaagaacgcgcaggagagtctgtccatggcccggcaggtacggcagcgcgttcccggcgtcccgctgttcctcggcggcggcgcgaccggcgataatgtgcgcgagctgctgcaggaatatgacgccgtctgcgtagcgacctggatcaaaaacggcgacatgcgcaatccggtcgacccggatcgcacacgttattttatggagcaggccgctctggcagaggtaggcacatgaagatcatcgcggttccgaattatgaggctctgagctgctgcgccgcggacatcgttgaggcgcagatcaggcaaaagccggacacctgcctcggcaccgtgaccggcagctcgccggagggcatgtatcgggagctggtccgccgccaccgggaggaggggctggagctttcccgcatccgcacggtcaacacggatgaatatgccggtctctccggcacgcatccgcagtcctatcactactatctggaggagcatttcttccgcccctgcggcatcccgtcggagcatacggcggtcccgcagggcgatgcagccgccccggaggccgagtgccgccgctatgaagcactctgccgctcctacccggccgatctgcagatcctcggcgtcggccacaccggccacatcggcttcaacgagcctgcagatgattttccggagctgacgcaccttgtggaccttgccccgcagacgcttgccgcgaatgctcgctactttgacgacccggacaccatgctccggcaggctattacggtcggtctcggtgtgctgatgcaggcaaagcgcatcctgctgctcctcagcggcagcggaaaggcggagatcacagagcgcctgctgtgcggcaggatcgtgccgcaggtcccggcgactattctgcggctgcatcccgatgtgacggccgtcatcgatgaggatgccctgctgctcgtgcgcgcgcacgcgccgaacctgattccataaccataaaacgaagcggcccggacatttgtccgggccgcagcagactgtcaaagaacctgcccagctgaaagtttcggagggaagaaaagtgtgaaaggaaaccgtcagggtttcctttcgcgttcaataacccgccgcagcggcagaattgcaaaatcatgctgcaaaaattgattttgcaattctgaaagcagcttggcgaaaaaggtccgaagggacttttttgacaagcaaacggcccggacaaatgtccgggccgcaggttttattcttctgtcagcggaagctccacggaggccttgaacaggtccccctcaatggcgatcgtgaatgtgccgccctgcagctccgtcaggctgcgcgcaatggagaggccgagaccgctgccctccgtgctgcgggaggcatcaccgcggacgaagcgctccatcagctcctcggcgggaatattcagggcgtcgcgggagatattcaggaacgtgatgcgcagcagttcgccgcgctcctccgtgcggagataggccctcgagccgggcaggccgtacttgcagatattgctcagcagattgtcgaacacccgccagaggagcctcccgtccgcctgcacacaaaaccgctgggcgcgcagatcaaaaacaggctcgatcttcgcattctgcagccggtcggcatactccgcctccgcctgcccgagcaggacgtgggcatcaactgcctccggatggaccgtcagattgccggtcgccgccttggaggcctcgatgaggtcctccgtcagctttttcagccgcgtgctctgacgcacgagcacctcgaggtactccggcgcgtccggcgaggaaaggccatcgcgctgcagcaggccggcgtagttcacgatggacgtcagcggcgttttgatatcgtgcgagacgttcgtgatgagctccgttttcatccgctcgctctgcattctctcctctacggcattgcgcatcccgtcgcggatgccgttgagatagttggcctgtctgcgcagcggagagaacatatggtccgtcgcgaccgaatgatccagatcaccctcggcaagccgcttgctcccgtccagcaggcggcgcaggtccagcaggatcagcacgaccagaggcgtgaacacgaccttttccacgatccagagaacagcataggccccggccatcaggaagccgagctccagcaggctaagggccagccagcacacgagagccgtccagacgagcgggagcttcggcatcacgcgccggatcaccgccgcaagccgccgcagcacgccggggatgcagtccagcagacggcgcagcagtgtattgcgccacatggtgtgcgccttgcagcgtgcggcgatcgtcatggggagggtctgaagcagaaagcagaggaggacagcggccggtgcgatcgaccacagctccccttttgcactggcagaaaagacgatgatgagcacaactgcggcgagggccagcagataaacctcaaacggcatccgatcgagccagcggagtgtgatgcccgcggttccgcgcttatggcccgccgtgcgcaggcggaaggcaaagctggccacgcagcaggccgcggaaagcacaaggatgaggatgagccacacgcgcatggcgatcagcagatcgatccagcgcgccgtgacggcgaccgaatcgttcccgatcggggctgcagccagcgtcacgccgacctctacctcggtcaggctcccctcgggataataccagatcttcagcatcgggtaataggactctaagccggatagggtttcgtcgagcgcgtcgccgaggctttcgtcgatcggcgaataggacgtgctgtattcaaatggcgacgcctcgatctcatagtcctcgatctggtatgggaaacgttccagcgcgcgctgggccttttccgcatccgagaacgtattcttccagagcttcgtttctccggtcgtgaacgtatagctgaaggggtcctcaaggaggctcgtctccccttcctttgcattggaaaacacggttgttccgtccgtcgtcttcacatcgacatggacattcaagctgttcaggtaattctgatagctctgcggctcatggacaagtccttccagcaccggttcgacatggtcgtagtattcctggactcctgccgcatgcagataggatgtacgcagctgcgcgccgccgtcgttataggcctgataggaagccagcagcacgatgcccgccgtgctgagcagcgtgagcaggaagctcacggtcagtatgacggatgcggcgatccgcgccgcgaggttatcttgcagctttttcatttcgtcgttcctccattttgtatcccttgccccacacaaccttgagatagcgcggttcggtgggatcaatctcgatcttcgagcgcagatgccggatgtgcaccgccacggcgttctccacgccgacgggcgaatcgccccagacacggcgataaatttcgcgcggagagaagactgtgcccgcatgctgcatgagcagacgcaggatgtcgaactccgtcggcgtcagcgcgaccggctcaccgtcgaccgtgacggtccgcccggcgtcgtcgagcatgatgccgccgatggtcacctgcgtcggcagcacctgcccgccgccaagctgcagataacgccggagctgcgagcggacgcgcgccatgacctcaatgggattgaatggttttgtcacataatcgtccgcgccgagattcaggccgaggaccttatccgtgtcctccgacttggctgtcagcaggatgaccggcacattcgaggtcctgcgcagctccgccatggcgctcagcccatccatgcccggcatcatcacgtcgagcaggatgagatgcacctcctgcgtggcggcaagccgcagcatctcgctgccgttgtaggcctcgagcacctcatagccctccgccgttagatagatccgcagtgcggacacgatgtcccgctcgtcatcacaaactagaatccgatacatgccgtcccccccatttttctctccgcgcagccgcctgcgttctcgcttctgcccctacagtttaccgaaaaacggcagcagaaacaagcaggcaaaaccgaaagatattcttaagatcgttataattcactccaatatagtatattgtatcatccgctccgctgcaagcaccgcagaaaaagacgaggcggatttcggggatttttcaggaaatcccatcgaattttttctcaaaaaatagaaatttaggcttgtacgaagacataccgtttggtataatattcagacacgactattttcttcaaggggatgagcttcatcgaaagcaagaagaaacgccctgggtcattccgccacatatggccgaatctggggcgctaccgcatctggacccttgccgccgcgatcttcggcgggctggaggtcatgctcgaggtcctgatcccgatgctgatgtccgtcatcgtggacggcggcctctaccgggagcaggatttcatgctgcgcgagctgtttccggaggcacttatcgcaagccgcgatcgcttcgttctgacggtcggcatcatcatggtcatcgttgcctgctgctccatggcctgcggcattctgagtgcacgctgctccgccgtggccagtcagggctttgccaaaaatctccgtgcgaacctgctcgggaaaattcaggacttctcgttcgcgaacacggatcatttcacaacgtccagcctgatcacccgcgccacgacggacgtcaacaccgtgcgcaacaccatgcagcagttcctgcgcacgctgatccgctcgccattcatggtgctgatggccacggtcatggcctttacgatctcgccgcatctggcggtgatctttctgatctccattccgtttctggccggtgttctggccatcctcatgaagatcggccagccgcgctttcgcaaaatgctgcagaagatggacagcatgaaccgcgccgtgcaggaaaacctcatcagcagccgcgtcgtcaaggcctatgtccgcggcgattatgaatccgagcgcttccgcggcacggcggaggatctgcggcaggcaacgctgtcatcctcccgcctgttcacgctgaccggtcccatccagatgtccatcctatggggctgcacgatcgtgctgctgctcctcggcggccgcgagatcattttccgcacaacgggcctgcttacaggtgagcttgtcagtctggtgtcctacacgacgcaggccgtcaacgctctgacgatgctcacgtggctcattatggctctgtcccgcgcacatgcctccctcgtccgcatcaacgaggtgctcgacgagaccgttgacatcacggacgggccgagcgacgccgtcgtggaagacgggagtgtggattttgaagacgtctgcttcagttattccggcgatccggacaagcttgcactgcgccacatcgccgtacatatcaacagtggtgagaccatcggcatcatcggcggcaccggcgagggaaaatccacgcttgtgaatctcatcccgcgcttttatgacacgctgtccggcaccgtgcgcgtcggcggccgcgatgtgcgcgactacacgctcgagcatctgcgtgacggcgtttccatggtgctgcagaacggcgcgctgttttccggcacgatcgcgcagaatctccgctggggcaatgccaacgccacgcaggagcagctgcgcgaggcctgcgccattgcctgcgcagacgaattcatcgatcgcttcccggacggctatgagaccgttctggagcagaacgccgcgaacctctccggcggccagaagcagcgcctgcgcattgcgcgcgccattgtgaagcagccgaagatcctgatcctcgacgactccacgagcgccgtggacatggcgacggacgaacacatccgccgcgcgctgaaaacggccatgcccggcagcacaaagatcatcatcgcgcagcgcatcgcctcgatcctctcgtgcgaccggatcatcgtactgcacgagggcgagctctccgacgtcggcacgcatgcggagctgatggagcgcagccagatttatcgcgacgtctatgacagccagatgcgggaggagggtgagcagcatggccagagttgagcttcggaactaccgccgcgcacagtctcccctgcacacactgttccgcctgttccgctatttccgtcactgccgcgtgctgctcatctgcgccgtggcatccattctggcctatgtggcctgcacgatcggcgcgtcctactgcatgcgcccgctgaccaatcttctgaaggaaagcggcatcacgccgaatgagacctacgcaaaatatctgagcctgctggccggtctcggcacgctgtatttcctcagcgccgtgacgaactacctgctcaaccgccttatgctcgagacgagcaccgtcatcatgcgtgagctgcgcgcggagctgtttgcccgtatgcagaagctgcccatcagctattttgacgccaacacgaacggcagcctcatgagctattacacgaacgacattgaggcgacgaacgagctgctgcagcacagcatcacgcagatgctcatctccgtcacctcgctcacaggcaccatcgccatgatgctcgtgctgtccatgcggctatttgccatcatggtcgtgctgggagccattgtgctgcttgtcgtgcgcatcacaacaaaaatcagcagccacagctaccgtgagcagcaaaagaatgccgcgaccgtgaacggctacattgaagaaatgatcgccgggcagcgcgatatcaaggtctttacgcatgaaaagcaggtcatggccgactttgagccgatcaacgacgcgctgtacagcgcgtcgaccacagcaacaacggccacatccgtcgtcggcccgatcctgaacaacctgtcgcacatgttctatgccatcacctgcgccgtcggcacactgtggctgaccggcgagggcaccggcggtatccttatcacgttcctgcagtacatccgcacattcgccgaccgagtcagccagatcgcagaccagttcaactccatcatgctggcgctggccggtgcggagcgcattttcgacgtgctggacaccccggccgagatcgacgagggctccgtcacgctggcgcgcgagggccgcgacttctactgggtcaagccggacggcacacatgtgccgctgaagggcgacgtccgcttctacaacgtcgacttctcctatgatccggacaagccggtgctgaaaaacctctcgctctatgccaagcccggccagaagatcgccttcgtcggctcgaccggtgcgggcaagacgacgatcacgaacctcatcaaccgcttctatgacattcagggcggccacatcacctatgacggcatcgatgtacgcgatatcaaaaaggatgatctgcgccggtcgctcggcatcgttctgcaggatacccacctgttcactggctccgtgatggagaatatccgctacggcaggctggacgcgacggatgaggactgcatccgtgcagcgaagatcgccaacgcgcactattttatctcgcatctgccgcagggctataacaccatgctctattccgacggcgcaaacctcagtcagggccagcggcagctcgtcgccattgcgcgcgcggccgtctcggaggccccggtcctcattctggacgaggcgacgtcatccgtcgacacccgcaccgaaaagctcatcgaaaaaggccttgacggcctgatggccggtcgcacggtctttgtcatcgcgcatcgcctgtcgaccgtccgcaacgcgaacgccattctcgttctggagcagggccgcgtgatcgagcgcggcagccacgccgacctgctggaacagcacggcaagtactatcagctctatacgaacatgatcgagctggcctgaaaggagcgcgcccatgatccctgttgccgcagacgccgagcaggcgcttgccatgatccgctcgcatcccgacggaacggtcgtggatgtccgcgacgaagaggaatacatcaccggccatctggcagacgccgtgctgctgccggtcgacgagatcagcgccgagacggctgcagaggccctgcccgatcagagtagcccggtcctcgtctactgcaagaccggtaagcgcagccgcgctgcagccgaaaagctcgcagcgctcggatactctaagctctacgaccttggcggccttggcggttggccatacggtctcgaataagcagatccataaaacggagccgatcccttttccggggaccggctctaaaactgtcgaaaaagcctcgcagagtttgcgctcgcaagcgcaaagaaaatgaaaaccattttctccggcggcgtgtacgtcggagaaaataccgctcggctcgcaaacgtgcgaagggcgtgcccttcgtgcgctgcagcgagccgctgccttttcaaacgagagcccagtgaaacgggtctcgtttgagagcttgtcaaaaatctttttttgacaagctcggagccgatcccctttccggggaccggctccatgttatatcaggattcagtttgcgtcatactcgctcggaccgaggccccattcatccgcctctgccgggcgtgccccgatgccgacataataggcgtcgatcggcgtgaaatcattgtcaatcgtctcgcccgcattcacggtgaacatgatgtcattgcagcccgtctgactgcagtaatcgacaaactcctttggaatgaccgtgctctcataatagaggtctggcgcaccgaaggcatgcaggatctcgtgggcataggtcgaaggcggcgcgtcaaatatgtctccgaagcggatatacagattgacgtattcgatgtcataatccgtgctggacgagaagccgagggaccagggattcggcgtatgctcatagggcgtattgaacaggaaaaagtagatcacattgtccgcgtggtatttctgccgcagagattcggtgtcgatgttttcccgcacataatcggcctgcacctcatacatgcccccatcctcgcggacgagaagctccgaaaacgaggcatcatagcgcaggtccggatcagcggtccagtcatagaggaacgaagcgtccgagccatatgcagccgcctgctccgtgagccactgcgcggccgtgtccatgcggttgagcgtcaggagcatctcctcgcggtcggcctcgtcgtcccatgcggtctgcgcatcattcgtaaagatggagatgagcagggtcgtgccgcgcaggctcccggtggagccgagcgcgccgttatactccggcacccattccggctccgtcggagcctccgtagggggctcggtggaagactccgcaggggcctccgtcggtgcctccgtggactgctctgtcggctccgtgaccgccgtttccgtcggtgtcaccgtcggagccatcatatctcggcggcaggccgtcagcgccacgagcaaaagcagcgcagacagtcggcaaagcaggtgctttttacgcattcgtcttttcgtagaaccgcacggcgatcgtcgcaaattccgcgcgggtcgtcgtggactgcgggcggatggtgccgtcctctgcataaccgaggatcaggccgttctccacggcccattccatggcctgccgggcatagtccgagatgcttgcattgtcgcggaactctgcaagcttcctgccgctcgtcttcggggagcctgcatagcgatacagcagcgtgatcatatcctcgcggctcaccccgcggtccggacggaacaggccgtcgtcatagccgaggacgatcttctcgcgctgcgcccaaaggacggcggacgcataccagctgccctccgcaacatccgggaacacgtcggaataggcaatgctgccgggcgcggcaatattataaatgacctgcgccgtctgtgcgcgcgtcgtaatgccggacggatcaaagatgccggcacctttgccgtgcagcaggccaagcgccgtggcgcgggtgattgtgtcatagtaccagtcgctctcgaatacatccatataatcgccgagcgggtctgcatggtcagcgctccacttgccgattacgccatccagccactgaacgcgctttacgacgaagttctgcaggaaggcaaagttctccgcaaagccgtttccgccggggcggacgtccatatgggacgatttccacagcagctcgtcatagcctgccgccgcggcgacctgctcacggtaccacacaaacgaatgcacgctgccgtccgcactgaccgcgtccgcatcgcccgcaaggacatctgccagcggcgtgatgtacttcgtatactgtcgctgtgcctcggcacggaactccggaagggcatacagcgcgcggccgagcgagccgtagaccgtgtagagcagctccggctgcggcagaaggtcctcataattattgttgccgaagccaaggtcgtagtcccacagcgggcccatcttcatcggctccgagccggtttccttatagaggtaggcagacgtgttgaaaccgtcgccgtttttgctcagctcgttgacgaggtagcactgcaccatgctctcgaccgtaacatagtccgtgaacggcttgccagtcttcgagctcgtgccgccctcaaacacggcgtcctcatagtcctgataccagctggcgatatagtccatctccgccttcgagcaggcctccggcgactttacaacgacatagaagccacgcgccgtgataaaatagcacttttccgccatggcgcggtcggcgaagtccatttcaagcaggtagccgcccgtgatgtccgccgggtcgttcatgccgtcacaataaagataggtcgcgccgttggcggtcgtgccggtctttgactcgagcttcgtcaggtcctcgacatcggggttggccttctcattcgccttttcgaggtccg

SEQ ID NO: 11178 - DNA, 151763 bp, Unknown
  gut microbiota DNA sequence
cttcccagaaatgcccagcgacgtactccacctccatcgcggctattactgcacagccagcaggaaaaacacagtggattgctccaaattgtcggcatgctttttgtgtctgtgatgccattccgccttttccaacgataagccgaacacctgttttttcaatgaattcgtattcaaattgctccatccgcatactggtcgttgggccaacggatacgatttcatatctgtttccttcggcttgacggacaatgggacccgcatgaaagattgcacggtcacagacatcgataggaagtgaacgcccttcttcaacaaggcgacgatgtgcgacatcgcggcatgttacgagatctccatccaaatagagaatatctccaatatgaaggtccaccagatcttctgctgtaattggcgttacaagaaccttctttccgcttctctgtaccagcattataggtatacccccttatgtgttgcgacactgacattcaattcctggtcaaaaactatttgaccgcggcggtgcgaccagcagccaacatttacagcgacgccaatggtagatggatgccgggcagtgttttcaacgtgtacgccgaggacggagctgctgccgcccatgccctgcgggcccaacccaatagcgttaatggcatctgtcagaagtgcttccagttttgcagcgcgttcattggggttgtgtgctcccaatgagcgcatgagggcttttttggataacagcgctgcggtttctacactggtggcgacaccaacccctataagcagggggggacaggcattaagcccatatgttgtcatctgatcaagtacaaagcgtacaatgccttcataaccggcactgggcataagaaccatcgctttacctggtagagtgcaaccaccaccggccatatagacgttgatctcacagtcggttttttccgggatgatatcccaaaatacggttggaactcctttcccgacgttcatgcgcgtattgtattcatcaaaggtctctacactgttatggcgtaacggggaactcagcgttgcctgaaccactgcatcacgcagcgctccctcaagcgcaccgatcaagggaaactctgcaccgcagcgaatccaaaattgcagcacaccagtgtcttggcagcagggccgattcagctccgcagcaagcttctggtttttgaacatggtttcgtagatgagtgcagcaagtggttgcgtttccgcctgagaaagctgctccagcttcttcatgacgtcatccggaagaacctttgcaacatggctgataaatatggccatagtgtctgtcagcctgcggatctgtcctgtcttgttcatatatatatcactcctcaaaaaagatcgggctgcgttattttattgtttacataacgcagcccgacagaagggggttattccatttttagaatcgcttttacgaccgcctgcttttcgcaaagcgatttttcaaaagccgcgatgccgttgtcaaaatcaaaacaatccgaagcgatcttctcgatgtcgatttttccgtcagaaatagcctgaattgctaacggaaacacgttgcgatagcggtgtaccgtcttaataactagctccttgtgggcgattttatagaagttcattggtgtatcgcccataacattgccaacaattacgatggtgccgccgcggcgtgtcaaagattccgtctgcgctgcggtaacgcgattgccggcggtttcaaacacgatatgcgcgcccatgccaccggtcagctccatgacgcgggcaagggtgtcctcctcacggccgttgatcgcgtagtccgcacccatttccagcgccttatccaggcggttctggaagaggtcggtgacaatgatcttcgatgcgctcatcgccttgcaggcggccagcgtggtcagtccgatgcagcccgcaccgaggatgacgacggtatcgcccagcttcacgccgccgagattagctgcatgcattcccacgcacagaggctcgatcagcgccccctccagcgtgctgacgtactccggcagcggatagaccagatgtgccggatgtgttatataattacgcatggctccttgataaggcgggcaggaaatgaactgcatgtcagggcaaagattgtatcgcccggatttgcagtattcacagtggccgcagccaatgccgggttcaagaacgacgcggtcaccgactttcacgttcgtgacatcttcacctacagcctccactgtgccggcggcttcgtgaccgagaatcagatcacctttgattggcgtcgccccgatgcagccactctcatagaaatgaacatcgctgccgcaaacaccgcaataaccgactttcagtaatacttcaccaggctggggctttggaatgtccagttccttaaaggcaagattgagcttgccattcatatacagtgctctatttttcatcgcaatctccttcagtcaaacagcgtatgcaagatttgcagggatattggggcatggcgatcaaagtcgctggttcgagcctccaaactgatgcggccgttatagccaatttccttcaaaatggacgcaaattctgcataaccacgccactcgttttcatagagtgggaatacacgttctccttctcctgggaggaatggacaggcaaaatgaatatgtcgcagattttctttgccaagtgtcagaaggattttaggatcctcgtgctcacgtgtcatatgataataatccaacagaacatcggtgttgcgcagattccaacgttctttgagttccacgccttcagcaaatgtattaataaggttgctctcaaaggaatggattggctcgatcaggatgcgcatcccgaggcccgcgatatagtcgtcaagctcccgatgcaggctgtcgagttgcttgagcgcgcgatttttatcaaagcccagcggataggacttggcaaaggggctaccgaataccacatattctgcgcccagtcgcttcgccagagggagagcttcacgatagtatgaaaaaattgctttgcggtcgatgttggggccggtaagcttcattcgccgcgggaaaagattgttcaagacctcacttttgattccggatgcctccacgcgggtgacgatcgcctcgcgctgctccggcggcaggtccataatctcgctcaacggcagctcgatgtagtcatagccgaactttttcagcttttctatggtttcgattccggttttattcggctgcgtcgcggtcagatttccgctgcttccgtagcgcatattgttcctcctctgacgattatgtaatgtggaatgcctttcttgcgatctccgcatctctggcgatgcgatcccaagggtcggcaagctccgagctgaagcagggacgggaatagtagttttccagcacgatccaaccgtcatagccgatttcgcggattgcctctgcggtggcaaagaagtcggtttcgcccattcccagattgacgctgccctgaatactgccgacgccgtccttgacatgaatctgcgcgatttttcccggcccaatcgcgcggatgtcgtctgggacatggattccggcgtatgttacggggttctgcgtgtcgtaatagatgccaaagttcggggaatctatccaatcgatcaggcggcgcagctcggttgccgaaaaaatgctctccagcgtgactgtgacctgactgccgaggcaatagtggcaggcctccttcatgcgctgcgcgatgcgccggcgctctgcctgcgtgcgcggaaacccggcaaaaaacgctggcgccagatagatcggcaacttcatctgcgcgcaggcgtccagcccgcgtgtcaggtcgtcccagcagcggcgtccctgctccgtgtccatggggagaatcatgccaccatcgcggccgagggcgttgccagccacgccgatcagggaaatgcccgtctgcgctgcggcatccttgtagagcctctgcacataggactgggtcagcggatggttctgcgccgccgcatcccagtcgtcgagctgaatcccgtctatgccgagggacttcaggcgtggaaagatcgccgggcctttgatgggcgtgacccattcacagatcgcgagcttcatgggctcagccgttcacgtcgacaagaaccttgatgtccttgctgccgcccttggtcagttcttcaaaagtttccgtcgcgtgctccagcgttacgatgcgtgtgatgatttcagaggcagggagctttctctcggcaagcagcttcagagagtcagagaaatcctcttctgtaaaggcgtaactgccaaaaatcttcagttcctgtgtgacgatattctgcatatttacggtgaccatcttcgctgcgttgccaacccagacgacgcggccctgaattttgacatagtccaccgtggtctggcaggtgggcgtcgcgccgacgcactcaatggcgacatggatattgttgcggattcctgcctccttcagcgtggcgtccagatcttgcactgcaggattgaccgtgatgtctgcgccgagctttctggcaaggctgagtctgtcctcgctcaggtcggtcacgacgatcttcgcagcgcccgccgccttgaccagcatcacgatcagaaggccgatcgtgccggtacccgcgataaggacgttattgttctcaattggctgtgccagcccgacggcgtgatgcgccacggagaggggctccagaagggcaccttccttgtcagaaacactgtccggtagggcgtagacgaatttttcgttcatgcagatatactccgtaaaagcgccgtccacatcaagaacgcccaggtttctgcggttggcacagatattcaccgcgccgcgcttgcagaattcgcattcacagcagtattccacaggaagaacggaaactcgatctccaactttgaattttgttacgccctcaccgagttcggtcactacgccggagaactcatgccccatgaccatgggtggaattttccgcccggatgcaccggtataaccatggagatccgaaccgcagatgccgcagtatttgactttaatctttacctgacctgcttccggatagcacatggggtaatcacagatcggcatgttatgaggcccttcatagaccaaagctttcatcttgacttcctcctttgtgtaaattatttatcccataccgagatagctttttttgatagcttcattgtgcaaaaggttttctgctgtatcttccagtacgagctcaccgacttccaaaacatatccgcgatcggcaacctgcagggcagctttggaattctgctcgaccagcagaattggcaaaccgtcctctttaatcttcttgattgcgcggaaaacttcttcaatcagcaatggtgcaaggcctagagagggttcatccatcatcagaagctttggatcctgcatcagcgctcgcccgacagccagcatctgctgctcaccacctgagagtgtgccacccatttgcttttcacgctctagcaggcgtggaaatagtgtaaaaacatattcaagattacgcttgatttttgcgttgtcacgacatagatatgcgcccatcattaagttttcacgtaccgaaagctgggaaaagatgcgccgaccttcaatacactgcgcaatgccgatctttgatagtgtatgggcagattttccgtcaatacgttgccccatataccagatttcaccggcgtgctttcccttaatgagaccggatatatactgtagggttgttgtttttccggcaccattcgcgccaagtaaagaaacaacaccgtttttttcgacattcagagagatcccctttagcgcatgaatttccccataccagaagtgcagatccttgacctgcagaatatactcagccaacgtctccacctcccagataagcagcaataacgccttcgtgactttgaatatattcaggtgtcccctcagcaagcttttcaccaaagttcaaaacgcagattcgatcacagacgcccataaccaatttcatgttgtgctcaacaagcagtacggtaatccccatgttacggatgctcttgatcatgccggacagttcgtctttttcagtgctgttcataccggcagcaggttcatccagcaataaaagctttggatcgctgacaagcgctctggcaatctccagccgccgctgctcaccataggacaggttctttgccagatagtcctcacggtggccaagatccataaacttcaaaatctttcggcatttttcttctgcatctgcatcctcgcgccgcttgcgcggggtattgaaaatggcatcaaaaatatttgctttcattcttggatggcagccaatcatacagttttccaaaacagtcattttattaaacaaattaatgttttggtaggtgcgagcaattccgagtcgattgatctcgtattgaggttttccctgaatttcctgcccatcaaagatgacttttcctcttgtaggagcatagtaaccgctaatcatattgaaagtcgttgtttttccggcgccgtttggaccgacaagtccgaatatttctccctgctcgacatgcgttgtcacattatcaacagcagttaaaccgccgaaacgaattgtcagattttccagcttaagcattgtttttcctcctcttatatttgccaagtaatttgcggaagagcaccttgcattcaccagaaataccgtttggcaacaagaacaggacaatcagaattagaactgcatagaccatcatctgataggtggagaaactctgaagaaactccttgatggtgagcagaacgaccgaacccaccagcggtcctgccagatttgccatgccgccaaagagcaggatggtcataaacagggtggactgtgtgctactgaatgtatcaggactgataaagttaatcaagtgtgcatacagacctccggccagaccggcatacgctgcactgattacaaaagccatagttttataaacccgcacattgataccggaagaatatgctgcttgcgtattctcacgaattgcgagaaaagcgcgtcctgttcgagacttgacaatgttctgttttacaattgtcagaagaacagcaaggataaatataaaaataaagctttttgcataggtatcaaaagaaaaattaaagatagagatgcttggaatatccttcaatccagacgcaccaccggtaatcggccgtgtagagttcgcgaatgtatatacgagctgaccaaaagcaatggtgagtaatgacagaaagtgcttgaccaatttcgtcgcaggaattgcaatcactgcgcctacgatcattgaaaatacaacgccgattaacatggtaaaaataggattccaacccatgttaatggaaaaatatgcgcttgtataggaaccaactgcaaaaaaagcggcatgcccaaatgaaatttgaccggtatagccaaacaagatgtccaaaccagagactgcaatcgtataaataccgatgcggcagaacatcagtgccatatatgtctcaccaaaagcaattgccgtcatgcagccaaagactacaatgaggattgcagtgaggaaaattttctttttcaaggcgtttttcttttgtatacttgtcataacgtatcctccgtggacgtcctattccaaaactttggacttcagaatgccggtaggcatgaaggtcagaataatgatgagtatgccgaaggagatgcagtccttgtagctcgtggaaatatatgcagagatgaaagtttcggcaaagccaaagaacatacctccgatgattgcaccatacatattgccgtagccaccggaaacggcaccggcgaagcccttctgcccaatcaagattcccatagtggtatagacgccgtaaactggccccagcagacagccgatcgcgcccgcaagtcctgaggcaatgccccaagcgacccctttggtgatgccaacgttaatgccgacagcgctggcggctgtttcatccagcgcagcagcgcgcatggcggtgccaaattttgttttcgtcataaaaaggtgaagaataatcatgacgagaatcgctgcaccgaggaccagtgcgttctccggcgcaacgccgattccaaagatattaatggagttggtcttaaagatagagggaaactggaacattctagccccccaaccaatcagagcggtgttttgcaggacgtaagagagtgccaaggtgcacagaatgaccgaagcaaatccggatgcctttttcaatagcgggattacaaggaatttttgaattcccatacccaataagaacatgagtactgtggtaaacagcaatgcaatagggaagggaaggccaagggatttattaaagaagagacccagaaatgcgccaaacatcagcatatcgccttggcagagcgacattaggccggaggctctataaataacgctgtacccaatgccaacgacgctgtaaaccgcgccgatcatcagcgcaccgattattagtcttacaatcataataatacacatcctccgcttttacgatatgattttaatgcgggagaaggcatccggagcgaatgccttccccctttgctttgggaaacggtgttgataatggagatttacttcacgggaacttctttctcaagcgtggctttgtcgaaagcgtagtactcgccaccgatgatcatataagcgttgcagccggagagaccgtcaccgtccttcgcggaataatcaaatgttcctgcgataccttcatagcccttgatgttatagaatgcatcgcgaacggagtctttgtcgttcatatccgcagcattttcaaacgcagtgaacagcaggtttgcaccatcatagacacgaaatgcaacgtctgtggccggcatttcgccgtacatatcgacataagcttcaagcatttccttcatgagttcggaggttgcctttgaaggttcgggcggaacaacatatgcagcggtgaagatgataccatccgcagcggaaccggcaacatcaatcaggtctacggaagcaccggcctcggccatataaatgtagccattataaccggcttgacgaagctgcttgacaatcagagaaagctcattcgcaaggccaaagagcataacgccatcaggatttgctttgattgtattggtaacctgagctgtgaagtcagtatcagaactctgataggtaccttcgtaagcaatgtttacaccatatttattacagtattctttgatatcagcgcaggcagtctgcccgttttcggtttcgacccaaatgaaagcagcgtttttcacgcccatttcctcagcggcaacccggacaaatccctcattcatgaaggaattgacaactgtgcctcggaaaatgtagtggtagccgcactttgtccatgccgtgccggtgccgctgccgacgaagggaatgcccgcttcttcgatcaggctggcggtcgcaacgatcgagttggaaaggttggagccaataatcgcatcgaccttatcgttttcgatcagacgggtggttgcggtgactgcgccctctgtggtggactggtcgtcgtaaacgacgaaatcgatctgacggccattgatgccgcccttggcgttccactgtgcggcggcaagacgcgcgccgttttcaatcagttcgccttcaattgcagaagcgccggtcaaagatgtccagatgccgatacgaatgggatctgcatcagaggaggagacggaggcattactgttatttgagggattgtcgctggaggtttcgccgcctgcgcaaccggccagagccagcagcatggcaacaactaggagaatcgcaaataactttttcatttttttggtcctttcctttttgttgtatattttgcaacagcttatcgccgtttgtgcatgagggactcagcgcttaaacgctccgatgcgcaaatacttgttggtcatggcagtgccttcctcgcgggtcgtttgtaagccagttgccgcacggatggcgtccatggtttctggaattgtaatggactcctgaggaacattaaaggcatacatgatgtcgttaccggactccacaatggaatcttcccacaggccgatctcgtacatgtctccgcggcggtttccgagatccctagcatacttaaagaaagatgcattccccttaaacccttcagcgagagtgactgtgcgaatacgaggatgcttgcggaaagcctccaaggccatctccttggtaagctttttgccattttttgccgtcgcaagaacggtgatgatgtgaccgtgcgttacaggggtgtgcaccaaaatacccgtcgcattaacatgcggcatgatggtcatgagatccagagcctgatgggtaggcgctttttccatttggagcgcattggttagaccacgatgataatcgccggggtctgctacacgacgaataatcgtgatggccaccttttcaataccgaacgcacggtcaaggcagtcaacggtacggatcagacccgtcgtattgcaggaggtcagcttcagataatcctgtccaactcccttttcataattcgcatagccatggaaaaaaacatccgccacggcgttgctctcaccgccctggaaaatagctttcacaccgtacttttcataatagttctttttgttctgtgcaccgacaccgccaggcgcggagtccagcatgatatccacgtttcggcagaggtctgcaaagctgccggcaaccggaatgtccttttcgcggaaggcggcttcgttcgcgccgtcgaccagatacaggttgtacttcacgccgttctcaccgatcataccgcgttcgcgcagcgcctgaagcgaaagcgtgggggcaagatctgcgatgccgaccagctccatgtcttcctgcagcgcaacgccatcggccaagcgctgaccaattgtgccgtagccggcaacaccgactctaatctttctcataacgtcctccttgccgacctgcaactgtgctttcggttcggcgctgtaaaatttgtccgccgctgattcattttatttttgaagcgcgaatcagcactttttctatgacctagcaaaaatataccatattattgcaaaaaagtcaacaatcagttgtaatgtttttgtgatatttcccggtgctttgctgctgtctttgtgcaacctatccaaaatgcgtggaaagtcttgtaatttatcagtccctctgtgaaaacctcacaaagaccgcccctgttctttatgcaattatgccaactccccgatggaaacgctgttccctccgcagaaaaaggaaccggcagctttccactttccgtgaaaagctgccgcaggatgatttgtccgcgtttcgtttttgttcatttttctcaaaggacgccgcgcccggatcagacctgctccaccgtgaccttcttctggcggcacagcgcaatgaactcctgaggcattccgtgatcggtgatcaccgcctgcatctgctccagtgtgccgtaggcaagcagcgccgttcgcccgtatttggtcgaatcgaccagcagataggacttctggcagcgcgcggccgccgtgcgcttgacctcatattcctgccagttggaaacgccgaggccgcctgtggccgtcagagaagaaacgccaaaaaaccccttattatgctgaaaacggcacaaatattcgacagtactgctgtctagcattgcgtttgtccgcatatcatagagcccgggaaggatcatcgcattgacattcgtcatattctgtgcgcgctgcaaaacggaaacattggccgtcacgatggtgatctttttggccgggtccagataatccagcagacgcatcgtcgtcgtgccggaatcaatgaaaacgatatctccatcttcgatcagctgctcagccatttttgcaatcctgcacttgcagtctgtttcctgctggctgcgccgctcatagagcgggatctcctcgggctgcttgagcacaataccgccgtataccttttcaacgacaccctcgcgcacaaggctgctgacatccgcgcgcaccgtattcatagatacattcagcgcctcgcacagctcgtgcatactgatgcttctccgctcggccagcaggctttcgatttgctttctccggctctctttcatagaactctcttccttttcttgtggggcgataatactctctccacttaacatcgatttatttcaatgatattttctgttaaaataataataacttattttctccagcttgtcaatattttatataatattgttatgttttttgctcttgaatattttccacgataattcaggatattttcttgacaattgccagcaattctgctatagtaattttgtaattgtgcaaatagttaacaaatttaataattcagatggcactaatttaacaaaaaacaagggagtggtcgactgcatgcgatttggaatcaaaacgctcgatgagtttgactatcgcggcaaaactgtcatttgccgagtggacatcaaccaacctgtggatcgggcgaccgggacgctgcgctctacaactcgcatccgcgcctgcgttcccaccatccgcgagctttcggataagggagcgcacgtcgtgctgcttgcccaccagggaagcgacatcgaatataaaaactactataccctgcgcccgcactgcgcagtgctagaagaattgctcggaagacccgtgcagttcgtcgaggatgtttgcggccctgctgcgcaggaggctgtgcgcagtttgcaggacggcaaaattctgctgctggagaatgtgcgctatatggccgaggagcagactctctttgagctgaaactcaagctcacgcacgaacagcaggcgcagaccgtggtcgtgcgcaagctcgcgccgctggccgacctttatatctgtgacgcatttgccgccgcacaccgagatcagcccagtctgtgcggcttcgaacaggtgctgccttccgctatgggccggttgtttgaaaaagagtactgtgtcatctctgagctgatggaatcaccctcgcgtccgtgcacgttcgtactcggcggcgcgaagatttccgatgccttcctgatgcttgaaaccgttctcaagggcggggcggcggaccgcgtgctgaccggcggcttggttggcaacattctgctggctgccaagggagcggagatcggcaaaggaagcctcgacttcatttataagtccaactatggcgaatacatagacgttgccaaagtcctacttgaaaagtacgccgaccgcatcgttctgccggaggatctggcatggctggaaaatggcgaacgccgcgaagcggcagtcggcagcattcccacagatatcggctctctggacatcggctcaaaaaccgccgagaattaccgccgcctgatcgaaagctccgcgaccgtgttcgtcaacggccccatgggtgtctttgaacaggagacgacagagctcggtaccaaagccgtctggcttgccctcggcgcagcgaaggcatataccgtcgtcggcggcggcgatagcatcaccgcaacgaccaaatacggccaaaccgaccaaatcgactatatctgcaccggcggcggcgcactgatccgcttcctgacgggtgaggagctgccggtcgtcaaggccctgcgccacggcgcgaccgtggaggagaaaaaatgagacttgagtttggctttggtaccggtacgcagagcgtggaggtttgcgacgaccgccttgccggaatcctgcacgcgaatgagccaccacccggcctgactggcgaggatgcagtccgcgctgccttggacgcacccatcggtgcgcctccgatcgagcaggttgtacgccccaacgagaaaattgcaatcgtcacctcagatattactcgcccctgtccgacgtggaagattttgccgccgctgctcgatcgcctctatgctgcggacataaaaagagaggatataacgcttatcttcgcactgggctgccatcgccgccacaccccggaggagcagcgccatctggccggtgaacgagggtggaaagaactgcgctgtgtggattccgatccggatgactgtgtacaccttggtacgacggatgccgggacacctgtggatattttccgtcccgtagccgaagcagaccgcgtgatctgccttgccaacattgagtatcattactttgcagggtattccggcggcgcaaagagtatcatgcccggcgtttccacccgcgaagccattcagtgcaaccaccgcatgatgatctgcccggaagcgcatgcaggaaagctcgacggcaacccgatccgtgaggacattgagcaggccgggagaatactcggcatcgactacattgtcaacgttatactcgatgagcataagaatatcatccgtgccgtcgcgggagatgcggtcaaagcgcaccgagcaggctgcgccttcctcgacgcgctgtatcaaaagccaatttctgagcgcgcggacatcgtgctggtcagccagggcggcgcaccaaaggacttgaacctctaccagacgcagaaggcgctggacaacgccaagcatgccgtgcgcgacggcggcgtgatcatcgttatcggttcctgccgagagggactgggggaagatgtgtttgaacagtggattcaggaggcggacaacccctcagatcttaccgagcgtgtgaaaaaacacttccagttgggcggacacaaagcggcagccattgctatggttttggagcatgcggatatttatctcgtctcagagatgccggacgaacttgttcgcaaatgcttcctgacgccattttcctcagtgcaggccgcgttggatgcagcgtataaaaagctagggcctactgccagcgttcttgccatgccatatggcggttcaacgctgccagttgtacaaccttaaaggagtattattatgaattatgcagaagaatctctcagacttcatgaaaaatggaagggaaagatcgaagtgatcgcgacagttcctgttgcaaccaaggacgacctatctcttgcctacacgcccggcgtcgcgcagccctgcctcgaaatccagaaggatgtcaacctctcctatgacttgacccgccgccacaatctttgcgctgtcattaccgacggatcggctgtgctgggtctaggcgacatcggcccggaggccggtatgcccgtcatggagggtaaatgcgtgctgtttaaggcttttggcggggtagacgccttcccgctctgtgtcaagaccaaagacgtagacgaatttgtcaatgctgtggcgctgatctccggctccttcggcggcatcaatctggaggatatcgctgcaccgcgctgctttgagatcgagcgcaagctcaaggaatgctgcgacatccccatcttccacgacgaccagcacggtacagccgtcatcacgctcgccggtctgaccaacgcgctgaaggttgtcggcaaaaagcgcgaggacgtgaagattgttacctctggcgcgggtgctgcggcgatctctatcgcgaagctgctgctttcggctggcttcataaatattgttatgaccgatcgcagcggtgcaatttatgagggacgagagaatctcagttggatcaagcaggaaatggcacttgtcaccaatcggcaaaaagaaaccggcaagcttgcggatgtcatccgtggggcggatgtgttcattggtgtttcggctcccggtacggttacgacagagatggtcaagaccatggctcccaatccgattatcttcgcttgcgccaatccgacaccggagattatgccggaggaggccaaggccggcggcgcggccgtcatcgccacaggccgttccgatttccccaaccaaatcaataacgtgctggctttccccggcattttccgcggcaccttcgacgtccgcgcctccggcattaacgaggaaatgaagatggctgcggcgcgtgcgctggcagagcttgtttccgaggaggagctgagcgcggagtatatcatcccgaaggcctttgacccgcgcgtcggcaaggctgtggccgcagcggtagcacaggctgcccgcgcttccggcgtggcgagaatctaaaggagaaacagataaagctaataaagaacggaaaacggagtctttgaaccgtagacgtttgcttcgacgacttttcaatatttacaaccaacactaaaaaatttataataattaaacaggaggaacaatcatggcgcttgtaacgatgcaggatgttttgaaggttgcggaggagaaaaaaattgcgattgctgctttcaccgtggacactcttgaagtggcagaggagatcgcttccgttgcagaagaaaagcaacttccggcaatcatgatggtagggcaaaacactttcaagtacaacaaattggaaaaaattgcaagcatctgccgccagattgcaaacagtacaaatgcacaattggttttacatctggatcatggcgcatcctatgaacaggtaatccaatgcctgcgaaatggcttcacttccgtgatgatcgatggatcccgcctgcctctgaaggaaaatatccgcgtaacgaaggaagtgactcgcgcagcgcacaccgtcggcgtttccgtcgaggctgagctcggcgcaatcggcggcaccgaggacggcatgaccgccaaggcaaatctggtcaacgtggacgatgcacggtgttttctggaggaggtcacggtcgaggcactcgccatcggcatcggaaacgcccacggcatctataagagcacgccgaacctcgcctttgaccgtctggagcaggtcgcggcattgggcggcccggcgctcgttctgcacggtggctccggtatcccggacgacatgatccgcaaggctatcgtgatgggcatccgtaagatcaacgtcgcgacggaggttcgactggcatttctggagggcttcggccttgaggtcaactccaaggatatttacaaggcctaccagagcgcgcaggcgcacgcccggaagatcatttccgacaaaatgtccctctttgacactacaaaataaatgagccggaggcttcaatatgaaacgtaatattttagtcgcgcacggcggtggccctaccaccgtgatcaacgcttccctcttcggcgtgattgatgaggcaatgcggcaatcaagctctggaaaggtttttggagcaatccacggcgttgagggcgttttaaacgatgagttaattgaactgtcttcgcaggatcagaagcagcttgtgctgcttccctatacacctgcttctgctattggctcctgccgacggaagctaactgatgccgactatccacgtattctcgaagtcctgaaaaagcacgacatcggctgcttcttctacaacggcggcaacgactcgatggacacctgcaacaagattgctaagctggccgaggccagcgggtacgacctcgccgtgatcggcattccaaaaaccatcgacaacgatcttgcgctcacagatcattgccctggatatggaagtgccgcaagatttatagcaaacaatacgcgagatctctggatggaagtccgagctatgccaatgtatgttaccattatggagactatggggcgcaatgcagggtggcttaccgcggccggaagtattccggactatgatggaaaaccttgcgcacagcttgtttatctaccggaatatgcttttgatgagaatgctttcctcgcggatgtggacaatctgctgcataaacaacgagaaattctgattgttgtcagtgagggtctagctgacgaaaacggaaaaatgattgcagatcttggaattgttgacggctttggccataagctggctggcggagccgcacaagccctttgcgataaagtcactgcacggcttggagtacgggcgcgagcggaacgccacggcttccttggacgatgctccatgattatgcagtctgctcaggatcgcgaagaagcaattgcggttggacgtcatgcagttcggcttgctttttctggtcacactggccttatggcggctattcgtcgcgacagcgatcatccttatgcttggtctttgacagaagtacctttggaaaatgttgcaaatttggaaagaaagttcccattagaatggatcaatcagggacgcaatggaataacggatgagttccgcacatatgccttgccattaattggagagccactgccaccatatgctgttcttagcggacggtagatacatacatggcaattgcttggtgaatgattaaacaccgatagcagatggcagcacattgctattgatttggtggaaagaaaaacgcaaattgtaagtgcaagttggacaccttctggtagaaagaggtcctaaaatcagccacgaggatcaattccaaattctatgtaaacgctgaattgtggtacaaatagagcaaaataattttaaggcgggagcagcgcatgctgcttccgccttgcctataaaataacagcgcttcgaggatatgtcaagggcggaggcgtcagcctccgttcatcggagcgatgctgtcgcaccgcacagaccttgacataccgatgtgcagccggtcagtccggcatgcggtcggcaaagtacacagccaactgcacgtgcatcatactccaatcctgccgccggccagtccatttctttgtaatatagataacaataagattctgacctttgagtcagagccttattgctcgcctttgcaaatgccattttcagtgttttgaaatgatcactttaccagactgcaacatttcggacggctcccgattttatgacttgtttttcatcgaaaaatgcgatagaatggagaaaacggaaaaagggagatgcagaacatgcaacacgacccgcgctgcggtgcgattctctgcgcggcggaggaggagcttgcgcccttcctgccccatctgacggaggagcagcgcctttcgcgcgccatgctcacgctgcacatcggccggatcggcggcctgcggatggtgctcgccgcgaccggcatgtgcaaggtcaacgcggcgcttgccgtgcagaccgtgctcgacaccgtctcgccggatttcgtcctcaacgccgggacggcgggcggcatgtcccccgcgctcggcctgttcgaaacggccgtaacgacggaatgcgcctatcatgacgtggcagaggcgatcctgacggagtcgcacccccatctgccgtccgtgtggtttgcctccgatcccgacctgctcgcagcctgcaggcgtgccgcggaaagggcccccggccgcgtccacttcggcaggacggtgacgggcgaagccttcatcacggacgagggccgcgcagagatcaatgcgcgctttgccccgctgacggtcgacatggagacagccgccatggcgcatgtgtgttatgtaaaccgcgttccctttgcagccatccgctccgtgacggacacggcggaccacagcggcatcgggacgtttgaggaaaactgcgcccgcgcctcagccgtttcggccacgctggtgctggacgtcctgcgggagctgacccgttaattctctttaggctccggcttttcgtaatgcggtgcatgctcctccttctgcacctgcagcaggagctcctcgcgggcaaggatgcggttgagcttatcgtgcagtgcttcgatcataatctccgtcttcagattgaccttatagtcattctccgcacgcgcgcggtccttttcctcctgccggttctggctcatcataataagcggagcctgaatggcagccacgcaggacagcaccagattcagcagaatgaacggataggggtcgaatgcctttgcggccagcaggacattgaggatcatccacgccagcagtacgcccgtgaacgaaaaaatgaatgcccagcttccggcaaattttgcgatgctgtccgccgcgcgctgaccgagcgaggttagcttgccggactccttctccgggttcacagaaatgcggctcgaggccagcaggttcaggatctcctcgtccgtcatatcgtggcggacatccgcaaggatctcgctgatgagttttttgttttctttcataagaactcctttccagagtgcggcgctgccaaacggtgcgctgcggctatcgttattctgaaaaaaatatttcgaatgtgagggttttgaccatggcagaacagactattcagcttacgaagctcgcctcgtgcgcgggctgcggcgcaaaggtcggtgcgggcgtactggcgcagcttctgggcggcctgaaggtccacagcgatccccggctgcttgtcggctttgacaagagcgacgacgcctccgtctatcaggtcacggacgagctggcgctcgtgcagaccgtggacttcttcccgccgatcgcggacgacccgtatctcttcgggcagatcgccgcgacgaacgcgctttcggacgtctacgccatgggcggcgagccgaagctggcgctgaacctgctgtgcatcccggaatccatgccgaaggacgcggtgcaccagctgctgcgcggcggctatgacaaggcctatgaggcgggcgtcatcatcacgggcggccacagcatcctcgacccggagccgaaatacggcctggccgtcacaggctttgtgcacccgaaaaagctgctgaccaactccgccgcccgtcccggcgacgtgctgctgctgacgaagcccctcggcatcggcgtgctcacgacggccgcaaaggccgggctggcctcgccggaggccatggcgctggcgcaccgcctgatgacgacgctgaacaaggccgcgcgcgactgcatggtgcgctatgccgtgcacgcctgcacggatgtgacgggcttcggtctgctgggccacgcctttgagatggcgcagggcagcgacacacatctgacgctcttccccggcgagatcgacctgatccccgaagcgctagagcttgcgcgcgacggcatcctgcccgccggaatgtaccgcaaccggcactatgccgaggcggccgtcgatcccggcagcacggagcttgccgtgcaggacatgctctatgatccgcagacatccggcggcctgctcatcgccgctgcgccggaggacgccgatgccctgctgcgcgagctgcgcggggccgtgccgagcgcgcagcgcatcggcgtggtcgaagcatatcagggcggcccgaggatcagtctgcgctgattgcccgcagggccgcaacggcggcgtcgacgtcctgctcggtgttcgcaaagccgagcgagaagcggatggtcccctgcgggaacgtcccgagggaacggtgtgccgcaggagcacagtgcaggccgcagcgcgtcaggatgccgaactcctgctccagccggaacgccgcctcggcgttgtcccggcccggcaggtccacggagatgacgcccacgcggcggccgggctcccgcgtgccgcacaggcggacgccggaaagcggcgcgatgccgtccagaaagcgctcgcacagcgccagctcatggcggcgcaggcgctcgacgccctgctgctccacaaaggccagcgcggcgcgcagaccgtagatgcccggcagattcggcgtgccggattccagccggtccggcagatacggcggcagcagctcactgtccgaggcgctgccggtcccgcccgccacaagcggcgtgagattggcggcaagctcgtccgtcagcagcagcgcgccgatgccgctcgggccgagcagacccttgtgccccggcacggccagcgccgaaaggcggagcgccgcaaagtcgatgggatagtgtcctgccgtctgcgcgccgtccagcaggaaaaagcatccgtgccgcgcgcaggccgccccgacggaggccgcatcctgcacactgccgcagacgttggacgcatgcgccagcacaacaaggcgcgtgttgggccggaacaggccctcgagcgcgccatgctgcagaaagccctcgctgtcgcaggggatgcggtcgaattccacgcccccgagctgctgcagcggccgcatgacggcgttgtgctccatcccgctgacgatgcagtgatcgccgggccgcagcaggcccttgatgaccagattcaggccgaacgtcgcgcccggtgtcagaacgacatgcgtcgcaggctccgggaaccggaacagccgcgcaagcgactcgcgcagggccagcgtctccagcccggcctcctgcgcgcggccgtagacggagcgattgatcgtcgcgcccacacagtcgaggtagcgcttcatgctgtcgctgaccccggcgggcttcgggaacgacgtcgcggcgttgtcaagatagatgctctgcaagacaggatccctcttttcttcggaagctctgaagcaggcctctgcggcggatgccggagctttttcgtcatccgctcctgctgattgaagcagagcttccatttttctgttcaaactcagtataccatatcgggcgcggtttgtcacgcgcgtttgggaggcaggatcatgctcgagatcaacctgaagcagctggaatcctttgtggccaccgtggagcattccggcttcacggcggcagccgctgcgctgtatctgacgcagtcgaccgtcagcgcccacgtcagcgcgctggagcagacgctcggcgtgccgttgctcgtgcgcggcgcgcgcaggcccgtcacgctgaccccggaggggcagaacgtctatgcacaggcgcgtgagatcctgaaccgctgcgagcgcctgcaggccctcggtccggctgagcagccgccgctgcggctcggggcctccaccgcgccggggcagggtctgctgccggagctgctgacgggcttcctgcagcgctgcccggacagccgctatgtcctgctgcgcggcgacagcgcgcgtatccacagtctgatgctcgaatcgcgcgtccacctcggctttgtcggcgcagccatggacccgcgtcgcttcgtctatcatccgatcgcgaacgaccgcctcgtgctcatcgcgccgaaccgcgagccctatcccacgctccagcggcagggtgtttccggcctgacgcttctgacggagcagccgctcatccggcgcgagccggcctccggcacgcggcagtcgctggaggactacctgcgccgcagcggcatccctgccgaccgcctgcaccccgtggcagagatcgacacgccggaggacgtgaaggccgccgtgcagcgcgggctgggcgttgcggtcatttcggcgcttgccgtgcaggaggagctggctgcagggaagctgctgtcgttcgatctggaccgcagcggcgtgttccgccgcatctatctggcttggccggccgactgccccctcacggccgccgagcgccgctttgcggactatgtgctctcccacgccgaaggggaatgatgcagctgcaggcatcgcagcagcgattcggcggctcaaggctcccgggtttgtcattgcgaggaggcgcagccgacgtggcaatctcgggaaggcagctgcgatttcgccgatggctttcccacattccgacctggtactgcgagattgcaccccaagggcacttcctcgcgcttcgcgctcagggcgccacggccccttcggggcctcgcaatgacacatcgggggcaattaccattttaacgccagcctgtccgctcccctgcattatttttatcaacactatcatcgtttttatcgatgatatcctcgtttcactcaaaataacgattggatttttccgttctttccccgtataatagtgttattcttctaaaaaaataacgagaggggtaccacaatgaagaaaaagatcagttggtgggtcattgtgaccggcgcgatcgtcggtctgtccgctgtcctgctgacgcatttcggaaacccggccaacatgggcttctgcatcgcgtgcttcctgcgcgatatcgcaggctcgctcggcctccacagcgccggaaaggtgcagtatgtccgcccggagatcatcggcctcgtgctcggcgcattcgtgatgtccgtctgcacgaaggagttccgcgcaaagtccggctccgcgcccgcgctccgctttgtcctcggcgcgttcgtcatgatcggcgcgctggccttcctcggctgcccgctgcgcatggtgctccgtctggccggcggcgatgccaacgcgctggtcggtctggtcggcttcggcgccggtatctttgccggtacgctgttcctgaagaagggcttctcgctcaagcgctcctatgactccgtcccgctcgagggcgtcgtcctccccgtcagcatgacggtcatcctgctgctgttcctgacggtccccgtcatcttcaagctcagcgaggcaggccccggctcgaagcacgcgcccgtctggctggctctggccctgtccatggtcatcggcgcgctggcgcagcgctcccgtctgtgcatggcaggcggcatccgtgacgccgtcatgttcggcgattttaagctgctgtccggctttgtagctatcttcctcgttgccctcatcggcaatctggtgacgaagcagttccattggggcttccagctccagcccatcgcccacagcagccatgtgtggaacttcctcggcatgacgctcgtcggctggggctccgtgctgctcggcggctgcccgctgcgtcagctcattctggccggcagcggcaacggcgactccaccgtcaccgtgttcggcatgctcgccggtgcggcggctgcccacaactttggtctggccggtacggccgactccacgaacgccgccggtgagttcgtccgcggcggcctgtcaaacaccggcaagatcgccgttgtctccggcattgtggtctgtctggccgtttccgtgctcaaccttccgaaattcgtgaaaaaacaggaggcgaaataacatggtcgatgcaagaggtctgctctgccccatgcccgtcgtgatggtccagaaggccgtgaaggacggccatcccgccgagatcgaggtcctgctggacgacgcctgcgccgtggagaacgtcacgcgctatgccaaccgtcagggctacaccgtcacctccgcgccggaggggcctgatacccgcctgacgctgaagaaatgaccgcgtacatcgcgacattccacacgcatctgtccgccctgctgacctgccgggcgctgaccgcggcgggcgtggctgcgcagatgatgcctgttccccggcggctgagcgccgcctgcggcacctgcgtgcgctatacggccgattcccccatgctctcatgcatggacacggattatgaggccgtgtatgagacggcggataacaccaccccgcgtctgctgtgtgaaaaccgataaaaacactcccggagccgaacagctccgggagtccttttatgtaggggagcggacagccgtgcccggcgcggtactgccggagcgtacaggctatcgttaaaatggtaaacgcccccaaattgtcattgcgaggaggccaacggccgacgtggcaatctcgggaaggcacttgcagaacgtaaagggtaatgacaaaaacgtatcaaccgattgcgtctgtagcggcgctcactgcgcagccgttggcggctttgccgccttacggatgcggcgtgccccttgcgggtagtgagcgccatggaggctggcaagttatagggcagcgtcgtcgaccgtagcggccatcggatttgtcattgcgaggccccgaaggggccgtggcaatgacaagcccgaggcattgtacggcgcggtggaaagccttattccagattcagatggcggcgcaggatgcgctccgtgacaaagaagtacacgatcccgaggacggccagcagggcaagcatcacgccgataaacaggttgaacatgcctggcgcgctcatgccggcagagagctgaacaaggaagcggcagaacggctcaaagttgctcagcacgatgatggacgtgaccgcgaccgtctcgagcaccacattgatggcgtagtagaacagcacagcgaacaggatgcgcttgcggcggaacaggtggccgatggagcaggacagatagatctgcagcacggacaccgcgacctgcaccacgaccagcaggacgagcagggcgatgccccagccgttgattatcccgccgaagctctgctccagcgaggtgcggatggaaggcagcaagccacggataccgccgaacaggatgccgacggaaacgaagctgaccaggcccgtcacgaccagcgtcaggagggccgtgaggagcttcgacagcacaagctgccacggccgcaccggcagcgtgaacatcaggtagccttcatcacgcagcaggccggaatagaagcggatgacggagatgacgagcgcaaacacgcaggcggcaatgaccgcgagcacgaacagcactgtcgtcagattcacaaaaatggcagagatcttgaccggcagctccgccatgagggcaacgcgctcgagcaggccgaagaccagaatggcgggccagataaacagaaaaatcttcagatttgcgcggagatcgtattttaacagcttgctcagcacggccattcacctcccatcgggatcgtgcggaagacttcgcggaagacctcgtcgacggacttgccctcggcgccgcggatgttatcggtcgaatcgtggcggacgacgcggccctccttcaggaagatcacctcgtcaagcaccggctcgatgtccgcgatcaggtgcgtcgagatcaggacggtgctctcgggcgaataattcgtcaggatcgtctgcaggatgaagtcgcgcgcggcagggtcaacgcccgcgatcggctcgtcgagcaggtagagctttgcggcacggctcatgacgagcagcagctggagcttttccttcgtgcccttcgacatcgtcttcacgcgcatatccagcccgatgcccagcgcacggcacatggcctcggcgcgctcgcggcggaaatcgggatagaaatccgcaaagaaattgaccatatccttcgttttcatccaaccggcataatacattcggtcgggcaggtagctcacgagagccttcgtctccgggccgatcggcttgccgtcgatcgcgacggagccctccgtctggcgcagcaggcccgtcaggatcttgatgagcgtcgttttgccggagccgttcggcccgagcaggccgatgatcttgcccggcgcaagctgcaggtcgacgtgatcgagtgcgggctttgccccgtagctcttcgtcaggccgctgcagcagaccagcatgtcattcattttcattccctccaaacaatgttgcaatttcctcctgcgtgtagccgagctgccgcatccgcgcgcagaacgcattgatctcggcctgcgccagcgagcggcgcgtctcgcggatgcacgcctcatcctgtgtgacatagcgcccggtgttccgctgggcgctgacgagcccgctctcctccagcgcagcgagcgcgcgctgcatggtgttcggattgacaccggcctctgcggccagctcccgcaccgacggcagcttcacgcctgccggatactgtccggagacgatgcggaacttcagcacatccacgagctgcagccagatctgccgctccggattcagtttccatgccattggctcacctccaatgtgttattgtactaatatactaatacactagtacagatttgtcaagagggtttttcaaaaatattcctgccttcctttctgtccgtccctcacggacaccgcaccgcagcaggcagaattttgatttgggtctgggcaagcgggcgtttctgtgatatgatggaggcagaacctcaaaaatacaacaaaatatgggccatctccgcgcggaagcacggcaatggcccaaaacggaggatgcagcctatgagaagtgcaagcagatggatctacgtcgcagtcgggtgcgtggtacttctgttctcgggtctggtgtacgcgtggagcgtactgtccgggccgatcgccgcagagttcccccactggagcaccgcacagctttccctgacctttacgatcgtgatgagctttttctgccttggcggcctgacctgcggcgcgctttccgcgcgcatttccccgcgaattttcctctggatatccgccctgctgtttctggcgggcttcctgctgacggcgagtatgcggtcgctgcccatgctgtatgtcggcttcggcgtggtctgcgggctggcctccggcttctcgtataacgccgtgctcgggacagtcggcgcgtggttccccgacaagcagggcctcgtctccggtatcctgctcatgggcttcggcctgagcagcttcctcatcggcaagctctatcagcgcttcacgccggtgacggtcggcagctggcggcacagctttgtcgtgcttggtattatcacggccgtgctcgtggcggcctgcggcttcctgctccggcggcccggcacggacttcacgccgccgcccgccgcgaaaaagaagcgctatgcaaaccccgtggcagaagagctcggcacggcggccatgctgcggcggcccgcgttctggctgtactatctctgggcggtactcctgagcgcggcagggctggccctcgtgtcgcagtccacctccatcgcgcgggagatcggcagaacggtctcgccgggcggtatcaccacggccgtcggcatgatctcgctggcgaacgccgccgggcgcgtcgtgctgggcgggttgttcgaccgactggggcgcagccggaccatgcagctcgtgggcggcattttcctgctcaccggccttgtgctcatcggcgcgctgaagctcggcagcttcccgctgctcatcgccggcttcctgctgggcggcatggcctacggcggcgtcacgcccgccaacgcggcctttgtcagctcgtattacggtatgcggcactacgccgtgaatctttccgtcgtggtgacgaacctgctgttcgcctcgttcggcagcacgatcgcgggcgcgctgtatgacgcgaccggctcttacctcagcacggacgccatgatcctcgttctcgctgtcctgagcgccgccgtgtcgttcggcatcgacctgtgcgaccggaggatgctgaaaaagcggggacggtaggcctttatgcgctggaagccgaaacaggccgccgataaaatggcaggcgccaattgcgtctgccaatggcgctcatcgagcgccctgtacaggggcattcaaacgaagagggcactggtgcaccacagcaggggagcacggcggtgagaacggtatgcttctgcttccattatgacggatcgcgcaaaaatgtcaacaaaattttcaaaaattcctctgcagagcggtggaaaaaattcgtcagaaaacccgccgccaacttcattggacgaaacaaatcgccggaattttacgtcacattccgtatcgtaacgagatgcgtcagcgtgaataaaatcacgcagccagaaatgagataatcaggaatgtagtctatcatacgtcagattgaagttagttaacttgaaattatgctaaaagaactgcctgttgacaaatgggaatgtctcgtgtatgatcaaatcaggattcggcatcgccgaacagagacatgatacaggaggagaaaccattgaaagcgggaaagaaactgttagcgctgctgctgacggtctgcatgctgctgtgcatgctgccgacggtggcgttcgcttccggcagcgattatctgaagatcgccatgctggacagcggccgaaagtatttttcggcagattgggtcaaggccttcctctatgaggcaaaggcggacggctatacgcacgtcatgctcgcggtgggcaatgacggtatgcgcttcctgctggacgacatgtcgctcaccgtgggcggcaaaacgtattccagcaacgcggtcgcctctgccatccgtgcgggcaacaacgcctacacgacggcatcttcgggcgagtggacggaaagtgagatggacgagttctttgccacggccaagaaagccgacatcgagatcattccgctgctgaacagcccgggccacatggactcggtgctgtatgccgcgtcctctctgacggggacgaactgcagctacaacggctcgagccgcaccatcgacgtgacgaacgacacggccgtccggttctcgcaggccttcctgcagaagtatgtcgattactttgcgggcaatggctgccgctatttcaacttcggcgcggatgaatacgccaacgaccgctacacgagcggctccatgggcttcggcagcctgcagaacagcggcaagtatggctacttcatcaaatatgtcaacgagcttgccgccatggtcaagcaggcgggcatgacgcccatcgcctttaatgacggcatcgagtttgccaacaagatgagcgcctcggtcggctcgacgacctacacgttcgaccgcgacatcgtcgtgtgctactggtccggcggctggagcggctacacgccccgcacggcggccaaccttgcctcggatggcttccgtatcatcaacacgacaggcgacttctactatgtcctcggcaagaacgacagcttcgacaatggttatacctatgccgccaactggagcaattataaggtgtgcggcacgagcctgagtgcttcctccgtgatcggcggcatgttctgcatgtggagcgactatcccggcgcagagacgcagacgcaggaagccaggaagatccgcctgccgctgcgcgccatgggcctcgccatggacggcgcttacacgagcagcatggacacgtccgttgtgcccggcggcttcaacgccgacggctccatcaacaccgatcctcccgcgcagagccacgactaccgtcagactgcctcgacggctgcgacctgcacggaggcgggcagcgtgacctatacctgcgccgactgcggcgacagctacaccgagaccgttcccgccctcggccacgattacgcagcggcagacgatgcgggcgacacgatctacacctgcacgcgctgcggcgagcagcattccgagcttctgccgcgcgaatatgtctccgtcaagaccggcaagacgaccgaggcctacacgctcgacggtgagcagagctttacccacacgggcgatgccgccatcgcgcgcggcgagctgaccgtggtgcagggcacgggcacgaaggtgtcctactccgccagcgcctcggcctccgtccctggctatacggacggcggctacaactgcgtcgcctccaaacttatcgacggcgacacctccacctactactggtccaccagcagccagacgtccggcatgtatgcccgtgtcgacctcggcgcggaggtccgctttgacgccgtgcagatcagtgctccggcgcacggcgactactgcacgaacgccaatgtccagctttcggccgacggccgtacctggacgacgatcggcacgttcacgagcagccgcagcacggctgtgacgaagacctacgccgtcccgtcctccgtcgagagcttccgctacatccaggtcgccctcacgacggcgcgcaactactggtggcagctgtccgagatcgcctggggcagctatgacggcgcgacgtttacccgcgccgccgcttccggcacggtccagaccggcacggctcccatgacggaggtccgcttcaccggcgtggctgccggtacgacgtactacgtcatcggcggcacccgctatgtcatcgaggtcgaggccgaccaagtccacagctatcaggaggtcagccggaccgccccgacctgcaccgaggacggcgtgacgacctaccgctgcgagacctgcggcgacacctataccgaaacgactccggccaccggccacagctacacggccgccgtaacggccccgacgtgcacggagaagggctatacgacctacacctgcaccgtctgcggcgaccattacacggcgaacgaagtggctgcgctcggccatgattatgcggagaccaccgttcctgcgacctgtacggaaaacggctccgtgacgcacacctgcacgcgctgcggcaacagctacaccgagaccctcccggccacgggccatacctacaccgtctccggcagcgaggcaacctgcaccgagggcggcaagaccgtccatacctgcaccgtctgcggcgacacctataccgaaacgacgcctgcgctcggccacgactacaaggctgtcgtaacgtccccaacctgcacggagaagggctacacgacctatacctgcaagcgctgcggcgaccattacacggcggacgaggttgctgcgctcggccatgattacaaggccgttgtgacggctccgacctgcacggagaagggctacacgacctacacctgcgcgacctgcggcgaccattacacggcggacgaggttgctgcgctcggccatgactacgaagccgtcgtgacggctccgacctgtaccgaagacggctacacgacctatacctgcaggaactgcggcgaccgccgcacgggccatgtcgtcagcgcgctgggccactcctacgagtgcaccgagaacggcaatgaccgcatctacacctgcacgcgctgcggcgatacctacaccgaggccatcctgccgacggtcgaggtcaagctccagccgggcgaggcctacacgttccataccgaggacgccgctgtgacggagtccgccgatcccgccgtcgctgcgacgacgatcgaggcgctctccggcggctatcagcaggtgacggagcttgccgaggggacgttcctcctcgtgagcggtgaccggatgctgacggcgacggcctcaacgtattacagctcctgggacggcgcgggcactgtgagcggcctgacctgcgcggcctatagcacggcgggcgacctgtcgaacgccctgtggaccgtcacggcggtctccggcggctacaccgtgcagagcgcggacggccgttacctgaacctcacggagagcacccgctctgcaagcgtgacgctgaccactgcgccgcaggtcctcacgatcacggatctcggcagcgccttctccatccgcttcagcgatacctatctcgaccgctacagcacaacgtttgcgggcgcctatcccggcaatgcgaacgcgaacgagcggtggcagctctatcgcgcggtccctgcgggctatgacgtgacgatcaccggcgtggccgagggcgcgacccgcaccgtcatcggcggcgtgcgctatgccgtcacggtccacgcccatgcctacacggccaccgtcaccacggcggcgacgtgcacgacgcccggcgtccgcacttatgcctgcgcctgcggcgaaagctacaccgaggcgatcccggcaacgggccacagctatgtccgcacggaggaaaacggcaattacgtctacacctgctccgcctgcggcgacagctacaccgagccggtaaagaccgcgacctatgactccgtgagcaggctcacgtccggcggccgctacgttctcacggtctacgccaacggcggctactatgccatgacgcacgacggcacgacgatcggtgcgcaggccgtcaccatcgaaaacggccggatcacctccgacgtgaccgagagcatgctctgggattactccaacggctgtttcagcttccagagcggcacgacgacgtattacctctataagtccggcaattcctctctgcgcatcagcacgtccggcacgagcgtctcgtactggtataaccgtctcggcttcggcaatgcctacctgcgctactctaacggctcgttctatctgacccgctggaactattcctactgctacctgttccaggaaatgaactgaatctgacgggaaaaatgcgaccggggccggcttgaaagagccggccccggttttgcgattctggctgatagccatagtttaacattcttggatgctatgcccaaaagtctgtaatttattatttactttttatgcagtacgttgtatactaaaagcggcagacggcgaagcgagggtacggcgctgtctgactgaatttcggagggaacgatcatgaaaaagagactgcttgcgctcctgctgtgtgccgtaatggcctgtgcgcttcttgttccggcattccccactgccgccgctgcggaggtgacagaaactgacaaggagatccgtctttcgtgtacggatacatgtgtagccgtgataaacaaggaaaccggcgatttgacctttgaaggcgatggagagatggtccaaggttatgacatgaaggtccgcttttccgattacagcgattatattcgaaaggtgacactgaaagccggtatgtttcatattccaagcggtgcatttgaaaactgtacacggcttgaaagtgtaaatctgttttcggccgcaagtattttagagaatgcattcaaaaactgctcaagcctgaaagatatcaaaatcacgggtaatgtaaaatatatttccggaagtgcttttgcaggctgtataagtattacaaaatttgatctgagtaaatataatactttttataagatcgatgaggcaggggccctatatcgggataccaagcttattcggtaccctgcgggcagaaccggaagctatgaagtccgtgctatgacgagagaaatcggtgagggagcgtttgaaggctccttagtccacgatgttgcactgcctgactctctttacagaatcgatgagagagcatttgcggattgccccaatctgaccgggcttaccattcccaaatctacggtgaacattgaaaggtgcatcagtttaggcagcccaaatttccgcggatttcaggtggagccgaataatcgctattattctacggattcctatggcgggttatacacgacaaagaatttatccggaaacctggagtttaaagagtgcccggggggcttccgcgggaagtatgtcctgcaggatggaacgcggattgtgaacggatttcatgaacatgacggtgtgacggaaatctggatgccggacagcgtaacagaagtttactattctgacggctgcaagaatcttagcaaagtcagactatctaagaacttattaacaatagattcttccgcttttagagactgtgccgcactgcgtgagatcgtgtttccggagagtgttaaaacaatcggtgagcgcgccttttctggctgtatttcactcaagcacgtctattttatgggagacttgcctgaaatcggctggctcagcttcgctgacagcaatgcaataagtgactttgctgcgatccccggcatggtgttttattaccgggaaggaacctcaggatggggaccgacagtttttgatcaaactttaagctaccccacagcggtttggacaacagccccctatacggatgccagcccggacagctggtatgcctcggccgtgcggtatacttacgacaatggtcttatgaacggcacaggcgaatacagctttgagccggagagcagcatgacccgcgcgatgcttgtgacggtcctctggcgctatgccggacagccgcaggctgctgccaacccctttacggatgttccgggcggcgagtggtacacgcaagctgtcgcatgggcagcggagaacggcgtggtcaacggcatcggcggcggtaagtttgatccgaatggccgcgtaacccgagagcaggcagcggcgatcctgttccgctatgcgcagaaggttggcgctgcgtccgcggagcgtgctgatctgtccggcttcccggatgcgaacgccgtgtcggattatgccagcgatgccatgcgctgggttgtggcggagggcatcatcggcggcagccgcgaatacgacggccgcgattggctcaagccgcagggaagcgccacccgcgcacaggtcgcggcgatcctcatgcgctacattgaaaacgctacaaaatagggaaaaggaacggctgcgccccggtttcggagcgcagccgctttgcatggtttgcgtggtatggtcggagggccacagcataaagccgcagccctccgtctttatgttatatgagggagccttcacacaaagtgatctcgtgcaatcatggccagccgctcccgcaggtcggggctgaagcctgcgaggtcctcgagcgtgatggtcttgtcatccagcagatagagcaggttatagtacatttcggagcggctgacatcggccacgacaccgacgcgcttcttgtccttgcgaagcctcttctccagctcccagaacttgtcggatgccttgccgggcccggccagcagggccgcgtaggattcggccagctgctccatgcagcgctcctgccactccggcagccttttgcggaacagcttccagtcggattcgtttacgggcagcatgggggacctcttgtgtagaataatttgacgtttgcagggatgacagaatgtctgatgcggctttactcccggttctccagccgcctgtggatggcgttcagccacgcgccgttgtatttgaaatactgaggcccggcgaccgaattccgggtccccagcagatgcttcgccagtgcggccagggaccatatttcgtcctgaaagcgcacatgcttgtcgtcggcgacggtgcagcgctcgccggttgttcattcccgcggcagcagaattccagctccgctccctcggaaatgccgcatttggaaaatgcgaacggggagacccgttcccggtgctgctcctcgatctgccgggccagcgcctcgtcctctgcgctgttgtcgtcaccctccgttttttcagacggtggtggaagccgttgatctccgcgatcgcctcgaggatcgcgtaagcgtcctccggcggcatggcatagaattcccggatgcggcgcttgccgtccacttcttcggcagaacgcagatcggggttcagcttgcccagaatggagtggagcttcttgtccgagagggcagaatccacctcgtaggtggcgtacacccggaacgcaaaggggaccgccgtgctgcggttcagctccgcgagccgctgctttacatccgtcgcatagccgagcttcccatattgcgggaaggagggattcgtgagaatgtaaatgtatccggtcgtggtcgtctgggccctttcgtgagggtggaaagattgtgctgttttgggcctcataataggcctccctggcatcggagatcagcacctcaatactgatgtattttaatggcttgcttcttctctcagcgcaatttgtgcggatcgcaactaacgatatgcttgtgaacacaaacggcacggtctttgtctcagtgcaccgcgtgcagatcgcaacgggtaccacaccggggagtggctgtacgtcgtgctttgtctcagcgcaccgcttgcagatcgcaaccccgcggatgccgctctggatctctgccgtcacctttgtctcagcgcaccgcttgcagatcgcaacggcaaatgtgcataaagcaccgcgtgcggatttgtggaatgcgctgtaagtcggtagatagcttttcgcagcacgaagatctgctgcgcgctgactattttcccgagctcttctgctaccaaagcagcctccgctgccattaacggtagccccggacggacaatcgaccggttttctccggtgcgaacggcaccggcattttatgtcttcctggccttcgcgtcaggcaatgcttctgcggatgcccatactggagggtgttttggggagagcgtgcaggcgctcgatttcccgatgatggtactgcacaaaggcgggatagtcccgcgcaagggaatcgagatcaagagcttttgacatagagtcataatgctgcagcaggaaggcggaatagagatcacgttggagatgctcaccgtcctgcatttcgttccaacgccgggaaagagactttttaacatattcaccggtcaaatgattatattggcttgctttgatgtctgccgggttgatctctacaacattcggcagcccgagagacttgcatttttgccgcaatatttcgatcagcatggcgggtgccttgttggcaatggactttccaaaccgctttttgcttcggggctttccggtcttttcagatatcacggtcttctttgcccggtgcgtcagggaagaccattccattttttccacatagaaatgatcacccaaggacagcaaatggttcgccagttgaatgtgctggagctttcgtatttcagcctgacggtgctgcagatatttcagttcctgttggctcctccgatatcgcttggacttataatgtgttaacttgacaccgcgccggatcgtgccgtcctcggcatagttatccgggttggttgcccttctgctccggtccatttttcgctgcaggcggcgcttttcctgctcgatgttctgtacccgatctgccagctcgacgagtccggccgccccggcggcagaataggccagtgtttgcggcccgatgtccagcccgatggggccgctgccgatagggtgaaccgcttttccggtaacgggatcagccttgatcgcaggcttcccctccagaacgagctgggcataccagcggtctctgcgctttccgggccggcggaccaatcggacaagctttactctgcgctgcagcatatcggtctcgtaggcattgtccggcgatagcttcagaggcagcttcaggcccttccactcgatgtaggccccgcggaacatgatctccctgccgccgctttttcccgttctggagtagccctgcacagaatttacctcaccgggtcttttgtaatgtaccttcttgccgccctttttgaacagaaccttatcaaaggccgcccagacctgcggcgcgatcccatgaacggcgacactggagccgatgttatcacggaagtgcttgtaatattttcccatatctgtagtgaaggaataatccgtaaacccggccgttttcaaacttttccgctgctctttgtataactcctgcagtttggcccgatccgcagggttattcctgtccaatgcccgtattttctgctcgttctccagatattcggcagtccgctttatctgtacaagccgtttcagctctgcatggaccagcgtgttatagagctgccgcgcgatctcaaagcgcttggcaagacggtcctcctgccacttttccagttttaacggtaaagtcaggcagcaggtatctgtgctgctctttttcacaggactccctccttgccggctgcagcaaaatgcgatccggatcgtttagaactattttatcattaggtgtgaaaaaatacaagctgtgtgacagcggtttcctgtccaaattcctttcaaaactgcaaggatagaattgtttgcggagcgctgcagcgccccgcaatgtctttttatcagtccataattccataccgcttcatcagctcgatccgctcttttcccagcttgatggagccggaggcgctgttgtctggattggactgcttctcgctggcatagtgcgcaatgcgctgcacccacgcgaccggcagcaggtacggacgctttttgagatagggatagcggcgctccagatactcccgcttggggaataccgtgctcagaacgctgctcttctcgccggtgcggctggccttgacagcattcagcgtgacggtggaggaatggaggcgcgttaggtcgttggagccgtacacgccgccgcagagggtgtcgtgcagcagcggctctacgtcgatggaagcatcccaaggcatgggcaagtcaaagtcaatgccgagatagtctctggcaatgcggaacgctgccgcggcaaacgtcgccgcatgaacgctgacacactggtcgtgcagacgccgccagtcgatctccgcatgatacgcccgcgcccacaggccgatgtcgcaaaactgccgcagaccgatgccgctgcggacgaagtgcttgtaggcgtgcagaagcaggtacagcagatgctcgtggggcggcatggcgagaagaccgtcggtttcgacgggattgaggtcggcaaagaagtggttcaattcgtcatgtgaatcttcggcagaatcaaataaatgccgatgcagctcgatgtagagcgggctgcccttttttgtgtaagacacctcgtccgccgacgccagctcgtccgcaggcgtatcggtggtcaaaccgttcgtaagaagctgttcgtggcaggccatgaactcgccgtctggaatcagaagatcgtcgtccgcgctgatgcggtggtcggtctgcggatacagtcggctgcaaagctgcccctttaccacgatggggtgcagccctgccgaacgcagcttatgataaaggtcggaaaactccgccgagcgcatggtttggttcaacacctgcccaatgacctgttgcttggttacggcaaacagagccacattctcttcggcagcaggcatcttgcggacggcctcgaagaggatcggcagcagcttctgctgattggccagcgtaaagatggcaggccagtccaccttttcggcgggcaaatctccaccggagatggcagctttggcgatatgcaggaattgtgtttcggtggtggtcagggtcatgttcgtgtgccgaaccctttctctgtatttttcgatggcgggggcgatgagcagcgaagtggagccgatgaatgcacccagcgtgttgcagatcacgtcgtccacctctgccatgccgagagcgtagcggtactgtgtgtactcgatccccgcgctgagaatgcagccgacaaacgtcgtgaggatgattctgccccagcggtgccactttcgcggcagtgaattggacaacgtcagccccagcgggaagaagagaaacacattcatcagcatcgcgcggtagagctccggctgctggcgtgcagcggaaagcgcagcgaagggcgtgaggatgagttcgtagttgccgggtgtgcgattcagaatggtggcgtagaggatggctatgacagctgcacaaaacaacacaaaatttgccatcgtccacctgcgtagctgaacttttgtgcgcagatatccccaagcgacaatggctataacgatagccagaataatattcgacaaaggctttgaatagattgattgaaacataaattattgttatcgaacgtggaacgataattatgcggcaatgcgaagcacgggacagtagctgaggctggccggatttatacatctatttcctatagtcccgcttgcaattagatagaattattattgtatccgtaaatgttgatgttgtcaaccggtgaagtctgcttacctaataaatgcagcctgttatgcgcatatgtggatcacaatgtgcaatttgcaaactgccttccgctttgttgccctctattcgcataattccccattgtttgcagacaaaagcaatgtgatttcgaacgcataaagtggaggagcaatatatgaaagcaaccggcatcgtcagacgcattgacgacctcgggcggatcgtcatcccgaaggagatccgccgtaccctgcgtatccgcgagggcgacccgtcacagataacattggcacggtgggagagattctgctttgccatgctggatctgtcaaaaagatgggcgctggattgtacatagtgacggaggatgagggcaaagccgtggggattcgggaggggtaaaaatgcgaaggatcaccttcttgtagccttcactactgttaatcggtacctattttagtttttttgcaaaattcttcattgattttaattataatcagcgccattatttttaggagctccaaataatcctgctgctgcatttcttcgtttagcgtacaggtgtcatgaatatatctattacgcaaatcaaagccgttagagaattccgctttgttcagcataaagttcaaatagtcctgttctggtccggaaaacagtgtgcctttgtagcgtaaatcccccgatgcagcaagaatgtcaacctgctcacgaagttcgctgccataataaattggacaaataacttcgcttacgaaaagatcttttaaaacggaaactcgtttttcctcaatcgttatatatccatcttcggagatagccaaatcagaatgttcaagcaaccagtctaagctcttacgttggtagtctcggaaatcttccttcttcattttttcggatagtagcaattcgggcaatgtctgatatttactgcgcgttttctcagtatagttcatcattgattggtccgaaaacagaagaaacatctcactttgcacagtttccgaggcagcataggcgtatttattcctaatcatacttggaatttcgctaaaaacaacatgtccggaagacatctccagcaactcccgatctacaaagccgtcttcacaatataagcgatattgtttcagaatgccatcgatcgcgctacacatgagtttgcacttctcagcaaacgatgttcccgaagaaggcggaaaatatgtaaagccattcgctccgaaattggttcttaaatattcttcaaaaaaccattggaagatgttctcaatttgaattcctagacggcgaagttcttggctatatgcagccatttgaagcgaactgaggctttgttttaaacgaaaatctatacctattacatactctttattaccctttgcacccagagttctttcaaacactcctagtttatttttcagtgaaacaaaactgcaacggaagcagcgatccacgtactcaaacaaatagatgaaattattcaacaatgtcggatagtcttgattttcttcaatccactctctgctatatgcgcaagaaattacgcctcggtcatatgacatttcgaccgagccattcggtattgacttaaaagttacatttgcgccataggtcatacccgggctattcgcgaacaacttttcttgaagagctttcattttcttcttagcatctcggcgaagcctgtcagataatgggaacacgcctgagctctgtgcttgcgctatcaactgcaaagtgttgatatttgcatcatcacgattaacaaactccgcaagcaccttgtcgcgcatactctgggtgaactctcttggaaagcttagcgatggatcatctcgtccatgtagcgtcaggtaatgagaaactaagtgcggtgcagtgccgctattatgcagcaaatgatttgcaatcacctctccgaaggctgccgaaagctcattctgatataaaatctgccaaacaatatgttctccagtttctaagagtttctcgagaatcgccggtgaaatgcgccggtataccttgtatacgcaaatcaattcccagaagtcatcccaatagttgcagtccgtagattggtagagctgaattaagttatcatctgatatcgtagtgcaaaatacacccaagattcttggaattaatcgacttttctcatggtaagctccatactgttcgtcatcccagtggtccagccgtgctccaacatcaaagaactttttaatgttataaagttctagcattgtgttgatgtcagtgctgctaatatagttatcccaattttgaaatacggcttctgtttcctttaggtagtaccctgaactcatatcgtgtatcccgtagaatttaatattacttcgctctgacaaaaccactcacctcaacatctcatcttgcgcaatctgtctccttgactttataaatcagttagccgttgatacattctcatcaattcggccacacaggctgtttctgtgttgagtttaccccagaaaccgtaaacctgcatgacggctctatcattggcttgatgggctttctgctcctgattttctcatctctacttactccccattccagacatacgccgtataccgtccgccgctgagcttgatgatctcgccggatttcagcagctctgccagcgcgcgctggacggtgatctggctgatatccgggcattttgccatgatctcactcttggtgatcttgccgaggtggttcctgatgatctcgcgcacccggtcgggcttggaaagccccttggtggtcagcagctcgattcggctttcaaaatctcgatatgccgccgccagaatgcccagcatataggtgacaaaaggcgcataatcgttcgtcccctcgtgccagttgcaggagctttcctgcaacgcctcgtaataggtctccttggtatcggagatcagcttttcgatactgatatatttgccgacaagataaccggagcggtacaaaagcagcagtgtcagaagtctgctcatgcggccgttgccttcgttgaagggatggatgcagagaaagtctagaatgaagatggggatcagcagcagcgggtcaagctcggcgtcctgcgcggccgtctggaaggcgtcgcaaagtgactccatcgctcccggcgtttcccacgcggagacaggctcaaaccggacgatcttccggccgtccggcaattcctcggcaatcacattatccgagtttttgaagctgccgccgatggacttatcgctgtacttgtacagatcccgatgaagctgcaagataacggacggcctaggcggaatatagtcatggctttcatgaatcgttgcaagcacatcgcggtatccggcaatctccttctcgctgcgggtctggggcatggtcttttcgcggacgatctttttcaggcggtcgtccgtggtgatgatgccctcgatgcggttggaggcttcggtgctctgaatccgcgcaacctccagcaggctggaaagtgtgtcggcctcggcttcgatgaaaagattctgctgccccttgtattcatgaatctgcgtgaggtaggccacgacctccggcgtcaggagttgattgtattctgctttgaagtgaaaggctctcattcaagttcctcatttgcgttttaattttatcataatcgcttcgatgatacaattatagtatacccataccacaacatcacgtcaaccccaatttcatcatttctgcgtaaatgatgaaattggcaaggcaaatgacaacgtagcgcgttctgccactcgccctcctgcttgcatttctgcaagatttcaggagggcttttttgttttcttgagcatgtgccagatttcacaggtctacgtcaatttctccgtatattcaggtgacaaggaaaaattgtcagaaaatctgaaaggagaaaatgcctatgaacctatttgataccgtgaaggccgccgtcactccgcgcatggcggcggagcggtacgggctgccgatccagcaaggcagcatgatctgctgccccttccacgccgaccgcacgcccagcatgaagctgaacgaggattacttctactgcttcggctgcggggcaactggtgacgtgatcgaccttgcggcgaggctcttcggtctgagcggctatgatgcggcgaagaagctggcggcgaatttcgacatcgccgggcagaagccgtccattctcgcaaggctacagcggggagcatcgcaggcagaagccgaacggcgctgcttccgcgtgctgggagactacctgcaaatcttgcaggactggaagacgaattgtgccccgcaatcgccggaggacgccatcgacccacgctatgcggaggcctgtcatatgatcgagcgcatcgggaatatgctggacattctggccttcggcacgccgcaggagcgcgccgaggtggtggccgacttgcagaaggacgagcggctcatgcggatggaggcgcgaaaccgacagatcagggaggaagcgcatggaacgaaatgaaccgccccgctggatgcaggacaagcacttcaacgaagtcctgttctgcgaggactttctatcggcgcacccgatggtctgcgtggacggcagcttcttcaccgtggagggccgcgttgctgacgaagaaggcattcgcaagcagatctatgagatgctgcgcccgcattttacgagcggcacggcccgtcgcgccacaagcctgctggaaacgctcaggctggaggcctacacgccggagctgcccattcaggaggatcgcatccacgttgccaacggcacgctgtttctaaatagtgagttttgcgccgaaaaagaattctgccgcaaccggcttcccatccgatatgacccaagcgcgccgcagccggtgacatggctgcggtttttgtctgacctgctggaaccggaggacatcctgaccttgcaggaatacctcggctactgcctgattccgacaaaccgcgggcaggtgatgatgctgctcaagggcaacgacggcgagggcaagagccgcatcggcgtggtgatgcagaaaatgctcggcagcaacctgaaaaacggcagcatcgccaaggtggagcgcagccccttcgcccgcgccgatctggagcacgagcttttgatggtggatgacgatatgaagctggaggcgctgcaatccacgcactatctcaagtccctcatcaccgccgaaatgccgatggacttggagcgcaagggcgagcagagctatcagggcaagatgtatgtccggttccttgccttttctaacggcgatctggagtcgctctacgaccactcggacggcttttaccgccgccagctcattttgtcggtgaagaaaaagccgccaaaccgggaggatgacccctttctcgcggacaagctctgcggcgagatcgagggcatcttcctctggtgcttagagggtctgcgccgcctgcaagagaagaacttccgcttcacggagagcgcgcggacgaaagccaaccgcgaggacgcgcgccgcgaggccgacaatgtgctgctgttcctgcgctcggagggctacatccgcctgaaagcggacagcaccgtgacatcggccaacctgtacgccatctattgcctctggtgcggcgacaacgcctacacgccgcgctccgcgcggacggtgagcatgacgctgaaaaagcacgccgacgagttcggcttggagcacgacaatcacatccagaacgccctcggcaagcgggtcaacggcttctggggcattgaggcgctggtcgcgccgccggttttatgagatcagacacgaaattctccatcccatccatcccaagcatcccaaaacccccggatggatgggatggatgggatagatgtttttcagtttacccgcaaaggaggatgcaatgggaagagtttattataaggagctgccgctgtttcacttgtacgacagcgatctgaccggcacgcagaagctgctgatgacgctgcttctggtggagcggtacgatatttacgacctgagctgccttgcgcggatgcgcccggaggacgtggccgccgatctggcggagctgaaacgaaaggggtatctgcaaggcaggtgaaaaccggaaagaaatttgcgcggcggcgaaaggattttgcgaaaccgtgctgctcggaaccgcgcaccggcttcacggatgcgcgtggggctgcacggtttagagcaaagtcacgcggcttcgaaaagtcgatacccctcacttacgaagatggcatcgaccgccgcgcttccagcggattttgggaaaacagaagattacgccaaacagcgaagcaggttttcggaaacgcgaacccgcttcgctgttttcatcacgaaaatttgggaggtttttatgaacatcagaaatgagatcaaatcgcagatcgtccgcgccggttttaccatgcaggaggtcgttgaccggctggccgaggaacatgattggagcgacagcgtttccaatctgtccgcaaagctgcaaagggagagcatccgctacaaggaggtcgtggagctggccgacgtgctggactgcgacatcgtgtgggtgaagcgaggggttcgccgatgaaacgctttgccaagtacaaagggccggaaatcgggtacatcgagtcccacaacgagcgcaccaaggagaaatacgccagcaatcccgacgtggacacgtcccgcagtcacctcaacttccatctggtgacgccccagcgcaagtaccgcgccgaggcggaaaagcagatcgcagaggttggctgccgcacgcggtcggacagcgtgcgcgtggtggaggctctcgtgacggccagcccggagttcttcaagggcaagaagaaatccgaagtcagagcctatttcaccgaggcgctggactttatccaagagcatcaagacccgaaaacgatcatatccgccgtggtgcatatggacgagaaaacgccccatatgcacctttgctttatcccgctgacggaggacaagcgactcagcgccaaagagatcgtcggcaacaagaggaagctgacgcagtggcaggacaggttctgggagcatatggtcagaaaatacccggatttggagcgcggcgaaagcgccagcgaaaccgggcgcgaccatatcccgccgcggctgttcaaggaggccgtccacctgaaccggatgaaggagcagatcatggcgattctgaacgacaccaatccgttcaacaaaaaggccaagctggacgagctggaagcgctgctgggcaaatacgttcccggcgcggaggctctgcggacgaagctcaagaagtacgacgcagcctacaaggcgctgaccgccgagaatgcggcgctcgaaaagcagctgggcgctgcctccaaggaaagcgtcctgaaaaaactggaaatcaacgaaaagctccgggagctggacgagctgcaccgcatggtggacggcatcccgccggagattttgcaggcggccaagcaggtggtcgcgcataagccgcaggaaagatgaggaaactaagaatgttaaaggaggctggttctatttggagatgaatgtcagggacgatcagaagcttgttgaaatctggctgacgaatgcagaaaaaattgaccccgtcctgcgggaggggctgaaagagatttacgccaagtataagacgaagaaatacatggtcgccgtgttcgagtccggcaagggtgatctttatgagaacatgcgggatctgctgctcttcaaccggcggcgcagcgccgaaaaggccgtgcagcaggcgaaaaagcagcgggccgtgggcatggagcggtaagccgcgggcggaagggagcaatcctttccgcccgttttcttttttgcctgaatttaatccataatatcacagtccgatccggcgcataaatccgtcataggtttctacactggctttattcgttttcgtgacctgcttcatctggcaaatccggctcggaatcaggcgcagattggcaaacagccgcacgagccatgccagcggcaggagccagtggcggttccgcagaaatgtataacgcgattcgatctccgctgccggaggaaacagcatcttccgtaggacacggctcctcgacggagcttcgtccttttcgttgcgcagttcgatgacggcatgatcgcgggaatgcccgaacagatcggaatccagtgtgtaagacagcagcctgtccaacgcttctgtgtctggttctggtaaggggcaaattgtcttcgttccgaaccatacgcggcaggcgttcatcacgatgtggaagaaatccaccagatgcagtgtagtgaactctcccacgatggcttgccaatgtaggctgtcgtccttgtgctttatatacagcgcaacatccagatacatccgcagtcccgcaccaccgccgtaaaggtgcttggccaggtggcagaccgtgtagataaagtgaaaatcatcctccggacggaaccgaagcccgtcatccggttcagcatgcgcccacgcggcatcaaagtatgcctgcaaatcagtcctgccgtccagattaccgtccatgagattggtgtgaatttcgtaatattccgcatcttttatgtaggaatacgtcggctcccagtcctgcttcacggtatagcccagcgacagcatcaggttatgcaccttctgccgatcctctggatgaatgagcaggtcgatatcgccaaaggtacgcagctccggtgtaggatacagtttgcggagataatagcctttcaccggcatatgggcgatgccatgctccgtaaagcttgccgacaaggtctcgaagtccacgcagcggttgagattcgttgcaaccgtgccgtacagcagcccatcgagctggcggcagacatttgggtcgtcaaagagcttccagcgtttgttttcatacgccagaaccggcaggagattctgctctgccgccgtccgccacagatgcgggatattccaaagcccgtccggttccggcggggtatcctgtacgaagctgtgtaggaggagcgggaactgagtatctaacataaatgttacctttcttgggtggtttccggcacaaggtcgatcacgacgatctccggcgggttattgatacgcggaatcatgccgtggcccgcgagaccggaggtaatgaccatctgcatatgttctccaaggcggaaatatccttggtcgtattccggaaaccagccctgcatgggcgcatacagtccgccgatgaagggcagcctgatcagcccgccgtgggtatgcccgctgagaatgagatcgacattccacaagttgtatgcaccgttgaaaataaacgtgtctggcatatgagcaaggcagattttcggcacatcggtgtcctcaaatgccttgagaaactgatactccggtgaggaagaaaactcctcctcgctgcggccaaaataaaaggcgtgtcccatggtgccgccaatgcgcagcggctgaccggctagcgtcacgtccgcatagctgtcattgacgactacggcaccggcttccgctacctgcgtgaggagtgaggtgtcggtttgcatatattccagttcatggttgccaggggcaaaatacaccggtgcgatttcatgcagtctctttatcagccgtagcagttcctgtacatccgttggatctgcactgcggtcgatcatatcgccatcaagaaaaatcgcgtccggggtttgctcttgtatttttgcaatcaagcgggagttttctctgccaaaagatttcccgtgaaggtcggagaggagaacaatgcggacgggaccgccgagattttgcaaggaaacggaataggattcagcgctgatatgggcgttgccgaaaagaaccgcaagaaaaacggtgaggcagattaccgtagcggcagtgatctttactaagtgtttttttcgtttcatttgatatgaagcatgcgaccaagcttattccagccgcgttgggcaaagcgcactgcgcggtcacgcgcctcggccgtgccatactgcaccgtgtgcaggaaaagcaccattctggagccaccccgctccaacgtatgcaggtcattcacctgtttacggtagaggggcgttctcgtataccgcgttccccagtgcagaagatcggttttcagtccaatatcccttgccagcgcaatgcccttgggcaaatccagttgcattttgccaagatgctcccaatagcaaagaattccacgcaaatcatgagaaatcggcctgcatccgttcaaagccatactaagggcaaccagcggttcatctcccggcgttgcaaattttcctttgaatcgatacttcgtgtagtgcggaaccaattcctgcgccgttttcagcacatccctgcactgacttgttttccgcatgtaatagatgccaccgtggagacccaccacataggagactttttcctgtagctcacccagatttttatattcaaaccagccggtcatatcatccaacggaaggacgcggccaaagcaggaaaagtcgtccgcgttctgaaacaggtcgaatagccagttcaggtcgccgtaagccagacagtctgcatcaatgaaaatatttacatcatagggcaaaagtgcgaacatctccagcttgtccagataattgcggtgcgctcccgggaaaagtcgcacatcgtcaaactccgccgtatattcgttttcctgatccgccaaaatagcaaacggaaccggcgccttggaaaaccagcggtacgagtgcagtagattcaccgctattttgtaatattgcgcatcgcccgtggcgatggtgataaagccgtgggtcataattactacctgccctatatctgtagtatttcagggttgtttaactgaacactcccccagtgagcataatcccaatcaatatcaggcctttcggaagctatttttttaaatccaaggcccgtcacccaatccatgttttgacatgtaccaaattcatttcttgaaaaaagcacaaaatttgaagaatagtctcctggcaacaaattgctaatatcaaatttgaggacaaagctttgcaactccaaattattatcaataggcagctctttaagtattgttgtgcccacaatcgttcctgctattgttttgatttccattctaaacccgacattgttcaagcattttttgcgtcttgtaactatcttgataattaaataattgtttttgaaattgcagtccgtgcaacggttgccttggtaattgcagtattccgctatctgtagccgaatgctatcggtcacaagccaatgtggacgctcataggcggaatagtcaataaacgaaagattatcagatttgacatcctcatatatttcaattgccctctccacatccccatcaaaaatcagctttccgtgatccaacacgatgcaccttgtgcaaagctggcggatggtgttcatattatggctgacatagagcacagtgcggccctcagaattagcggcatcgcccattttgccgaggcacttctgctggaacttcatgtctcccacggcgagaacctcatccatgaccatgatctcactatcgagatgtgcggcaacggcgaaggccagtttgacatacatgccgctggagtaacgcttcaccggcgtgtcgatgaacttttccatctccgcaaactcaacgatctggtcgaatttgcggtcgatctctgccctcgtcataccgagaatcgcgccattcatatagacattctctcgtcccgtcagttccggatgaaagcccgtaccaacctccagcatagaggcaacgcggccgttatagctgatcgtccccttggtcggcgcagtgacgcgggatagaagcttcagaagcgtggacttaccggcaccgttatggccaatgatgcccagtgcctcgcccttctttacctcgaaggatacatcgtccagtgcaaggaatttctcacccatgtgcgttgctgcgtcggagccgatcttgctgttggggtcttccttgcccttcaggcgggccatccagctttgaagatcgccgcgcagcgtaccgccgccgattgcaccaaggcggtattctttggagacatgttcgattttgattgcaatttcgtccattttacttcctcagactgtatccataaacgttttttccacgcggctgaacagcactacaccaagaaacaggaataccatggtggtaccccagccgatgagataatagctccactccatcgcgcctgtacccaaataggcatagcggaacaggttaacgatgggggaaatcgggttgcacatataaagcacatgccattttccgccaggtgcaaaggcaccaaaccggaacatatcataggcaattggtgagccatacatccatagctgtacgccgaagccgaccagcatggcaaggtcgcggtatttcgtagtcagcgcggaaatgatgatgccacagccaaggctcagcatcgccaactgcaagatgatgagcggggtcatgagcatccagagattcggatgcacaccctgctttgtgacggtgtaataaaccagaaagatcagcagaaagccatactgaatggcaaagctgatgagttccgaaaacaccgtggaaatcggcataacaagacgagggaaataaacctttcccatcgtcgcgctgttggcgacaaacgtattcgctgtttgcgtcaggcagccggaaaaataggtccacagcacagtaccggcaaggtagaagataaacggcggcacaccgtccggtgacagccccgcgatattgccgaacaccagcgtaaacaccaccgtcgttagcagcggttgaatgattgcccatgccgggcctaggattgtctgcttatattttgacacaaagttgcgcttaacaaagaggaaaatcaagtcgcgataagcgaacacctcttttaagtgcaggtcaaaccagccgcttttgggcttgatgactgtggtaaatgtttgcttttccatagtgtctccttctgctacagcagggcatacagtttttgcagaataagggcattgtcatgctcaaaatcgtggcggcgcagcgcctcgcggagagcctgacgcagatcaggcgtgcgataaagctcggctgccgcgtcggcaatcgacgccgcatctagcttgcagagtcggcccgtttttccatcttcgagttgttctttggcagcattttgtgttgccagaatgggcacagccagcagccgcgcttctaacaccgtgacgcagtggccttcaaaccggctgggttgcacatacaaatctgcttgtcggatatagggatagggattgtcctgcattcccagcagtgtcacatatcgatccattctaagcgcacggagctgcgcccgcaaggaagcttcctccggcccgccgccgacaatccaccagtggatatcggccaggccatcctgcaccagctttgcgcaggcagcaatggcaagatccatgcctttggcgggcgcgagccgcccgcaggaaacaatgttgaagcaatcttttgggaaaactatatccggcattgccatgctctttgtccgcacacccgacacgtcaatcagattgtttactgcaatgatttttccggcgtaacgcggacgatacgcctttagcttctccgccaacgcttctgagacagcaattaccttttccgcctggcggtaccccagctcgtcatgatattccttccgcatcgcgccgtgatgataaaacatcaggaagcggtcagcggaaactgctcggacagcagtctccgctgaccgatcgctgtagattaccgccgtatcaaaatgctctccgcccaactgcttctttacataggcagcataccgccttgcttccggtacgcgtaggagaaagcgcaggatgcgccagatcaggcgacggagctttgaggcatgctgtggctcctccataaggttgtacatccgtttataacggtagccttcccgaaatgtcaccgcatgctgtcggtcggagacgatcagacggcatttcggtgtgatgcggtacgccatttcctgacaatcccgcaggatcaggcaggtcacgtcgtaccgatcgtaatcgagccggttcagcagattcacaagcgccgtctcgatcccaccaatccacagcgcttcggtaataaaaatgagcttctttttcatctttcaaacttgctcttctccggcaggatcatctcgaatgcgccgcgcaactgcgacgacagtacctcaaagtccactggcttctccgggtcgttgatgcaaagcatgtcgtggcactgctcccgaatgatacggcacagctcgtccacggtgtccccgtcagcgcaggacacgacattatccgtgttgaatggtgcaaactgtccgctggctacctgccaccacaggcacacccactgattcagatcctccgcactgcggaagcggtgcaaggttgtccgcgccagcagttccggttccgcgtcccagacggcggcaaaggtgctctttgtatacgccgctggggcatgcaggtttttaaagccggtgaaatagttgggaaacagcttttccaccgccttggtgcgaaggttgtcctgccagcggtaggcgcggttggcatatttgccgccgtatttctttacctgcgtgcacttgttgaagtgcgcgttgatcacaccgagatcattcaccgccgcgtgctgccagataccgatctcgcccaccaactcaatgggatattctccgccataggtgcatggcagtccatctcggaaaaacgcagtctccggaaccgagcgaatcaaaaacatatcgtcgttgaagtatacaaaatgctccgccagccccggaatgcggtgtaggttcatctcaatggcatgagagctgaaggtcggcagtacctccggcgggagaaaaccctcatgcttcacatggtgcaacttcggatgcgccagattaagaaacgccggaacatgcccgcaggtgacaaagtggattttccgcacccacggcgcaaatttctccactgcgcgaaaccagtagggcatcagcccccagtcacgaaaacggttcggcgcattgctatcgtccaacgttttgccttgatattttgctttttctgcctgccagacggggtcactcccgtccacccacagaacgacaaagtcgatgtccatattcgcacctcaagtaatcttttccccgacaaatgggattttccggataagccaagtcagtacaaggctgagaagataaattgccgccatgagtgcaaacaatatgatatatggatgcgcaacaggctgtgcaataggaatgagcgccagcatttcgtttacaagcgcatgcagtatgtaaacgccgaaactcagctccgtcagctttccccaggcttttgctgctttttctgaaaagttaatttgagacactcgtttcacaaagaatacatagatagccgttgaaaacagaatgacattgggcttcaggtactgtttgacaaaatctgcttcctgaagctccggtgaaatttgcccttcaagcagaattgttgctacaaggcaaattgctcctatgatatagattgccagttcgattcttcggcctattgcattcctatagtgaaaaacgcagtagccaagcacataatatccaatatatcctgcgacgttgccaagcaaaagtttatcgtatatcccacaaaagatactgctcaatttaggaaggtaaacaagatattccccgataatgttggctacagcatacagtgcaagaaaatacaacattactttctcattttctgtaatttttctaagtagtggcgtaaacgcatataagccaataatcgcatacagataccaaaaatgatagggtccttctatccattgcgtgaatatgccccaaatgttgagcccatcataggcgccactttttatgtaatatagagcatatatacttgaccaagcaacaaacaccacaatgatgcggcgtatatgtttattccatatctttttaatcgtaacatgtctttgagggtcaaggaaaaatcgccctgaaatcaggaaaaacaccggaacgcaccacacgatagccgcaacaaacattgaatgctgccgggggtcaaaattgctgctcaaatatgcgtttccacctgcgtgcatggcgataacagcaagtattgccagcagccgcaaaacatcaaactcggtttgccgtttcgtttcgggcatcagaaagctcctttcttcttttcccaaccagcgctgggcaaacgtggttcacagcgagaatcagaaccgcttctacggcgatgatcaggcaggttacaccgagcatccaaagcgggttgctgtttcccggaacggtatacagcacgagctggtgcgttcccatgatggtcagcgcgttttcgccaatctttgttggccatttccaggagatcaaccgggcaatgcccatcacaaaatacagtccgcacacgccgctgataagatacagagccggcgtacgcaaaacagcatcataaaagctatttcccagcgagaatttcaggtaaatcaccgatgtgaccaccgttatcaggaaagcggtgacgattttgcaccatttaaattccgtcagcggctttttcaacagatttccggccagcatgaagacaaagcccaaaataccgcggaacaatagcgcttgcaaatgtcccccctttgtggacatcaaaaaccgaagccccagtagcagcaccgtacctcccacgccccacgcgatcttgcgcgggaagcgaatgtacagatagtaaagtacacacgccagaaacatcgctggcaaaaaccagtccgcactaacattgcagcgcatggtcagcatcagacggagcccctctgcaaaagaaacagaatgcagtacgaaatgcttgtagaggagagcaaggcactcaaaaaacaggtacggaatcagaagtgttcttgccttatggacaaaatacgcgcctatagggcggctgcaccacttttcgccgtcggtcagcagtccggacagcaggaagaacgcaggcatgtgaaaggcgtttataaattcctgcgctagggtgtacgggatgatattgtactgcggattggcgtagttcaaaacatgccccagtaccaccaacgtgatcaaaatcgcacgtgtagtatcaatgtatgtcaaacgcctgatcattgcgctagcctcacctcatgttttatgtttttgatacaggcagctacttttgacagcgacggcaaccctgtgccgtagttgcgtttttcgattgtgaagatagatttccaacgggcttcccatctctaaaaaagcgtatttactttgtttttgctccgcaagaaccctgcgaatttgacacagcggcgcataatagagtttttgccgcagtagcatttcgtaaaggttctcggcttcctgcggagaaatgccgagtgtgcccaaaccggcttcaagcggctgcatatacccggccaaatcagaaattctctgcaatcgtcgataggcacccttttcatcctctgcctgacggtagcggtaaattgcctccggcaaagagtaaatgttcttgcaatacggcagcagctccagcacaaacagaaagtcctccatcagaatcatatcttcgtggaagcgcacgccggaattcaacaggagttttcgtcgatagaatttattccagacgggcgtcaacgcgttacaattgtagaactcctgaaagctctcctttagctgttccaatgacaggctccctgcacaaggtggaatcagctcgtcccttcggtacaatttaccatgatggtaatagtcaaagctcatgccaaacagcagcatatccggttgttgccgggcaatcgtatccgccgcgcgagacagtgctccgtcatctaccgtgtcatctgcatccacaaaccagagatactctccctgcgcctcgttaatgccacgattgcgtgcagcggaaacacctgcatttttctgatggacacaccgaagttccggatatcggacacacagcgtgtcgcatagttttgctgtgccatccgaagagccgtcatcgacgagcagaatttcgtagtccgtcagtccgcaggcacgaatgctgttcaccgtggcctccagcgttttcacgcagttatagcagggaatgatgacgctgaaggtcattgctgcacctcccagctgaagcgatagttcaggtaattatctacttcgtattctattgtgtgattgaggtttgtcgtgtaataataaagtcctgccaatagcgccacacacagcagtgcagcgacccgctgttggcgcgaaagcaccaacctccggctcggccggagcgcgtcatccttctctggataaaacatcacaggcaaatacagaatgacaaactgaaaatagtagtctgtcaggcgcgtaaatacattgtcgaatcctgagaacatctgcaatattgcggcaacaaccattaggttgaacagctttgagaagttcttacctgagaagccccgaagcgcaactcctgcaattaggagagcaacgatcattataaatcggccaccaagtcggtcgttgaccatataggaggcttcttcataataaaattcgctgacaaaagtaacgatttgtgtgcggaacaagaaaataagtccagcgctcgcaatatagatcagcagtttgtgcatacttaacttacttttagcaaaccagtaagccggcaggaaaacaaatgcaggcgtatgaatacaccctgccagcaccgtccaaaggaaaaattttctcggacgttcctccatgatgccggtaaacgcaaacatcaacaaacccatggctaatgcctgcttaattgcactgaatccaaagatataaaagccgaaacaatcccatagcaaatagcttaaccacggtgtcggggagtagcgatagatgataaccgcaacggcaatctctgtgacgaccgcaatcacgattaaaagtatctgaaagttgccatttgaaatcagggatagcagctttgacagccatgcaaagccaaagtttcgtccgccattaaacacctgctcgctgaaccatccattgacaggatatattcgtgtgtactgcccggaatatttcaagagatcacccgtcaagtacatatatctccagccgcagacaaaagcgtgtagaacagccatgagcgcgatatatactttcttttgtctgccatgctgcgggagcaagacgccaaagcccagcaccgctgcgaccatatagtaatagacccttacgcccatttactttcctcgtttcttccgtagttctctctcaaaaaacgcttccgtatccttcgccagtttctcgcacttgaaatctctgccacgaatcttagcctgttctgcgtagtgctccagaagtctcggctctgtgagcatccgcttgacgccttcatagaatgcttcatcatcattcgcagtgataagcccatattcgctgtcacccagcagttcctgcatgccagaaacgtcagtggtgacgatgggttttcccaaaatcaagccttccgtgacaaaggtgctgaaaccctcaaatatagacgagcataccaaaatgtcggctgcctgcatcaggttatacggattctcacggaaacccagcagttttgccgatacttccaaatggttctcctgaatatacgcttccagtcgagagcgttcctcgccctctccgatgatccacaagtcatggtcaaggccatcctccagcatgcgcttgtgcgcagtcagcgcgcgtataaaatgtttcggcgcagacaatctgcctacggttgcaatggtcagctttctcttggatacgtccggcggcagcgcctcagcagattttctcagtatctcgccgtcatctatcgtgttgtacaccgtgactgccggaaccgtatcgccatatagcttttcaaagtttttgaggacattttcagaaacgcacacggcaaaatcatagcgtgcgtaatacttttttgtcgctgccgcgaaatcgtccggatttgcccagttttgtaggtcggaatgcacccatgcaagcttcagtgccttttgattggtagaacttgccatgattttggtggagccacattccagataggcggcctcgatatcgtaatcgcccttgatgtgcagcggataggtcagtccagccgccgcttcggcgcgcatccgaagctcgttgatgcgattcttcgccggatagcaatacctgtaacgaatccccggcgcgagatattttcccgcatcatccggatacagcgtctgtacagtgatgcagaacttcgtctgatccatcgcattcaccagattgcgcaggaccttttccgctccgccaccagagagggattcgatgaagaaaagaatgttaatcacattgccgccctttctcataaatcgcatagactttttgcattgctgtatctgtatcaaatccggactgccgcatttgcgcggcatatttttcgggcgcttctcgtttcgcaccacagattgtgtccacccacgccgatcgatcgttcagaggcagcggtcggagcaggtctgtcagaaatacatccttgggcacctgatcggatatcacacacggcagcccgttagactgcacctcaataatggacagaggcatcccctcataaagcgacgggaatgcgaaaacgtccatcgtgttcaggtaatccggcacattgcgaacatttcctgtcatgcggacataatcttccaagtgtagttcgtggattttctgttccagcatagggcgattctcaccttcgcccagcagcaggagatatgcctgcggctgccttttcaggatttccggcattaagctcagcaggaacgactgatttttgaccgcggcaagatgtccggcatgaccaatgatgaacttgttatccaagccaagctcttttcggaacgcattgcgccgctgttcatcgaacgcaaaaccttgcgtatcaattccgttcaggatcagggttccttttttcccaaatactttcctgccgtataaccgttgtccggctttcacactgcaggcgatgtaatcggtagcacaggtaaggatcagaaaccgcatagccgattcgtacaggcgcactttcaagctccggtgttcttccaatgctgaatgtgcatgagaaatacgcacaggcacgccatacagttttcctgcgaacatgacccagccaatattgaacatggtgtgagcgtggatcgcatcatagtgatatgtgtggatcagccttttcaagccgctcaggtaagcacggtagctatcggatggcgaaggaaggtggaatattttgcagccgcatgcttctaactccggctcatatgcaccgatttcatcaccgaacacaacgtaatgaacgatgtacttttgtgggtcagcgcgaagcccgatatccgccgcaactttttccgctccgccgatgcgaagcgacgcgacaattgaaagtactttaattcttttcattgctgtttctttgcttggcatcttgctttatggcggacgtccatcgtgccagcgttaataaaaactttgatcaaatctgcactcactttctctcttccttgtaaacacaagatgcactttacgttaattcaaaatcttgttaaagatgcactcttctgttgcatgctccttcgggataatcctacccgggtttccgatcactatgctgtgtgacggtacatcaaaattcacatatgcattcagcgcgattaaaacatcatcgcctattgtaaccgcccctattacagatgcattgatacccacaaaaacgttgctgccaaggcgtggtgcgccaatccgtgccccgcgatagtccacaccaagggtgcagcccttatataggcagcagttttttccgaggactgctccatttcctactgtaatgttatacggatgacacaaatacaagccaccgtctatttcagcattcgtactgaactcaagcccatattttctggacatcctgtacagcgcaaatctgaaaagcaacctgccaaacggtgtccttgcttctgtgtacttcctgaaccagagcaaaaagcgaatattatgcctgaacaatatatccagcaggagcggggagtttttacccccccgcaggcggtagtagtcttcgcagaatttacttcttttcattgctctttatcaccgttctctgctttttatcagccaatttatagccccgctccatccaagctgcactggtagggcaatgatccggcatttccaaccgacaggtctcacgtgctcagcacggtacagcttgcagattttcctgatctcctgccgccgttgctttgcggaaagatcaaatttcaacagctctttgcaactggaatagacgctgcggtatgtcatccaggagagcgccgcttcgtaatgcttcgccgcttccggcgcatgcgggacagcctgatacgccgcatacatccggcgattgacttccatcagttgctctgtcagataggggcgtgccttacgggaaagagagttcccgtcgctgacatctacgttgtatagatggtcttcgatagagccaatcgagcgaatgtgcatagcataggtaaagatgaacgcctgatcctctccgattactaaatcgtttccaaaacgcatattgtactgctcgatgatttgttttttgaacactttgctcaaaagtgagctgaagagatactgctgcatagcagaagaaattcgttcggcaacgccaacctcttcattttcgtagaattcccctgtgtcccattctgtggacacgccgccaaagttgctgtatccaaacatcaacaggtctgctgtatcatttttcagtgcggaagaaagcgttgcaaaataatcagccgacacatagtcatcgctgtccacaaacaagatgtattcgccttttgcttgctcaagccccaggtttcgcgctgaagacacaccgccattttcttttgcaaaataccgaacacaagaatatgtactggcgtactcacgacagagagcatcgctgccatcggtggagccgtcattgatgagcagcagctcataattcgaaaactgctgtcctacaaggctatccaagcaacgctgcagcgtccctttggcattataaacaggaataataacagaataccgcatcaacttactccaaacccgtagatgtgtgccagttcttgctgcacgctaacatccgtataaagctgtactttcttatacccagcctgccccagttccttttgactggtgtcattatggagttgaacaagcctttctgccaaggcacggctatcgccgataggcaccagatatccggtcacacaattctcaattaactcacgatgcccgcggttttccacagcaatgaccgtttttccgcacagcataccctcaatcaagtttaggccaagcccctcgcgatggctgcatgatacaatcacgtcagccgccgggacaactcgttccaaatccgttcgataacccagcagtcgaatatagccctctgcatgatttcctgagatctgctcccgcagggtagattccagcggcccgtttccggccagcaggaccttcagctcaggaatcctgtcacggcaaagtactgccgcgtcgatcagtgtccgctgatctttatttgcgttcagctcgcccgtgcaaagcacgacgaaatcctgcgctgacagtgattcttctttccgaagcacttcttcctcttccgcagaatgcggatggtagcgcgataccgatacacccacgccgtgaatatggcaggtctcgaccgggaatttactccgcgcaagctgatagtcctcttcattgatggtgatgagcttgtccgtatggcggcacataaacttctccaccggataccagatgagccagtttttcttcggcgcacccttataaaagtggaagccgtgagcggtatagaacacctttgtgctgtgtttgcgtgcttttcgtgcggccagtcgtcctagcacgccgccgaccggtgtgttgcagtggatcacatcgtaactgccctcatcaatgatctttttgagctgtttgtaggctccaagatttttcggtgaaaacggtgaccgctggaacggcacgtcaaagacctgttccacaaagtccagcttcaggccgttcttctcggcaagattgtttcgcgccgccacatggacttcacagccgtgctcgtgcagcatcgcaacaagcggcttgtgaaactggcagatatgcgattgtacagtggcaataagtaaaattttcttatcgcgctccaccgtgtctccttctattttgaatttctttaattctctcataaattccttcttgcttcgtcgattggcacgacaaatcatgtcctggagcctcattagcttcaataattacaaccttgtcttgaaggatggcgcagtcccatccgatatactcgacatcagggaatagttttgctgccttgcaaaccatttcttccagttcattccagttcggtatttcaacacctataagacgtgcaccgcttgtaggatggaacgcatattcattaaggccaatgtcataaaacagagaatctgttagaccatactgcatgttaatattaccatacatcccctgtgaacacatattatccaccaccgcgccacctcttccaactttaaggacgcatgatagaagttcaccgtgaaatgtcattgcccgtactgtattcactgatgagctgttcaattcagctaatatcggatgctgtatcagaatttcttccgcaatgtactctctgtaatcatctatgcagatatttctgcattcttcccgacttagaataaagatcccatgtccgccagcaccgccatatggcttcatgattacatttccaacagaatcagcaaaatcctcaagctgttccctcgttgctctgcttaaatcaatccatctgcgtccgataaagtctccaagggcttcattcatcaatcttttatcattaaaaacaggtaccgtcttctttgaattatgttttcttaccagttcttttcccttacgccaaacaacgaattttctgcgctcacgccaattctttcgataaaactggtatctgaaatagtcatccggactcgctccacacaatgccaagctaaacagctcatcaaaccacgcatatatgtatgtaatatgagatgatttctttggcatcatataccgtttcacgtttctgttgaatcgaaccacattatcttttataaattgacggctcagcataccactgtccccctgttaaaacagcctaacagacgttataaaatagtaaatcttatccatccacatccgcttattattgtgcgctacatctcttacactgatattcgtcgcatcaattgcaggacatagctcatgtgtaaaatcaatatgtgttcggtctgcaatacgatccgcaagaggtaccatcagcatgagatcagaaagatgtcggttattatatggaacggttacatcgtgggaaaacatatgctcgcagcttagaacatccgcgccccagcggctgtcccgcatttccagatcgatgatgtcgctccagtcgtaattgaacatatgctcattgtaggcagtactgcggagatagtccctgtagcgggcgtccgtcgcgtacatcaatgccggattcatcaaaaagatgttattcattgcattgacacgccgcgccgtacatttcttctgcattcgctgcacgccgtaacgcttgtagtaaaatgcacgtccaatctccgaggtccatgattttgcttccacatcgaacggattcgccttccgaaggtaaatccgcttcataatgtcgttgtggttaaaatacctgcggttgctgtttacgcataggatcgcgcgaactaggtagtattccggataaacggccttatccaaggggatttcataggtaatgtgtgggacgccgaccgctttacagatcatttctgctgcgtcgcaatcgaccttttcagcaggctgcgagttataagaaaaatactggtacttttcttttacatgaatcgacgctgccagcgagcctttgctgtcccgaccgccggtcacggacactgccggtcgttcccatttctgtgcaatcagaccgagagtgcttttcatgacctctgcaatttggcgtactgtttcgtggtactcagtttcatctgcacacatatggagagacttgcgcggccaaatacgaacggttttgaatttaccgtctgaataaattacatagttgttgcaaatcagctttttcagctcgtgatagtggctgatatctcccggcagtccttccccgtacagatgataccagcggtaatgctcaagcttggtcacatagtcatcacggtgaagctgctcaaacagtgaaaccaattcttcgtgagagcaaagataaaaatgtccgtcaatgtttccatagtaagcggtacgcatactctcaaagtctccgcagaacgtcatgcgctccccagcaatcatcccaagaacaaacagtcccgtcaaattgttaatggtctgaagaccgagttcaaagctgccctgagactgctctgcaagagtacgcagaatgtccatttcatttgcctgattggaaaagggatcatatgcgtggccaatcaaaaagtaagtaatcccattcttttccatggcgtatagcttttgccgacagtgaagccagatatgaaagctgtccgaaaggctctccttccgccagtttccaaagaagggaaacgcgccgccaattgtgagattctgattcgtaatcaggaaaccctgctcaaagatggaggacttatattccggaaaacgcttgatattttcttttatatacggccagttttcattcatcccaagttctcctttatcgtctcccacagccgtgcccgattttcctctcccacaaagctgttatgcggggtcaggagcacgttttccatatcccacagcgggctgctttcgggcaggggctcctccgcaaacacgtccagcaccgcgtgaccgccgctttgcagccacttggtcagcgcagcctcgtctgccagcgcgctgcgggcaacattgacgaacaccgcgccatcatgcaggcggccaaagatttcctcgctcacgatgccgcgcgtctccggcgtcagggcgatgcagcacaccagaatatcacaggccgccgcagcgtccgccagcttatccagcggcaaaacctcgtcaaaatccggcagcacccgcacggtgcgattcacgccggtgatatggcagccaaaggctttcagccgctttgcaatctcgcgtcccacatcgccgcagccgaggatgcacacgcgcttgccggaaatctccagcaggccgcgatgcttctcccatttgtgctgcgcctgattcgccgcaaaaaagcggctctgcttatatagctgcaaaatgccgcagacggcgaactccgccatcggaacgctgtacacgcgcgcggcgttgtgcagctcgatgccgcgcgcccggatatcgtccagcggcacacggtcaagccccgcgctggtgagctggatgacccgcaggctcgtaaagcgctcgatggaattgtagaggaacaggccgttgcacacgaccgcctcgtatcgctccgggcagtctaccggggcgcgttcgtcgccatgaacaaagaccttgtgcccggcagcttccagctgctcgcgctcgccgctattgagttgaaacgcgccggtcaccagaacgttcatgcgttcatacctctcacaatgttctcaacgcaggcgcagaccctgcggtgattctcgtcaaactgctcctgtgtccaagcggcgcagtcccgctccacgcggcggatatccgccacgccctctgtgaagatacgccgtatttcatccaagtccgtcgtcttctccgtgttgcagaagctgcgggacaggatcacatactgtgaacccagccgatagtgctctccgataatatattctgctggaagcgtccccgagccggggcggcccacgccgccaaagccatagggaatacttgcttcacggagctcggcgcaaagcctgtccaccgtgccgtccgtcaggagctggaacatgaatctctgatgatagcacaggtgcaggtcattgaggccgatgtgcatctggtcgatgcccagtatggccagcgcctccggcagattgtctgccgccgtgtcggtttccagcagcggcatgacctttgcacggccatccaccatgctaacaagctgccgcagatcatccgccatgcgccacatggggagcataataacgtccgcaccgtttgcgatggcgtcgtcgatctccgtctgcgagttgggattcagtggattgacgcgcgccatgatctcggcctgatcgccgatggcggcacggacttttgcaatatcctccggtgtatggtgggactgcaccgtatccatcccgccctgacgctctgccttccccagcacctccatgtcgatgaagatgcggtcaacgcctgcatccgccgcgattttcgcaaccgcaggatcatttgtgatatacatgagtttcagcatttgatctctctcagaccgtcgcgccggtattgacattatcctcgttgcgcaggaccttgaacacggtcatgaaaaggatcttgatatccagcgcaagggagacgtgctgcgtataccagacgttcatcttgatacgctcgtgccactctacgcccttgcggccatgtacctgtgcccagccggtgatgccggggcgaacgtcaaacatatggaactgctcctcgctatactggtctaccggccaaggatggtaggtcagcggcgggcgcggcccgataatggccatatcgccgacaataatattgatgagctgcggaagctcatcaatgctggttgcccgaataatctttcccacctttgtcacgcgcgcgtcgccctttccgctgtaaacaccgctgccggtatgctccgcaccgtccgtcatggagcggaacttatagatggtgaagacctttccatgcagccccagccgctgctgcttgaacagcaccggccccggagaggaaatcttgactgctagtgcggttatcagaagcaggggtgaaagaataatgaaagcaatcagcgagagaagtgtatcaataaagcgtttccaaaatcttttatacatgcagcttcgttcctatccgccccgccgatggcaagggaacctcaaaaatctttgtaattcgtcatactctggagaaaatggtatgagaaatgactattttcctatttaattataacgcaaacggcggaaatgcgcaaggggaaagcagaaaatatgtgtggagatgtgtgaaaggccgcagcgcggagctgcggcctggtgggggggcggatgaagctggaaaagtgcagcaggttattaaaaaactcttgaattactttgcgtgttgaatcgtcatgcaatcgtttctaaaagcttccaataacgaagaacaaaaggcttgatatacagatcaatacgggatcctttgtaccatagatccccttcaaatccaagtattgctcgataggatgcgagtagtattccccaaatatcgggacagtccacgcgcatttgtgtttcagctcggcgcatatggtgcatatattttgttcctgtaggggataaatcttcctccgatgtatccggcgtatatttttccctcaagtgtgcaagtcccatcggaatagcgcctccccttttgtcatgatatgtggatagaggctcgaataatgtacgaatctgaaaggtctccttggccttcttaatatccagcccatagaacttcaatacagtcaaaaacacgccgatgcatgcaaacaaggcatccgatttgttttctcctggtgagacgagcctgtagagcaagctgcttttttcaatgagctccaatctgcttcttgtattgatcccctccagaatgatccgcttaaattcagagacttcgtctagagtgcaaagttttgtattacactggagcttaccataatatcgctcaaaaagcggatcggcgcgatcctctaatgatccttcccgcaaagtgatttcgaaagagatgaatttctccaaataccgtttcgcattggtattgcagccgtaaatttgtctgacagtacactccagttgctctttgtcgatagagatgatcgtctgcacattgggaatcccttccaggacatgatgcaaacgctcgagaaccgtgatcgtatactccggcaggcaccgatcgagttcatccacaaccagaaggatggtctgttcttcggccaaatctttgattgctgcccgaagtttttccaatatacaattaaagctgaagtaaacatcgaaatcatgactatctgcgatttcctgagtagccttatttcttgcgctcttaattgtttcaaagattttctttatatcgaatccagttttaacagaaccaacttcaacaagaccggcaatgatttccttcaaaaccaccttgaaggttgtgcgtttatccgcggagatgaagttggtttgcttgtcaattgagtcagttaaagccgcaacaagcgcaatcaacggttcctcataataatcatatttccagcaatcataatggaaaaccagatattttcttgggccgtctttctcaagcgggtattttgcaatttcctcttcgaatctgtttaacacaaaggtttttccaacgccccaagcaccatttacggcaaaagaggcattcttcctgttttcggacagtatctcaactacatcgatcagccgggcgacaaaggctttcctgtcaagcaggtctgttagctcttcctgtgtatccataagtactgcgtctggcaccattttatacctcctgcttttgaatcgatcacgatacccgattataccatatcccgacacataaaataatttcaatttctgaaaaatgcaccatattctgcccgacaaattccgacacgcgcccttccttttccttccttgccttccattcgcataattccccattgtttgcagacaatagcaatgtgatttcgaacgcataaagtggaggagcaatatatgaaagcaaccggcatcgtcagacgcattgacgacctcgggcggatcgtcatcccaaaggagatccgccgtaccctgcgtatccgcgagggcgacccgctggaaatctacacggagaaggacggcgaggtgatttttaaaaaatattcgccgatgggggacctgcaggcggtcgcggcgcagctgtgcgagtccatcggcaagaacaccggccacatcgcggccgtggcggaccgcgactccatcatcgcggtggcgggcgcgccgaagcgcgagctgctggaaaagcgcaactccgccgagctggagcagctgatggagcagcggcgcagctaccgctaccacggcggcgagagccgtctgcgcgcggcggagtccgtggagcgctaccacctcggcgtggcggcaccgatcgtggccgagggcgacctgatgggctgcgtcatgctgctcatgggcgagcacgacgcagcgccgaccgagtcggagcaggcgctcgcgcagacgttcgcgggctttctgggaaagcagatggagagctgaaggagaaaagggaagatattcggggccgggaggccccgattttttcgtattttcaaaaataaaggtagaaaaaagaggcgttcaacggtataattacatagtagatcagtatgcaacaggagggaacggcgtgaagcttgcggcgcttttgggaaacgatacgctgaagcagcgcctttctgcgctgcaggccaagggcaagctgacgcacagcttcctgctgaccgggccggagggctccgggcggcacacgcttgcgcgcatcctctgcgccgccatgcagtgcaccgcgcccggcgaacgcccctgcggcgtctgcccgcagtgccgcaaggtgcttgacggcgcgcacccggacatctgcatcgtggatgaccccgagaagaagaccattcccgtcaagctcgtccgcgatgcctgcaccgatctgtatatccgcccgaacgaagggcagcgcaagatctatctgttcccgcgcgcgcaggacctgaaccagcaggggcagaacgtcctgctcaagagcatcgaggagccgcctccctacggcacgttcctgctgctggcggagcacgccgagcagctgctgccgaccatccgcagccgctgtgtggagctgcgcctgtcgccgctgccggaggccgtactgcttcccgcgctgcgggagcgtttcccggacgtgccggagggcacgctccgcgccgccggcgtgcgcgccgggggctatctcggccgggcggagtccattctgcgggacgatgccgggctgctgccgcagagtgccgcgtttgtccgtgcctactgcgcgcggcgtccggaggagctgctgcaggtgctcgccccgatggagcggctgaagcgcgagcagctccgccccatcctgacgcagtggcaggcccttctcgtctctgccctgacctcgcgcagcgggctgccgcccctgcggcctgagtgcgcgcagatcgcggaagcacgccccgtctcggatatcacgcaggcgatcgaggcgatccggcttgcgctgcgcgatctggagggcaatgtcagccccggtgcgatctgcggcgcgctgaccgtaaagctgcggtgaacgcagtatttgcagactgtcaaaaacctgccgggccaaaagcatcggagggacttttttgacaagctgatttgattttatgatgttttcccgttcatacggaaaggagcttttcatggaagaacccaaatttgagccggtccccgaggagaccgcggaggccccggcagagcccgccgcgctgcccgcggccgacgaagccctcatccccgagatgcccgaagagccggccgccccggcggaagaccccatggtcgaggtctgcgacgtgcagttccgttccgggtcaaaggtctatttcttcgcgcccggcgagctgaagatcgcaacgggcgacgaggtcattctggagactgcccgcgggcccgaattcggccagtgcgtccgcggcaaccacatggtgcacccgcgcgaggtcactccgccgctgcgccccatcctgcggctggccacgcagcaggacaagcgcgtccacgccgagaactgccgccgcgaaaagcgcgccatggacgtctgccagcaaaagatctccgacctcgggctggaaatgcagctcgtctcggcggaatatgcctttgacggcagcaaggtcctgttcttcttcacggccgacggccgcgtcgacttccgcgagctggtcaagagcctcgcctctgtgctgcgcacccgcatcgagctgcggcagatcggcgttcgtgacaaggcgaagatggtcggcggcctcggcatctgcggccgcccgttctgctgccgccagttcctggacgatttccagccggtgtccatcaagatggccaagacgcagaacctcagcctgaatcccacgaaaatttccggcacctgcggccgactgatgtgctgcctgaactacgagcaggagacctatgaggagctgctgaagaccagcccgaagaacgaatcgttcgtcgacacgccggacggccgcggcacggtcacggaggtcaatctgctcaagcagtgcgtccgcgtccggctggagcagcagcccgacaccatcgtctgccaccacaactgcgatatctgtgttctgcgcaacggcaaggcgcgcaagaccgacccacccattccggacgatctcgcgccgatctccggcaatccgcagaagtgccgcaaaaaggaggctcccgagctcaagacctatctcgagccggtcgtcatgcgccagaacgccgccgtgctggaagaggcccgcacgaacgaggccgacattcagaacgagcagcagcgcggcaagcgccgccgccgcggcggacgcggccgccgacatgagggcgagggcgaggtcccgcaggagcaggaggccagacgcccggccgaggcgaagaagcctgccgaaccgaagaagcccgctgagagcaaaaagccggctgaggcgagaaagctcgccgaggcaaggccggagcaggccgagggcgagccgaagaagcagcgcccgcgccgccagcgtccgcccagagcgccgaagcccgagggtgagaagcccccgcgcgccgaggcagcacctgtcgatgtcccgcatggcggcgagaagccgaaaccccgccgccgctcccgcggccaccgcaagcccggcggcccgaagcccgagggcggaggagaagtgtaaaaattgaaaatgcagagccgcctcgcaaggggcggctctttgcaaaacggagactttacgatgagtacctcaaaggaatacaagcagttcgttctggaccagctggaggagttccctgacgtgacataccgcaaaatgttcggcgagtacatggtctatctgcagggaaggcccgtcctgctcgtctgtgacaactgtgcaatggtcaaaaagctccccgagctggcggagctgatgcgcggcgcgccggacggcctgccctatgaaggggccagggtccactccgtcctcgatctggaggaccgtgagctggtgcggcaggtgatggatatcctcctgcgtgtcacgccgctgccgaagcggagaaagtgactgtgctggccgaaaaaagcctttacaaagcccggaacctgtgatatcatacgaataccctattgaatagggcaatctgcacagaggaggaaagctgtgggaacgtttcgtgtctactatgatccggcggctttggaagaactgtgcagaagaacgccgtataatctaaagaaagacctgaaaaatatagacgaacagacaaggcaggagatcgccgaggagcttgccaacgaaatttatctggggttggaccgtccaccgactgcggtctcccttcattggggcagaaagcgacaggctacctgtgctaagattagggtcgtggatgtccggcgtgacgcaggaaagtcaaatggctaccggtgcatcgtgctggtcgattatgtgcacagcagtgcgtttttgctgcacatttaccggcatgcgcatggagaagcggagaacatcagtcggagcgaccggaatcagctggacggactggtcgatgaatacgagcgctctctggaggccatacaggcagaagaaaagccataaaaacaggaaaactgtttgggaagaggtttatcatgatcgatatcaataagttgctggggtccaaaagggtcgaggtatcctttccggaaaccgctgtggacggagcttatgtaaagctgttccgggcggatcacaggctgacgcaggccgcgctggccaatatcatgggcgtgaagaaaaagaccattgaaaagtgggagcagggcgtgaataaggtcagcggcagcagtgccgtgctgctgaagctgcttcgcgatgatccggagctgatcgggcggctgtacaaggtacaggcggtttccggaaagacggagaccgacgactatacgccgatcgaccggaaggtgatcaacggaacagtgaagacagcggcaaaggtccggagaaacatctgggcggccgttttttaaggaggacagggatggaacgcagagactgcatgctgcagatggacgagctgtatttctccagctttgattttgagcaaagccgggaggacagcaacacagaatatgacgtttcgtttcatatcgaatacgcaaagaacaaaaaggactccgcaaaattccgcgtgatgatccggaccgcagtcgaaaataaaacgggcagcgtccgcatacggctggataccgtcggcatttttacgatcgaaaattttgagcttgatcgggacctgaacgagcgcatcctcaaggccaataccgtggcgatcatgttcccctatatccggagccagatctccctgctgacaacacagccggggctgcatccggtcatgctgccgccgatgaacatcaacgcgctgctggattccaccgaagaggcgtaaacgcagcagaaaagcagaacacgcgggcttctggcccagcgtgccctgctggcttttccggaatataatgggaaaaaacagccccgctcggcaagagcggggctgcgcttttacagcctgacgactgcactatacagcgagaagctgtcgctgccgtttttatcggcggcgtagaatgtgacgagtgcgcggtaggaatagttcacggggccggtgtaggtctgcgtataggtatgggtcatcacgttgtggcccagcatggcggccgtgtagcgcgaggaataggtgcggaccggggtccagctcgtcccgtttgcggactgctcgatgacgatcgtggtgacgccaatgctggtcatggaagagcctgagccggtcgtggtcttgatcgagatcgagttcgtaccgcttttggcgatcaacgcatctgagcggctgatgtaatcgctgctgcgcgcggcggccggcaggcacagcgcggctgccagcagggaaaggatcagtacaagagaaagaacgcgcttcatggatacctccgtttagtgtatggaatagacaatggagcggatcacttccgccgggaccttgccgcagaccagaccggaaacacagccgttcagccagcagatgcccgtggaagcgttgttcgtgtattggtagtacccgacgtcccccagcgtgaagtaactgacgggccgctcgtccttcacgatccagcttccctccattgcggaaggctccgcgaagatcgtgaaatccatgctgaagcctgtgccgtccggcagggagaagtaggcatagaacgagacggtaccggcgaattcgtctccgaagttatattccgacacaacggcgccctccgggacccaggacggaacgacgccggacacgccgtaggctgccagcgcgtcgtgcagctgctgcaggccctcgttgtccgtgtgatattcgccgccctgcggcaggcgccagtctgcatgcggcagagcgctgatcttgagatactcgtccgtccaggtgacataggcgttcggagcgtcgctcgcgccggtctcgacgcggggaaacagggcgaagatcaggacaaacatggctgcagcggcggacaccacgcggatcgggatgcggaggcgggtgtaggccttctgcaggtgcgcgcgggtgcggcgaaccggtgcgccgggggaatccggggtggaatagtaggcggaaaaatcctgccatgcggcggacgtgtcggccggagtcctgcggcgctcggccagaacggtcagaatgctgtcaacggtcgcctcatccagcggcgggccgtccagatcgctgcgcagaagcgtctgaagatgctcggttgataatttgcggtacagtgcgagtcgggcttcggttggttgatcggccatatgaaattcctcccttcatccctatatttcttcagaaacgcaaaacggacatgttttcggaaatttttttacttttatttggcaaaagctgcttgcagagctttttgcggatgcgctgcagccgtttctggctgctccagaccgagatgccgagctccttggcaacctccagatgcgttgctccttccagcgtgatgcggcagagcagacgatagtcctccggcggcagcagggcgcggatggcgtcgagcagctcgttgatcgagccgaacggccggtcctccacggcgagttttttgctctcctgcgcaagatcctgctcgagcgagatgaagtacagggcctccagcgcccggcggcggctgccgacgcggatcttgttcttgagcgtctccatcagccaggcctccggctttgcatggcgcatgagcgcgtcctgcttgcggacagcctcgaagaaggtctcctgcacggcctcttcggcgtaggcggcattgaaaaggaggttctcggcgtagatatacagccgttcataatttgcattgtacagcgcttccagaaaggcattggcctccatgcgcttcaccagcctttgtgcggccgcatggccgcgggatcgggttgtgcgtcgggtctgcaccgcacggctccggagcgtgatatcctgtgcggtactgcccttattatagcaggcaggttcgtgcaatgtcaatcggagcttgccaacagaatctgacaattcgacagggttctcagggcgcgagccggacgagctgctccggctcgtccgccgtcagcgtgacggtggcgcgctggacgccgttttccagcagggcgtatgttgtgccgagcggcacgccgaacaggctgcagcgggcgtttcctgccccgtcggggtagacgacggcgcggcgctcgaagccgtcgttgtccgtcagcgtgaattccagacagccctgctccccggcggcgagcgaccgctgcacgagcacggagccgaccggaacggccgtcagatggagctgctcgccgtcggaccagcacgggccggattccgcgcggacggatgcgttcggcagaagggtaaagacggcctcgcccagcgtcgtcacggcacggtagcggcccggctccagccgcgcgctgacggcgctgccgtcccggccggggatgaggcgctgcagctcctgcccggcctcgtcctgaatggtgatctcgctgatctcgccgtccgtgcagaacagcacgcgcacgagcataagcggcgcttccgtcggagcctctgcggcctgtatgtccggtgtgcgcaggctctgcgccgcgaaaacggcgctcatcaggcccatggaggcggcgatggcgaccgccatgagcagaatggcgcagcaaagccttgctgctttcttttgcatgatttttgcctccttcgataagatgccgccagtatagcgcatccgtccggagagaccgtccgaaaatcgtcgagggaaacaggtataaaaaatttcccgccgggcgatactcatgctcggaggtgctaatatgcaaaacaaggaaaacggcttcggccgctttgtgaaggagaagggctactacatagtcctgctcctttgcgcagtagcgatcggagtatcgggctatcttcttctttccggaaaaaacagcgaccagcaggtccatctgagcacggagcgcgccacggtcccaccgggcgtgcgggccacggagcacgcggaaaacgttgtggcgacggacggcccggagccgggcacggaggctacggagccgacgctgcgcctgcagccgccggtggcgggcgagcagacgggaggctttgcggcggaccatctggcctacaatgcgacgacgcgcgactggcgcacgcacgagggcctcgatctggccgcggcgctcggcgatccggtctgcgccgcggcagacgggactgtctacacgatctatgaggacgagcgctacggcacgaccgtcgtgctgcgccacagcggcggcttcacgacgcactatgccaacctcaccgaggagccggatgtcgccgtgggcgacacggtccgcgccgggcagcgcctcggcacggtcggccagacggccctgacggagacaggcgacgcgccgcatgtgcatttcgccctctataacggcaatacgccggaagacccggcagaatactggcagtgaacaaagcagaggacggccgcccggccgtcctttcgcgttccatcacccgccgcagcggcagaattgcaaaatcatgatacaaaaattgattttgcaattctggaagcagcttggcgaaaaagcccgaagggactttttgacaagctgaggacggccggtcggccgtccctcttgcacgtcgtatcggatcgcggatgggaatgcagcggcactctgccgaccgcacacgccttgtaggggagcggcatgccgctcccggcagtgtactcccgattcgtactggctgccgttaaaatggtatacaccaattgcgtctgtagcggcgctcagtgagcgccttgtgcacttacaaatcatgcagcgcaaattcattggcatgagacttccgagtttgtcattgcgaggccccgaaggggccgtggcaatctcgcagtacccggccggatcacaggaaggccgcggcgaaaacgcaactgcctgcccgagattgccacgtcggcctttggcctcctcgcaatgacaattcgggggccattaccgttttatcgtcagccggtacgaatcgtaagcgctgcgccgggagcggcatgccgctcccctacaacgcacgactggcagttttgcgtaactttccattttccattctgcattttccatttgcaccatgcctcgcccctgcgatttgcactgcattccataacaaaaaaactgccgcacccgggtgggtgcggcagcaggagagtaattttacttgctgagggccagatagcggcaggcgacagcggcagcctggcagcggagcgccgtggcggtcgggtcaaggtagttgaccttgtcgtcgtgcgtggagccgttgacgatctcggtggagacagcccagttcatggcatccttcgcccagtcggcgacggaggcggcatccgggaaggaggccagcttgtcttcctcgaccttttcggccttggccagacggtagagcatcgtggccatttcctgacgggtgatgttgtcgttcggggcgaacgtgccgtcgcccatgccgttgacgacaccggcctcggtggcccagacgacggcgttatagtaccagtcgccggtcttgacgtcggagtaggtgctctcgccggtcacgacgggggcgtaggaaacacgatagagcatcgtggcgaactcagcgcgggtcagcgtgccctgcggctcaaacgtcgtctcggtcatgccgttgacgatgccggaggcagccagctccagaacgacatcatggaaccagtcttcctcggtgacgtccgtgaacttgttctcaaagggaacgtttgtgatcttccactcggaggtgataacgggatcgatggtgccctgctccgtgatgtagtcagccagcaggttgcgggcctggcccttgtcctcgccctggatcatgtcatactgggtggagtagatgacgcggctctcgtcgttcgggacgaagttgcagccgtgctcgttgatgtactggatgaagttgccgccgccgttgaagcggtagttgttgatgacgacggtgaaggtatcggtgtcctgcacggccttgccgttgtaggtcatgttctcgatgcggtggccggagggagccgcagcgttgatctcataggagaagccctcgccggagataacgtcgtagtacgtcaggccgccctggatgctgaaggtgccgtcctcgttggccctaaccttggaggcggagtactcgagccaggtgcggacttccttgccgctcatggtgatctggtagaaccagttctcatagcggtacaggcggaacatgtcgccgagcttgatgtcacccttcgggatgaggttctcggcattgccggaggtcagcggagcggtgatggacagctgagcgggcttatcgtcggtcttgtcgtcgggggtgttcttgccggtgcggtcataagcgccccagatctggaccttgttcacgaggtcgacgaaggcggacggcgcagtgccgaggccagaggcggtgaagttgtcgcttgcggtgccgatgggcttgagcatgtactcgttccacgttgcatcctcatagggctgcagagcggcggtcagatcggcgtccggctcatagagcggcttcgtggtgcggccctcgcggacggtcatgggagcattggcggcttcgaccgtgtaggtcttcgtggccttgttgtaggtgaacagcgcgcggccgacaacaccagccttcgtgcccggggagatgacggggatctccttgccgtcggtgttggcaatcttcgtcacaccattgcgatgctcgtggccggagaacacgaggtcgatggagttcgtggtggagacaagctcacggatgaagtcggacttttcggggtcgccgtcgatgccgctgtggctgacgaggacaatgaggtcggccttggccttcatctcggcttcgtagtgcttgtaggtctccacaacgcctgcgaagtagatgcccttccagttctcggggacatcccagtttgcaatgttggggttgccgatgcccatgacagcgaccttgacgccgtcatattccttgatgacatagggagcgtagccgttccaggtcttccagtcgcgggtcttgtcgttgtttgtgttggcgtcgaggtagttcgccatggaaacaccgaccttggactcggtctcggtggactcagaggtgagatagttcagctggcgctggagaatatccatgccgtagttgaactcgtggttgccgacgacccacatatcatagtccatcatacgcatgaccttcatggcgggatcgtccacgtccttcttcatgaaggcgtagtagtacgtcagcggcgtgccctggatggtgtcgccggagtcactgaggaatacgttcttgtattccgcacgctgctgcttgacataagtggcaacgcgggtcatactctgataatgagtgccggacaggcttgcatcctgcgtgtagtccgttgcaaactgctgaccatggacgtcggaggtgtcgaggaagaggatctgaacctcattctcatcagccgcgaaaacggccggcaccagcgccgtgacaaggcacagcacaagcaacagagacacgatgcgagaaagtgctttcttcatggaaatactctccttttcgtttttacaccggaataccggtgcatctgagaatactatactccatgcgaggggaaatgtccataggggccggaaaaatcagcaaattgccaaaaaacggccgagaatgaatggaaataatataagatgaaattcatgcatggagtattgtccgctccgcagagacggctgcacggaatgtgacgtgagataaaacaaaaagctctgccgcaggggatgcccgcggcagagcttttcaaagcggaattattcggcggagatcagatagtaataaacgggctggccgccgtcgatgagcgtgacctcacactccgggcagacctcacggaacagggcagccgtctcctcggcctgaccggcgggcagatcggcgcccgcatagaccgtgacgaactcgtgcccctcctcatggaccttttcggccatgctgcggagcaggcccttcaggtcggtgctgctgccgaacagagagctgccccacagggcgaggtactcgcctgcgtggatgttatgcccgtcgatgtcggagtcacgcgcggcataggtgatctgcatcgtggtcacaccggccatggcgtccgtcatggcggagagattgtcctcctccgaggcgtccggatcaaagaccagcatggcggagacgccctgcggcacggtcttcgagggaacgacgacgacttttttctccgtcagatccaccgtctgctcggccgccatgatgatgttcttgttgttcgggaagacgaacacgacctcggcgggtgtggcgttgatcttctcgagaatatcctgcgtcgaggggttcatggtctgaccgccctcgatgatctggtcggcgcccagttcccggaacacgcctgcaagccccttgcctgcgcacacggcgaccatgccgaagtgcttctccggcgcggcgacggtctctttggcctcgagctcctgctcaatcctctcaagatcgtccgtgctgcgggcggcgcggcctgcggcaagatcgtcatgctgcatctgcatgttctcaatcttggcaagctcgagcgtgccgtatttctgcgactccgtcagggcttcgccggggatgttcgtgtggacgtggaccttgaaggattcgtcgtcctcgccgatgacgatgctgtcgccgatggtgtcaaggtaggcgcgcagcggagagaggtcaatgtcctcgtgcgccttgcgcatgatatacaccgtgtcgaaggcaaaggtgatctcgccggtgtcgaactcggtgaaatcggcctgctcgcgaacctcctgcggctgctcaccggtctcgggcgcttcaatttccacgccgcggtggacggaaagcatggcctcgagcacatacagccagcccttgccgcctgcgtccacgacgcccgccttctgcaggacggggttctggttcacggtctgcgccagcgcctccgcggcggagcggaccgtcgcctcgagaacggcctcgcagtccgcgccgctgtcggccgtttccatggccgtgtcggcggagacgcgggccacggtcaggatcgtgccctccgtgggcttcatcacggccttgtaggccgcttcgacgccgccgcgcagggccatcgccagctgctcgcccgtgcaggcctccacgcccttcagggccttggagaagccgcggaacagcagcgagaggatgacgccggagttgccgcgcgcgccgcgcagcatggccgaagccgtgatatcggcggccttcgtcagcgtgacgctgcccgccttgcgcagatcggctgccgctgcgttcagcgtcatgctcatgttcgtgccggtgtcgccgtcggggacggggaagacgttcagctcgttgatctgctgtttgtggatctcgatggaggcagcggcgctgaggatcattttctgaaaggccgctccgtcaatggtttgcctcactgtaagttacacctccgtattgccgttaatcggtcatcatggagtccaccaggatgttgacctcgcggatctcggtttcggtctgctgggagacgacatagcggacctcgttcaggatcgagctgcccagcgcggggatgttcacgccctgatcgacgatgatgtgcagatcgaccgaaatggtgccgtcttcgttcgtgcgcacgagcacgcccttggcgagcgactcgcggcggagcagatggacgaggccgtccttcatgctgcggatggccatgcccttgacgccgaagcagttcgttgcggcgctgccggcaatataggtataaacgttgttgctgacggcgatctcgccgagctcgttttgcctgcggatcatgcggaaaacctccttattgattgaaaaaaatgggatgcggcggggctgcccgccgcggggatcacagcatgctctcttcccagcaggcgggcggcgtcaggccgagcagcgtggcgacggtcggggcgacgttggccagaccgaacttgccctccttgagcgtatgctccacacccggatcatagacgatgaaggggacggggttcaggctgtgggccgtgcggatggacgtcttgcccttcttcgtttcgagcatctggtcggcattgccgtggtccgccgtgacaagcacgacgtagcccagacgcttgcctgcctcgacgatgcggccgacgccctcgtcgacgcactccatggccttcacgacggcctcgatgttgccggtgtggccgaccatatcgccgttcgggaagttgcagcgcaggaagtcatatttgccggactccatggccttgaccatgcagtcggtgatctcctttgacttcatggccggagcctgatcgaaggggatgacgtcggaggggatctcctcataggtctcgagctcctcgctgaccttgccggagcggttgccgttccagaagtaggtgacatggccgtacttctgcgtctcggacacggcgtactcgcgcagcttgtgggcgcacagcagctcggtgagcgtgttcctgatgacgggcggctggacgaggtaatgcgtcgggatcttcagatcgccgtcgtattccagcataccggcaaagtcgacgccggtgtagtcgccgcggtcgaacttgtcaaaatccttgcggtcgaaggcgagggagatctcctgcgcgcggtcgccgcggaagttatacagcacgacgctgtcgccgttggcgatggtcgccacgggctggccgttgcgctccacgacaaaggcgggcaggtcctgatcgatgcagttcgtctcggcgcggtaggtctcgatggcctccttcgcggacgggaagcggcgggcaagaccctgcacatgggtgcgccagccggcctcgaccatcggccagttggcctcgtagcggtccatggtgatctgcattctgccgccgccggaggcgatggcgtagtcgcagccctcggtgttcagctcgcggagcaggtcctcgagctgcgcgacatactcgagcgcggacgtggcaggcacgtcgcggccgtcgagcaggatgtggcagtaggcacgcttgacgccctcggcatgcgcatggcgcagcagggcgaagagatgatggatgttcgagtggacgttgccgtcggacagcaggccgaggaaatggaaggccttgccgttctcgttgcagttcgcgacgaggcccttccacgtctcggactggaacagtgcgcccgtctcgatggactcgccgacgagcttggcgccctgcgagtagatctggccgcagccgagggcattgtgaccgacctcggagttgcccatgtcgtcatcggtgggcaggccgacggccgtgccgtgcgccttgagccagttgtgcgggcaggtggcgaagaggcggtcgagattcggggtatttgcaagctttactgcgtcgccggggccgccgtcgcccttgccgacgccgtccatgatgaccaggacaacaggtttctttgtcataatatgcatcctccaatcacaagagatatctgtgctttgattgattcatgctattgtactacattttcccgtttcgtacaatctttattttcgagattctgtatcccctacaaaataaccggggcgaaaatgggggaaactgtgcgaaattcggtgctttggggcggaaaatgctcagttcagcgtatcggcgctcccggcaagcaggctctcgatcgcctgcgcgagcggtgagggcagcgggcggtcctgcgagatgagctgcgccgcggcctcctgcgcctgccgcagtacggcgaggtccgtggcaaggtcgccgacgcggaacaccggcaggccgtgctggcggctgccgaaaaagtcgccggggccgcgctgctgcaggtcggcctctgcgatgcggaagccgtcgttcgtgccgcagagcgtgcgcaggcgctggcgggtctcggggtttttattgtccgaaacgagcacgcaccaggccttcgcgctgccgcgcccgacgcgcccacgcagctggtgcagctgtgaaagaccgaagcggtcggcattctcaatgaccatgagcgtggcgttcggcacgtcgacaccgacctcgatgacggtcgtggcgacgagaatatcggcttcgcctgcggcgaacgaggtcatgacggcttctttttccgcgcccttcattttgccgtgcagcagggcgacgcgcagattcgggaacacatagtcctgcagcgtccgcgcccactgctccgcggccttgagcgtctcgccgccgtctccgccgtcgtcctcgacggccgggcagacgatgaagctctggtggccctcggctgcctgcttgcgcacgaaggcattcagccgcgcgcggtagcgctcgtcgaccaggaacgtctcgaccggctcgcggccgggcggcagctcgtcgacgacggaaacgtcgagatcgccgtagacgatcagagccagcgtgcgcgggatgggcgtggcggacagcagcagcaggtgcggttgtgtgcccttggcgcacagggcggcgcgctgggccacgccgaagcggtgctgttcgtccgcgatgaccatgccgaggcgggcaaagcgggtctgctccgtgagcagggcgtgtgtgccgatgacgacgtccgcgaggccgagctccgccgcctcgcgcgcgctgcgcttctgcgcagcgcccatctgccccgtcaggagcaccgtgcggatgccgagaccctcaaacagcggggcaaggcgatcatagtgctggcgggccaggatctccgtcggggccagcagcgcggtctgcgcgccgttttttgcagcgagacaggcagccgcggcggcgaccatcgtcttgccgctgccaacatcgccctgcacaaggcggctcatggggcggcctgtgcgcacgtcggcgcagatgtcgtccacggcacgctgctgtgcgcccgtcaggcggaaggggagggcggcaaagaacggcgtaagctccgtctgccatgccgggcaggagtgagccgtgcggcggctgcgcacgatggcaagcgcggcggaaaagagaaagaattcctcaaaaacgagcctgcgctgcgcccggcccagcgcggcggccgacgtggggcaatggatctcgcggcaggcctccgccgcgccgcacagatcatagcgccgcagaagctccggcggcagcgtctcgggcaggagcccggcgcagcgggagacggcctgcgcctgcgcgcgcagcaccatggaattcgtcagtccggccgtcagcggatagacgggcagaatgcgccgcgtgacgtgcgcggggccgtcgcacggctcgaacagcgggttcgtcatgccgtaggcggaaaaatcgccggtcagcacgccgtaaaagcagtagcgctcgccgacgcgcagcgctccggcggagtgcgcggcattgaaaaacgtcaggttcaggcggcccgtgtcgtcggccacggtgaatttcgtgacctcgagcatgcggctgccgggcttgggaatgcggttcgtgcgcggcgtggtaacaacggccgcctcaaagcaggcaggcgtgccggcctcgagcgaggcgatggaaacaaggcgcgtccggtcctcataggtgcgcggatacagccgcagcagctcaccgacagtgcggacgttcagccgggcgaacagcgcagcgcgctgtgggccgatgccgggcagggacgtgagcggggcgtcgagggtaacgggcttttccataaccggacctcctgaagtagagttgagagtggagaaaggaaagcggagagcacagggccgccggcgttgtcagtgcgagttcgtatgggccatcgctgaaacggtatgcaccaattgcgtctgtagcggcgctcattgagcgccttgcaggctgacaatacttgaggtatgtattttatggcgtgaggcccccaagtttgtcattgcgaggagcgaagcgacgtggcaatctcgggaaggcagttacgatttcgccgatggctttcccacgattcggtcgggtcctgcgagattgccacggccccgttggggcctcgcaatgacaaatttgggagcattacgcggtcgacgagggtgcacaccaacttgcagctgccaatggcgctcaccgcccgtaaagggcacgccgcatccgtagagcggcaaagccgctaacggctgcgcagtgagcgccgctacagacgcaatcggtacatgccattttaacggcagccagtacgggtcggcagtgcctgcccgagattgccacgggcgcaagcgcccttcgcaatgacaaatctggcggccctgcattccccgggagaaagcaaaagcctgatggaggtactccatcaggcggaatgatccgaatttgcttacgccatggcgttgagcttcagcgtcatgctgctcttcttgcgcgcggcgttgttcttgtgcaggatccccttcacggcagccttgtcaacggcgacaacggcggccttgtaggcagcggtggcctcctcgcggttaccggcgacgacagcgctgtcgaacttcttcagggtggtcttcagagcggacttcgccatcttgttcttcacgttggcctcgcgggacaggagcacgcgcttctttgcggacttgatgttgggcatggattccacctcctctgaatggcgtttatcgaaaacccatgtattaatctcatgcaggaatctattatagcggcgtccgcccataaaatcaatccttttttctgcttttttgcaaaaaaatttcgcctctgagcagactaagggtaagatcacaaggagaggatgtcggaaaaatggggatccggacggaccttgccatggaggcaaaggcgctctgggagaagagcgccgggaaaacgacgaagctggcgggcgttcgcgcccgcgagcgcgaacgggacggctttgccgtgacggacgtgcacattctcgaccgccggggcgaggccgcgctcggcaagcccgccgggcgctatgtcacgctggagctgccgccgctggcgcgggacgtccgcccggccgccgaggcgctggcggcggagctgcggcggctgctgcgcctgcagccggggcagggtgtgctcgtggccgggctcggaaacgaagccgtcacgccggatgccctcgggccgctgtgcctgcgcgggctgttcctgacgcgccacctcatccgccacctgccggagcagttcggcggcgtgcggccggtcagcgccgttgcgcccggcgtgctggccacaacgggcatggagagcctcgagctcgtgcgcggggccgtgcgccatgtgcgcccggcctgcgtgctggccgtcgacgcccttgcggccgctgccccggagcggctgtgccgcacgttccagctctcggacgcgggcatcgtgcccggctccggcgtgggcaacgcccgcgccgccctgcagaagcggacgctcggcgtgccggtgttctgcctcggcgtgccgacggtgctcgatgcgggcacgctcggcggaccccgcggcatgatcgtcaccccgcgcgatatcgacgcgcaggtccgctttctcgggcgcgttgcggcggacgctgtcaacctcgcgctgcacccggaaatttcctatgatgattttgcacaattcatcccaaatcgataaacgggcgttatgtcaacgccccatgcacacaatgcacacgtctttccacaggctccctgtgcagaactctgtgcacaatgtgcaaaaccccgcgccctgtcaacaacttgacctgcacaggcccatgtggaaaactccggaagaccggtgcataattgcatgaatactctgcccgcattcgcatcctgcgcaaccggatacacgggccggaacgggacttatgtcaactccgcggcgcggattttccgccgaaaagttggaaataaacggagcggctgccggttttaaggtttcctgacgagacatgaatttttgaaaattttcaaaaatcagcgatgtgccgaatttgccggaacggaaaaattggggcttgacaggagggggaaaagagagtatgagcgcggcgggaactttccgcttcccattatccatttcccacatgtctgcatagaaaacggcacgctgccgggcggcagcgtgccaatgttttaaatttccataatgaccggcaggatcatggggttgcgcttcgtgttcttgaacaggaactggctcaggtcgcccttgatcgtggacttgatcgtcgcccagtcggagatattgcggttgtggcagacctccagcgaatgcgtggcgatcatcttcatggcgtccatgaggtcctcgttgtccttcatatagacaaagccgcggctgatgatgtccgggccggacaggacggagccgtcctcgctcgagaggttgacgcacacgacgatcatgccgtcctgcgccagatgcttgcggtcgcgcagcacgacgctgccgacgtcgccgacacccgtgccgtcgacgagaatcttgcccgccgggacggtgcctgcgagcttgcacgtcttcggcgtgcactcgatgacggagccggtgtcggcaatgaggatgttcttcgggttcatgcccatctggcgcgccagcgcggcgtgcttctgcaggtggcgctgctcgccgtggaccggaatgaagaacttcggcttcgtcagcgcgtggatgatcttcagctcctcctgacaggcgtgtccggagacgtgcaggccttcaagcttgtcgtagatgacctccgctcccttgcggtacagctcgttgatgatgcgggagatggacttctcgttgcccggaatggccgaggcggagatgatgatgtggtcacccggctggatctccacctgacggtggctggagaaggccatgcggtacagggcggacatatcctcaccctgcgagccggtcgagacgatgacgagcttgtccttcgggatcgatttgatctggttcaggtcgacaagcgtgttttcggggagatggaggtaatccagctccgttgcgaccttcaggatgttctccatgctgcggcccgtgacggcgaccttgcggccgtggcggtgggcgatgttgaacacggcctggatgcggtgcatgttcgaggcgaacgtcgtgacgatgatgcggttcttgcagcccttgaagtggcggtcaagactctcggacacgacggactccgacggggtgtagccctgacgctcgacgttcgtcgagtcgcacagcagggcgtagacgccctccttgccgagcatgccgaagcggccgaggtcggtcatgccgtcctccgacgtggggtcgatcttgaagtcgcccgtcatgataacggtgccgaccggcgtatggatggcaaaggccacggcgtcggcaatggaatggttcacatggatgaactccacggagaagcagcccgcctttacgacgtcgccggggtgatgggtcacgagctgcgtcttgctcacaaggtcgtgctcctcgagcttgagcttgatgaggcccagcgtcagcggcgtggcgtgcacgggggcattgacggcctgcagcacatacggcagcgcgccgatgtggtcctcgtggccgtgggtgatgaagaagccgcggagcttcttctggtttttcgcaagataggtgacgtccggaatgacaaggtccacgccgtacatgtcgtcctcggggaagccgaggccgcagtcgatgacgatcatgtccttgccgtattccagcacggtcatgttcttgccgatctcattcaatccgccgagcggaatgatcttcagtttttctgccaataaaattacaactcctttaatgataaaaacacaagcatgccgaagaactgtgatgttgtgtcattccgaggagcgaagcggcgtgggaatctcgggaaaatgtttcgaattcgccggaatctatcgaaagatcaaaaatgacgctgcgagattgccacggccccttgcggggcctcgcaatgacaaaacagggtccttcgacccaaaatcgcagcacagctgcgatgaaaaaacgagcccgcccgcctctgcgggtgcggaagaccggaaaatgggtaagctcggtctgcggcctgtgcaaaaacgcacaggtcaggcagaatgcggccggacggggcagctcagcgccatgcagacgcgacggaaaacgaaacgagcagccgtacccgggaaaagacggagcatcggccggacctgtgacgaaaccgcttcgtgcttgcccggagacgccccgccgcgaggcgggaaaactgtgaggcagaccacacgccgcctcacgactctgcaggtagtatagcacaaaaccggcgcgttgtatacctttttttcggatgcgcgccgttgggacggattttttcgatgaaacggaggaaaatccagttgagaatatggtgtgaatttggtataataaacgaatcgcaggaaacgaacggcccgtgcgggccgccgggaggggagatcgcagatgaataaaaagcttcgccgcctgatgcagccaaatctggcgctgttcttcgtcgtcatggcgctgttctgcgccgccgccgtcgcgctgcaggaatatattctggccgtggccgagggctgcgccacactgctgctgctcggctgctaccagtggctcagcgtgcgccgccgccgcgcgcttgcggactatgtgcaggccacgagcgagatgctccagcatacgtcggacggcgagatgccgttccccgtggcccttgtcaagctgaacgacaacgagctcgtctggtataaccgcgcgttcgcagaactgacgcatgtgcgcgagcgcatgagcgcgcaatctctgagcgaggtcatcccgggcctttccgccgactttctggccgcaggaaagcaggaggccgcggcggagctccgctttgaggggcggcgctaccgcgtcagcggcacggtcatgccggatgcggacccgaagtccggcgtcatgctcggcatgctctatctgcttgatctgacggatctgctgctcgtgcgcgatgaatacatccgctcccgccccatcgtgtccatcgttctggtggacaactatgacgagctgacgaacaatatgccggacgtcagcatctccgccctgaatgcccagctgaactcacgcatcagcgattgggccgattccttcggcggcatgctccgcaagctcgagcgcaaccgctttctgctgctgtttgaggccaaggatctggcccgcatggcagacggcaagttctcgctgctcgagagcgtccgctccgtcaccagcccgaccggcatcccggccacggtgtccatcggcatcggcaaggacggcgtggatttccgcgaggactacgattttgccgccctatccattgaaatggcgctgtcccgcggcggcgatcaggccgtcatcaaggaccgctatgacttcacgttcttcggcgggcgcacgaagcagaccgagcgccgcacgaaggtcaaatcccgtgtgatggcctcgtccctttccgagcttatcacacagtcgagccgcgtgttcatcatgggccataaaatggccgatctcgatgcgcttggcgcggcagcgggcgttgcgtgcctgtgccgcaagaagggcaagaaggccaacatcgtcatggacccggacgccaacgcctgcggccagctgctggcacagctgcagccgcttgcggagtatcacgaccttttcctgacggggcaggaggctctgctcgcggccgatccgaagagcctgctcgtcgtcgtcgacacaaacaggcccgatcaggtcgaatgcaagccgctgctcgaatccatccgccgcatcgtcgtcatcgaccaccatcgccgcgctgcggattatatcgatcaggccgtgctcaacatgcatgagccattcgcctcgtccgcctcggagcttgtgacggagctgctgcagtacgccgtggacgccacggacatcctgccgcaggaggcagcggcgctgctggcgggtatcgtgctcgacacgaagaacttcggcgtgcgcacgtcgagccgcacgtttgaggcggcggccttcctgcgccgcatcggcgcggacaccgtggcggtgaaaaagctgtttcagaacgacctttccgccaccgttgcgcgctataggatcattcagaacgcccggctctatcgcggcagcatcgccatcgcggcgctggactataccgtcacgcgcacgcttgcggcgcaggccgccgatgagctgctcaatatctccggcattgatacgtcgttcgtgctctatccgcaggacggcgtgacctacatttccgcccgctcgctcggcgatgcgaacgtgcaggtcatcctcgagccgctgggcggcggcggcaacgccgcaacggcgggcgcgcaggtgaagaaccacaccgtgcagcagacgctcgacgagcttctgcagtccatcaacaaattctacgagtcctgaggcaggacccggaccggaaaacaggaggaatttccatgaaagtgattttacagcaggatatccgcggcaagggcaagcgcggccagatgatcgaggtctccgacggctacgcccgcaactacatgctgccgcgcaagctggccgttgaggcaacggccgataacgtcaacaccatgcgcatgaacgacaaggccatgcaggaaaagcgccagcgcgagcgcgaggaggccagcgccatcgccgcgcgcatgcgcgacctgaccgtgaccgtctttgccaagggcggcggcgccggacgtctgttcggctccgtcacgacgcaggagatcgccgacgcgctcaagcagagctgcggcattgagctcgaccgccgcaagctcgtgctcgacgagccgatcaagacgacgggcatctataccgtccgctgcaagctcggctatgagatcacggccgatcttcgtgtggagatcaaggagcagtaacaccaaggaggaagcaccatgcccatggaagacctgctgacaaggcaggcgccgcattcgcaggaggccgagcagtccgtcctcggctccatgctcattgacagccgctgcatcagcgacgtcgtcggcgtcgtccgcccggaggacttttacctgcaggcgaaccgcgagatctatgagacgatgtacgagatgttcagctattcggaggtcatcgacccggtcaccgtgctcgataaaatgcgcgcccggggcgtttataacgaagaaagctccacaaaatatctcatgcagctcatggagatcacgccgacggccgcgaacgtcaagcgctatgcgcagatcgtccatgacaaggcgctgctgcgcaatctgtccgaggcggcctccggcatcgtcgagacggtctacgagggcgtcggctcggcgcaggagattctggaagcagcggaaaagcgcatctatgccctgcggcgcggcaacacgaacgagtcgctcgagcacatcggcacggtgctgctgaaggtcttcgaccgcctgaaggagctgtcggagtccggcagcgacatttcgggcctgtccaccggccttcgcgaccttgacaagttcatcaacggcctgaaccgctccgacctcgtgctgctggcggcccgacccggcatgggcaagacgtccatggcgctgaacgttgcgctgaacgtcgcgaaaaagaacccgcagaagaccgtggcgtttttctcgctcgaaatgtcgaaggagcagctcgtcacgcgcctgatctccaacgagagctttgtggacaacaagaagctcgtcacgggccagctgtccatggaggagtggagcaagatcggcatcgcggccacggccctttcgcagacggacatccgcgtggacgacaatccgtcgctgagcgtcgcggagatgaacgccaagtgccgccgcctcgataatctctgccttgttatcatcgactatctccagctcatggtcagcgcgggcggccggacctacagcggcgaaaaccgccagcaggtcgtttcggacatctcgcgctcgctgaagatcatggccaaggagctgaacgtgcccgtgctgtgcctgtcgcagctgtcccgtgcgaacgagagccgccaggacaagcgcccgctgctgtccgatctgcgcgaatccggcgccatcgagcaggatgcggacgaggttatgttcctctaccgcgaggactattataataaggatacgccggagcagaacgtcgccgagtgcatcgtggccaagaaccgccacggcgagaccggtacggtcaagctccagtggctgccgcagtttacgaccttcgccgaccgggagtggcgtcacgatgagggctgaggtcctttcctggtgccgccgggaggcgctgttttcccccggcgcgcaggtcgtgtgcgccgtttccggcggggcggattccatggcaatgctctgctgcctgcgcgagctggcggcggagctttccgtctatgtgcgggcggcgcacttcaaccaccgcctgcgcggggcggagtccgacggcgacgaggcctttgtgcgcgcgttctgcgcggccgagggcatcgagctcgtctgcggcgcgccggaaaagcccgcccgcagcgaggaagaggcgcgggagcagcgctatgccttcctcgattccatcccgtgcgacgccgttgccatcgctcacacggccgaggacaatctcgagacgctgctgcagcatctgctgcgcggcagcgggctgcggggcctcggcggcatcccgccgcgccgtgggcgctatgtgcggccgctgctggccgtttcccatgcgcaggcgcgggaatatctgcgcgcgcggggcacgggctggcgcgaggatgcgacgaacgcggaggacagctgccagcgcaaccgcctgcgccacggcgtgctgcccctgctggcggccgagatgccggagctgccgctgcgcgtcacggagctgacggcccttgtgcgggcggacgatgcccttttggaccgcgaggcggagcggctgctgctgcccgcgccggagccgctgttttccgacccgtgcgtgctgcgtagggtgcggctcgcgccgctgcgcgaggccccggagccgctgcagcgccgggcgctgcgctgcctgctgcgtgaggccctgccgcaggatgcggcccttgtccacatccgggcgctgcaggccctgctcgaaaatcctgcccccgctgcccgggccgatctgcccggccgtctgacggtccggcggagctatgacgcgctggagcttgtccgcggcacgctgccggtgttccggcccgttccgctggcgcagacggtgcactttcctgcgctcggcttgcgggccgtctgcacgcttgcagaaaaaaacgaaaaaattcaaaatacccctttcacttttgcgctgaaatatgataagatgatcgggagaattcccgtttttcgcccgcggaaaacgggcgacaggctcacgctgccggacggccgctgcgtgacgctgaaaaagctctttctggatcgccgcctgccgcagccggttcgggaccgtgtcccggtgctcgagctggacggacaggtgatcgcagtggtgggcttcggcgcggatccgcgctggacggcccgtgacggagagcaggctgtaatcctacgaatagagaaagaggaaatgtgacatgcaccaggacattgaacgcgtactcatcagtgagcaggagcttgccgcccgcattgccgagctgggcaaacaggtcgcggcggactatgccgataaggatcccattttcctgggcatcctgaagggcgtcgtgatgtttttttcggacatgatccgtgcaacgccgatccagtgccagatcgacttcatggccgtgtcgtcctacggcggcggcacgagcacgagcggcaaggtcaagatgctcaaggatgtgtccgtggatctgcgcggccgccatgtcgtcattctggaggatattctggactccggtgtgacgctcagccatgtctgtgcgcacctgcgggagatgggcccggcttccctgaagatctgcaccctgctcgacaagccctcgcgccgccagacggacgtcaaggcggactatgtcggcttcacgatcccgaacgaatttgtcgtcggctatggcctcgactatgacgagcactaccgcaacctgccgtatgtcggcatcctgaagccggaagtctacacgaaataaaaggagctgggagcttgaaaaaccgttccagactgctcactgttctgctgtatatcgtggtgtttgccgtggctgtcgtgctcatttcggaggtgttcttccgggatgacacggcctatgtgaactacagcaccgtctgcgagcagttccgcagcgaaaatgtccgttcctttgagtatgacaacggtgtgctgacgctcgagctgcgcaagccctatcagaacgaggcgtattccgtcagccacaagctggcagacctcggcctgttctatgaggatctggggaccctgatcgcagagcagcaggagagcggtgttctgcagtcttataactatgtacccatgcgccagacaccgtggtatgtgcgtatgctgccggagatgctcctgtcggtcatcatgatcgcgctcgtctacatggtgctcatgcgcaacagcggcggcatgatgaagttcggccacgccaatgcccgcgtgggcagcggccgcgacaaggtgatgttcagcgacgtcgccggagcggacgaggaaaaggccgagctgcaggagatcgtcgatttcctgcgcgatcccgcaaaataccgccgcatcggcgcgcgtattcccaagggcgtgctgctcgtcggccctccgggcacgggcaagacgctgctggcccgcgccgtggcaggcgaggcgaatgtgcagttcctttccatttccggttcggattttgtggagctgtatgtcggcatcggcgcgagccgcgttcgcgacctgtttgagcaggccaagcgcagtgcccctgccattattttcatcgatgagatcgacgccgtcggccgccgccgcggcgccggtatgggcggcggccacgacgagcgcgagcagacgctcaaccagctccttgtggagatggacggcttcggcagcaatgacggcgtcatcgttatggcggcgacgaaccgccgcgacattctcgaccccgccctgctgcgcccgggccgctttgaccgccagatctatgtgaacgtgcccgacgtcggcggccgcgaggccatcctgcgcgtccatgcgcgcgacaagcagctctccgatgacgtcgacctgcgcaccgtcgcccgcgcgacggcgggcttcaccggcgcggatctggagaacctgctcaacgaggcggcactgatttcggcacggaagaacctgcccgtcattacgatgcagaccatggaggacgccgtcctcaaggtcattgccgggccggagaagcggagccttgtcaatatcgagcgcgaccggcgcatcacggccatccacgaggcgggccacgccgttgcggcatacttcctgtccacgcaggagcctgtccaccagatcaccattgtgccgcgcggcaatgccctcggcctgacgatcagcctgccggatcaggacacgctccataccacgcgaaacgagatgcgcgaccgcatcgtcgtgctcctcggcggccgcgtggcggagcagctggagtttgacgacatctcgaccggcgcttcgaacgatctgcagcgggccacgaagctggcgcacgatatgatcgcaaaatacggtatgaacgagcgcatcggcgccgtggcctatgacgacgacagcgagatcttcgtcggccgcgactatgagcgcacgcgttcctattccgagcagacggctgccgagatcgacgccgaggtccgcaagaccgtggatcaggcttatgcgcactgcacgcagatcctgacggagcaccacgagaagctgcaggagatcgcgcaatggctgctggagcacgagacgatgagccgcagccagttcgaggcctgcatgcaggccctgccgatccccgagaagcaggagggcctgctggccggagaggagaagaccgatggagccgaagaagattaaaaacccgaccggcatgctcatcatgcacggaacggtcattgccgttgtgctgtatatggcctggcagctcgtgcgcagctatcgcgcgggcggggcggaggccccgagcctgacgaccctgatcgtcggcctcgtgctgctggtcggcggctgtgtcgtcgtcggctggcttgccgtgcggcttttcctgcaggcaaagcgcgagggaaaggcgctggagcaggagaccgagcagctgcatgccgcagctgcgcaggagaatttgaaggctccggagaattcggaagaataacggaagtgctctgctgcgcataacggcagagcgctttcttgtaggacggggggatagccatgggctggaagatcgcgatctgtgacgacgacgccggacaggccgcacggctgcaggcggacgtgacggactgggcgcacggtgcctgcgccgtgacctgcttcccgagcgcggaggcgttccgcttcgccggagataccgactgggatatcctgctgctggatgttgaaatgcccggcatgagcggcatcgatcttgccaagcgcctgcgcggcgcgggctgccgggcggagatcatctttatcacgtcgcattttgagtgcatggccgagggctatgaggtcgatgccctgcactatctcgtcaagcccgtgccggcggaaaagcttcgcgccgtgctggaccgcgccgccgcgcggctggccgtcgagccgccgtccgtcgtgatcgcgtgcgagaaggggaatgtgaagctctatgagagcgagcttttgtatgcggagtccttcctgcatgatctcgttctccacacgaccgggccggactaccgcatccgcgagagcatctcggcctttgccgggcggctgagcgcggacttcttccgcacgcaccggtcgtacctcgtcaatctgaaggccgtggtgcgcatcgggcgcacgtccgtcctgctgcgcggcggggcggaggtcccgctggcgcggggaaagtatgacgccatcaaccgggcgttcattgacagaaactgaggaccgcagaaacagaggaaatgccatgttgaagagaacctatctcaggctggtcgaaatgcaggaggagcaggcgcggcagcatctggaggaggtccggagcatccataacgagatgcgcggctataagcacgacttccaccaccatctgcaggcgctcaagggccagctggaggccgggcaggtcgaacgggccatcgcctacctcgagcagctggaccggagcctgcagacggtcgataccctgctcaagaccggcaatgtgaccgtcgatgccattctttcggccaagctcgcgcaggcccgcgccgccgggatcgccgtgacggcggaggccaatctgccgccggagctgtcgctcaccgatctggagctgagcatcgtcatcgggaatctgctggacaatgccatcgagggctgccggagcgcggctggcgaaaaattcctccgcctttctctgcggatgaagggcgatatgctctatttctatcttctcaacagcgccgggaagaagcagaagaaggttggctccctcttccggacggggaagaccggtgcacacggcttcggcctgcaccgggcagaggccattgtgaagcagcatggcggctgggtgaaatacaacagcgaggacggcgcgttcacgtcggaattcctcgtccccgccgcgtgctgaatgcgattcgtgcaccgctggaagcagttggtgcacgatctctcttttttggggccttgtgtgctacagtggaagcggaagggggcgatatgccttgaaggaatcaacccaaaagccctatcggggtcttatgagcaacgccgtgtggagctatcggcagatgctccgcggaacgcctgcgtcattctttgtcatggcggccggcgtcccgctgggcgtgcttctggcttgggcggagcttcgcctgcccgcgctcgtcgtgtcggaggtgacgggaggacagacgttcctccatgccgcactggccgccggcgccctgctcgtgctcacatttctggcagtcggcctgcgggatttctgcaagaccatcctggaggcccaggagagccgctaccgcttttatctgaccagctgcctggaggagaagagcatggcgatgttctatcagacctatgagaaaaagcagacgcgagaccagcgcaagcgggccgaggaagcaagctatatgatgaacggcaaggtgccgctgtgtcaggtccctaacctgatgacggagctgatccgcaatgccctgtgctatgccctgttcggcacgatcctctcgcgcatcagtccactgctgttggtgctgctgacgcttgcggcactggtcaacctgctgtgcgtccgggcctataaccgctatgaatacgcctcccgcggggagcggacggacattggccggaggctgcggtatgtgtctaaaaatgctgccgattttgcggcggccaaggatatccgcatctacggcatggcgacatggctgcgcgagacgttttcagacctgttccggcaggataccgcgtggtccgcacggctgaaccgccgtctgtttctggggcggctcgtcgacctgctggtgatcctgctgcgcgacggcggggcctatgccctgctgctcgtcatggcggtgcggggcgagctgcggccggacgaattcgtgctgtatttttccgccatctccggctttgccacgtttatcggcaacatgatctccgcctggaacgaaatgcagaccgccagcctgaaggtcagcgattaccggcagtttatggagctgccggacacggacggaacgggaacggcgcatgcggcggaccaccgggagcacgcaccggagatcacgttcgaccatgtatcattccgctatgacggggcggcacatgacacgctgcacgatatcagtcttacgctccgtgccggggagcatgtggcgcttgttggcctgaacggcgcgggcaaaacgacactcgtcaagctcctgtgcgggctgtatgcgccgacatccggcacgatccggatcgacggcgtccccgcggcggagttccgccgggacgactatgcggcgctgttcgctccggtgtttcaggaggtccgcacggcctgcttttcgctggccgagacggccgcctgcgccttcggccctgaggtggaccgggagcgggcggagcggtgcctgcgcgcggccgggctgggagaaaagctggataccctgccgcacggcatggatacgcacctggataaacaggtgaatccggacggcattgagctgtccggcggcgaggcgcagaagctcatgatggcccgcgccctgtataaggacgcaccggtgctcgtgctcgacgagccgacggcggcgctcgaccccattgcggagaatgaggtctatgagcagtaccggcgcatggcggcagggaagacatccctgttcatctcgcaccggctggcctcgacccgcttctgcgaccggatcgtgctgctgcgcgacggcggcatcgccgaggagggcacgcacgaaacgctccttgcggcgggcggaaaatatgcaaggctgtatgaaattcagagctgctggtatcagcccggctatcagggagggaagcaggcatgaaagaacgttgggatctgaaccgccgcgcggtccggctgctgtatcatctggaccggaaatacttcctctgtaccctgttttccagcctgacgactgcgatcgcgccctatatcccgatctatttttcggctaagatcatcgatgccctgacggccggtgcgggcggaaagacgcttgccctgtatgctgcgctcaccgtcggcctgacggcccttgtcgggctggcaggcgccctgctgaaaatgcatgcggacgtcggcgaggccgagctggaccggctggttgactggaagcatgcggaaaaggccatggatctgccctatgccctgatcgaggaccgcaagacggccctgctccgggaacggatcgagatggagacgcagacaggctataatgtgtattactatgctgtgacggcgggcggccttgtccgctatgcggtgcagatcgcggccgccgtcctgctgacattctccctgttccggcccggcctgctctccgccggggcaaaactggcgctgctggcgggcatcgtgctgacggccgtggtcagcgttttgaccggccgccggtacggcagactgcgcagcgagttctttgccggatgtgtggacgacaacatccgcggcgaaaagctgtatgattacaccagcaatgattcctccggtaaggatattcgtctgtacggtatgcgggccgcactgctgcagaaggagcgggactttaacgaaaacttctgcaggcgggagagaaccatgaatttcggtgttgcgtggatggggctcctctccatttttgtgacgtatgcgctccagttcggtgtctatctgctcctgatcgcggcggcgctgcggggcggcctgtccgtcggctccatcgcgcggtatgtctcttccatcatgctgctgctggcgggcgtctccgggctggcgcgcacgattcggatttccgtcacgaacgaggaatacatgaagcgctatctcgactacttcgatatcccaaaccccatgtatcagggctcgctcagtgtggaaaagcgcgatgacgatcgctatgaggtggaattccgcgatgtgtcctttcgctatcccaacacggaggcctatgcgctgcgccatgtgagcatgaagttccgcatcggcgaaaagctggccgtcgtcggccgcaacggcagcggtaagacgacgttcatcaagctgctgtgcaggctctatgacccgacggagggcgagatcctgctcaacggcgttgatatccgaaaatatgactatgcggagtatcaggcgctgttctccgttgtgtttcaggacttccgcctgttcgctttctccctcgggcagaatgtgacggccggagcagatgttgaccgcgcgcgggcggaggcctgcctgcgggaggccgggctcggcgaacgccttttgcgcatgccggacggcctcgacacgatgctttaccgcgattttgacccgcatggcgtggtgatctccggcggcgaggcacagaagatcgccatcgcccgcgcactttacaagaatgcgcccttcctcgtgctcgacgagccgacggcagcgcttgaccccgtttccgaatatgaggtctaccggaagttcaatgcgatctccggcggcaagacggcgctctatatcagccaccggctggcctcgtgccgcttctgcgatgaaattctggtgttctcggcgggcagcatcgtccagcatggcgcgcatgaggcgcttctgcaggaaaaaagcggagaatatgcccgcctctggcacgcgcaggcgcagtattatgacgattctttacagaaaaagaatcctgtaaaatagctgaaaaacggatgaatatgaacggactgtgaacaaacatcgtgcattgtgtgaatattagcactctcctattgacagtgctaaaaacggtggtataatgcagttgaaccttgagagaggggacagaaacccaccccccaagggaacaaaaccacaaccacattgggtacataatacaggcccggctgcacgggagcctctcccggaggcggccggagcgaatggaggtatgacttatgctgcccagcatctatagtgaaaatttgtttgatgatttcttctcggatccgtttgatatggtaatgccgcgtagcctcaatgccctgtacggcaagcatggcaagaacctcatgaagaccgacgtccgtgagaccgaggacacctatgagcttgacatcgacctgccgggcttcaagaaggacgaagtgaatctggagctgaaggacggttatctcaccattcaggccgcaaagggtctggacaaggaggagccggagaagaagggtaagtacatccgtcaggagcgttacgccggtgcgtgcagccgcagcttctatgtcggtgagcatgtggagccggaggacatccgcgcgaagttcgaaaacggcatcctgcagatctctctgccgaaggccgcaaagaagcagctcccgaagagcaatgtcattgccatcgagtaacggtatatcccatatcccgcaggggtcttccctgcgggatattttttgcagcggcactttgcgattgcgcacggaagcctcgcagagtttgcgctcgcaagcgcaaagaaagtaggaatcattttctccggcggcgtgtacgtcggagaaaataccgctcgactcgcaaacgtgcgaagggtgcgcccttcgtacgctgcagcgagccgcagccctttcaaacgagagcccagtgaaacgggtctcgtttgagagcttggcaaaaatccttttttgacaagctcataccccgccggggttttccctgcgggatatttttatgcccgtatagccgaatcaaaatgctgcgcatatgctggcaggaggtgagtgcgatgatccacaccgttttgccgggagagacgctgcgcggcatcgctgcgatgcacgggaccggaccggacctgcttgccgtgtggaacgggacggcggagcccttgaccgggcaggagctgctcgtgctgcatccgcaggcgctgcacaccgtccggcgcggcgagagctggcagagcctgtctgcgcgcttcggcctgccggagctgcgccgctgcaatcccgggccgctccggccggggcggcggctcgtgctgggcttccgggagcgcggcacgcggccgctggcgctgtgcggcacgatggggccggaatggaacgatctggggctttcctatacatgtgagctggcggcggacgctgcggagcttgacggcgacggcgcgctgcatcgcctgccgctgcatggccgcccggcctgcctgcgcctcacgggaagcggagcaaagctggaaaccctgctccgcagccgggccgcgcaggagcgccttctgctcgagacggctgcactctgccgcgcgcatggcacggcgcaggtcgagctggcggtccgtgatctgctgccggactgcgatccagctccgttggtctcccggctgcaggcgcttctggcggagcggggcggaggactgacgctggacctgccgcggcccggcgcgctcggctgggaggccccgatgctggctcggctggctgccgctgccgggcgggtgcgcgctgcgcccggtcttccggggctgccgccggaaaaattactggcggactatgacgatgcggcgtgcgaccgctgcggccttcggacggagcggctcagccggggcgaggcgctggccctggcccggcggaccggagcctgcctgcactatgacgctgcgaagcacctgacgtgcttttcctaccgcgatgagacgggcacgccgcacacggtgcgctttgcgggcctgcgcagctggatggagcgcctgcgcgcgctggagcaggcgggcgtcgcggctctggcgctccgcgccccggatccggccctttgcctgctgctgcatacgcagttccggctacggtaaaaatacggtgaaaaggtgaaaaaatgtagcgtcgctcactgagcgacgctacgaaaatatcattcgttgtttgtgattttaacggcagcctgtgcgaatggggcgcgcagggaacgccttgcggaggacgcttcaacggtaaaagggcattgatactcgccgcgcatcctgatgtgtcattgcgaggagcgaagcgacgtggcaatctcatgcagcatcccgtgaatccgccgaggctgccccacgatattgtccactttccattttcaacctgccgcgcggccgcttacaacggcgtacccgcttcttcttccggcggcctgcggcacagggcggcaagctcggcaaagcgggcgcagatgcggtcgtagttctccgggcggtgggggaacaggcaggcggagcagtccttgatgccgctttctgtgtactgcaggccgccgccgcagcgctcgccgagggcgtagagcgggcagaagcagaacagacagttgaagtgctccggatcgttcgtcttgtggcacggaaaatattcgcattcccggttctgaaagaatttatagtgctcgctcatggtctcctcccgaccgggtccccggtctttaccttgctttcgatgccgcgggccgaccatttggcgatatccgcggcgggttcgaacttcccatgctccagcagcaggatgacggtcgagccgccgtattcaaaatagcccttctcctgcaggcgcgcgcaggcggcagcgccggtctcgtggttgcagatgcggccgacgagcatggctccgacctccatctgcacgacatcgccgaagtgcttcgtgtgcagcagcgtgcgggcgcgggcattgcggcggtagacacccagtgagcctgcgatcggattgacgctgtgcagcacgccggggatgcggaccgtcggctcctgcgtgccggtgtccgggtaggcatagcggtggtaatcatccggcgacaggcggaagatcaggcaccagccgccgagaaaacgctctgccagtgcctcgtccgccagcagctcgccgaggcggtaggagacatccttcacggtaaagacgctgtcctcgccgatgggcagggctgtcagcttggagtctgcgatggcgggaagctcgtccggcgcggcgcggtcgtccgtatgcctgcgctgccgggtgaagaaatcgttgaagcaccggaacgtctgctgcgtgcagtccgagacgtcaatatcatactgcgccagaaaccggcgcaccttcccgcgggaaagcgggcttttctgccatgcggcatagagctgcgagacaaagcggcggcagagaatgccgcgggcgagcaggcggccgaacgccgtgccgtagacaaagtgcatggcgcccgcgccgacctccggctcctgcgtcagcgcgccctgcgcgcggttccagacctcccgcatggcgctcacagcagggtgcgcagcgcgtcgatgacggaggctacgctgccctcggcgctcggcgcagcatcgcggaagtcatagcggcgcatgcccgggtcgcagtcgcctgtgcggaagccgtaatctgcggcctgcagcatggcgaggtcgttcggtgcgtcgccgacgcagacaagaatgctgcggccgagcgtgtcggccagacggcgggcggcagtgcccttgtcgcagccgcccgcgctgatctccatattgcgcggcagcgcgcgggtgatagcatagcgatttccgacgagtccggccgtgtagcgctgcagctcgtcaaaataggcgatctcctccggcggggtgttggccgggtcgtcatagcccacctgcttcgacgtgccatagacggccagcttgatccacggcttcggcggcagggcagcttcgtgctgtaccggcacgccgttggcagccagcgcggcatcccggcgcggatcgtcgccgtaggcatagtggcagtcgagcgtctgcacctcggtacgctcgttcggacagtggtcgcgcagagcctgcagcagctgcggggcgtcgtccgcgagcgggaaggcaaacagcagctcgtccgtgcggtaatcgtagcacgcgccgccgttatagagaatgcacggcgcattcaccggcacgagtgcggccttcttgcggaacatcggaatgctccggccgctggccacggtgaaaatgccgccctcggcctgaaaagcggcgatggcctcgagattgcgggcggggatctgcccggacatatccgtcagcgtatggtcaaagtcactggcaagcaggacgttggaaaatctacccatgctgttcctccgtaaacgatgtgatataaattcattataccatatcctgataggtgcggcaagccgccaatttttgcgcggaagttgcatttttcgcggttttgtgttatcgttatgcagatgaaaagaaaaagaatgggggagattgccttgcggcgattttttcttgccgttttctgcgcgctggcgttgagcctgagtgcgctggcggcggacgcggcgctgccgtcgctcgaggcggcggtcaacgtccgggaggacggcgtgtgcgaggtcacgatgacggcggaggtggatttttccgccgcgcaggacagcctgctcatcccgctcgggacggacgcgcgtgacatcacgctggccgggtggagctatgaaacggtcctgcaggatggcgtgacctgcctgaagctgagcaatcctgccggcttcagcggcaagcagcagttcacctgcagctatacgctgccgtgccgtgcggccgaggccgcagacggccagcagttccgcctgagcctgcccgagacgggctgggactatgccattgacagctattccctgaccatgacgtttccggcacaggtcacgaacgcgccggagtggacgagcggctactacggcgacgtggtggacaactatctcgacatccgcacgcaggaaaataccgtgacggcgaagtccacggccgccatgcgcgatcatgagacgctgaccgttgcggtgcagttcccggcggatacgttcaatctgcgcgaccagcccggcaagacggccgggttcgaccgcatcgcctttctggtgctgctggcggcggccgtggcgttctggttcctgcgcctgcgcagcgggctgatcctcccgcgcgcgcagcagaccatcggcatggagtccacggcgggtgagatcccctgccagctcctcggcgaagcgccggacgctgcgggcatgatcgtccattggggcaacctcggctatctgaccgtgcggatgtcgcgcggacgggtgatcctctataagcgcatggagatgggcaacgagcgcaagccctcggagcggcgcttctttgccgcgctgttccgcgcgggcgcttcgtgtgaggcgggcggcctgcgctaccaggctgccgtgcgcgagatgcaggctccgatcctgacgggctggcggcggcgaatgttcacgggcggaaacccgcttgtgctgcgcctgctcggcgcagcggcaggcctgtttgcctcgcttctgacgtttgaccgccttctgcctgcgacgggctcacgctgggtctggctgccggtgctgacggcgctgggtacggcggcctgcgtgctcgtgcagcggggcgtgggttccctgttccgccgccgccgtgcgctggccttggcgctgggcggcctcagtgcgatcgcacttgtgatcttcggcgtactggcgggctctctgccgtatcagctcctgagtctgctgctgcaggtcttctgcgcgggtgccaccctgttcggcggccggaggacggcagcgggcgaggagcgcctgcgccgcctgctcggtctgcggcgctatctgtgccgggcagacagtgcctccctgcagcgcttgacgctgcaggatccacagtatttctaccggatgctcccgttcgcggaggagatgggcgtcggcgggcgcttcgtccgctgcgcggccggtctggagctggagccctgcctctggctggagggcgcggccccgcgccgcgccggggacttcttcgcccggtatgccgccgtctgcgcccgtctgcgcggagaggacggcagagcgtctgccgttccgcgccgcccggctccgcggcccgcagcccgtacagcctcccgtcctgcgccgcagcgccgcacgccgccgtttgccgcgccggagccgcagcggccgccgatgcgcccgcaccgcagagaggagtatgatccggatgaagtctgaggaataccgcttttacgcgctcgtatcccgcatgcgctatatcacgcgctggggcctgatgcgcaacaccttttccgaaaacgtgcaggagcacagccacatggtcgccgtgctggcccacgggctggcgctcatccggcgcgacatcctcggccttccggccgatccggagcgctgcgccacggcggcgctgttccacgatgcctccgaaattctgacgggcgacctgccgacgccggtgaagtattataaccccgatatccgcgcggcctataagcaggtggagcgcgtgagtgcggataagctgctcgagctgctgcccgaggccctgcgcccgagctatgctccgctcgtgcgggagtccgaccccacggtgcacgacatcgtcaaggcggcggacaagctctcggcgcacatcaagtgcatcgaggagctgcgcgcgggaaatcaggaatttgcctcggcagccgagcagacaaggcaggccctgacggacatgcacctgccggagctggactggtttctggagcactgtctggacagctttggaaaaaatctcgatcaattggaataatattcactgcacttctgaggctccctgccgggaaactggcggggagcctttttgaaagcccttacatagtaattttacagaatattcctctgtgattttgcacaaattcgaaaaacagaaattgtgaccttcgacaaagttatacaggaccccttgacaatggggcaaaacagcggtattctagcaccagaaattgaagtaagcgtttacattttcagtcaggcacagcggatgcctgaccggcagcgacctcccggaagcgggacagcgatgcgctgctttttttgagcggatgtctgtaagcccttacaactcccaaaattctgggaattccggagcttgggagcggaaaagcggcacaggacggtgaggggaatgggaaagcaggaagccaatatctacgagatcgccagagaggccggtgtctccatcgcaacggtctcgcgcgtcatcaatcacagcaacgcggtcagcgagaagagctaccgccgcgtgatggatgccgtccgcaagttcaactacgtccccaacagcacggcccgttcgctcagcacctcgacctcgacgtccatcggcgtcgtcatcccggatatcaacaacccgttcttctccctgctgctcgagggcatcacccgcgtggccgatgagcggggctatcacgttctgctgttcaacaccgcagaaaatacggaccgcgagcatcaggtcctgcagaccatgcgcgagcaccgcctgcgcggcatcatcatcacgccggtctccgagcaggaccctgatacgatgaagcggctccacaattttgagacactcggcatccccgtggtgctgctcgaccgtgaggtcgacagtcagttcttcgaccgtgtcgtcacggacgatgagcgcggcgtgtatgcggccgtcagcgagctgatccgcgtcggtcaccgccgcatcgccatcatcaccggtcccgaggcctcgcgccccggccgcgagcgcctgcgcggctactaccgcgcgctgcgcgagcatggcctgcccgtcacaccggcttatatccgcaagggcgacttcatggtcgactgtgcctatgagcagacgctggcgctgtgcgccatgcaggagccgcccacggcggtgttctcttccaataatatgacgacctacgggtgcctcaaggcgttcaatgagctggggcttcgtgtaggggccgacatcgctttggttggctttgatgatatcgacgcactgtgctggctggattacaacatttccgtcgtcagccgtgacgtgccggaaatgggccagcaggccatgcgcctgctgctgcagcggtttgaaagcgagcggggtgagcgcgcgggcgcgcgcgagtgcctgccgacggagctgctgctgcgcggctcggagctgctgccggagagcagcagggcacattaataataatttgtcaggtttgtgagccggagctttccggcgtgtttgactggaggtaacgaaattgaaacagaaggtaacggtatttggcagctttgtcgtcgatctcatggcgcgcaccccgcatctgcccgctcccgccgagacggtcaagggcagcttcttcaagcagggcgccggcggcaagggcttcaatcagggcgtcgcggcgcataaggccggcggcgatgtggcaatgatcacgaagctgggccgcgattccatggcgaacgtggcactggacgtcatgaccgagctgaacatgccgaaggattttctcttctataacgacgacgtcgcaacgggcatcgccctcatcatggtcgatgagaattccagccagaacgagatcgtcattgtcccgggcgcctgcggcaccatcacggccgaggacatcaagtccgttgagcagcgcatctgcgattccgcctatattctgctgcagctcgaggtcaatcaggacgccaacgaggccgtagcaaagcttgccaaggagcacggcgtccgcgtcatcctgaataccgccccgtatcagcccgtcaccgacgagttcctgaagggctgctggctcgtcactccgaacgaggtcgaggcagaggaaatgaccggcgtcgccgtcacggatctcgagagcgcgaaccgcgccgcgaagatcttcttcgaaaagggcgttgagaacgtgctcatcaccctcggcagccgcggcgtttacatcaacaccggcgaccgcgccgagatcatccccgccttccatgtcaaggccgttgatacgaccggcgcaggcgatgccttcaatggcggcctgctggccgctctggccgagggcaaggacatctgggaggctgcccgcttcgcaagcggcctggctgccctgtccgtgcagcgcatcggcacgaccccggccatgccgacccgcgaagagatcgacgcgttcctcgcggagcactgatttgtttctgacgcaccggatgtgcgtgaaaatctgaaggaggatcattcatcatgttaagaggagttcctgatatcatcggttctgatctgctcaaggctctggctgataccggccacggcgatctcattgtcatcgcggaccacttctatccgcccgtcacgaagtctccgaacgccatcagcattcaggctaagggcaacacggccgccgagatggtcgacgccgtcctgcagctcgttccgctggacgtcgagtatgaagcacaccccatcgagtacatggtcccggatgcggattccggcgttgtcctgacggagaacaaggtctgggacgacaccatcgccgccgtcgtgaagcacggctacgatgccaagtgcgtcggccagatcgagcgcacgaaattttatgagaaggctgcaaaggcctacgtcaccatctgcacgagcgagcgcctgccgtatggctgcatcatcctgcagaagggtgttatgtgatcggatgtaattgcagcgtgcaatttcattaaataaattaggaggaaaacaacaatgaagaaactcatcgcactgcttcttgtgatcgctatggtcggctgcctgtttgctgcctgcgcaagcgatggcaacaacgacacccagcccgcgaccgacgctcccaccgagagcaacgacaacaacagcgacaacaccgacaacaccgataataccgacaacaacgagtccggcaagacctacaagatcatctatgtcactccgtctacggcttccgatttctggagccagatcgagaccggcatcaagcaggccatgaaggactacgaagcgcagctcggcgttaagatcgagtactccatcaccggccctgccgaagaggctgatgcagaaggctatgtctccgctctggagaacgcgatcgccagccagcctgacgcgatcctgaccgctaccctgaacatcgacccgaccgtcccgaaggcaaaggaagcccatgacgcaggtatcgtcctgaacttcgtcaactgcggccttggcaacggcgatgagggcgacgagggcactcatggcgagtactacaacgagttctactactgctccaacaccaccatcggcgagatggccgctcaggctttcctcgacgccatggctgaaaagggcatctccaccgacaagggcaccatcggcatgcagatgaacatggagaacgctgctctggacttcagaatgcagggcttccgtgactacatggctgagaaggctcccggcctgaccctgaccgacaccgagtacaacgacaacgactccgcggatgctcaggctgatgccgagaacaccatcaacgctgtcggcgctgacctcatcggcatctatgccggcaacaacgtcacctgcgacggcgtctgcaacgctctgcgtgcggccaacatgaaggaaggcgtcgtttccatcggcgttgactccgacgatgtcgagatcgccgctctgcgcgatggtttcctgtccgccatcattgttcaggacgctttcacccagggctacaagtgcatggagaacgccatcctgacgctggtcaacggccagaaccccgagacctccaagcaggtcaactgcccgcctgtcgttgtcaacatggagaacatcgacagcgaagagatccagttcatgatgtccccgtacgtcaagtaattccggactgaatatcgatctctgaacgaaaccgtgagggccgctgcggccttgcagaccgcagcggccttcttttccaaaggaatgagggtgcaacattgcaagagaatacgatcttaaaaattgaacacgtcagcaagttctaccccggtgttacggcactgaaagacgtgagcttcaccttgcagaaaggcgaggtgcgtgcgctggtcggtgagaacggcgcaggcaaatccaccctgatcaagtgcatcatgggtgtcgagaagcccgatgagggcaagatcaccatgaattataatggtgagtgggtcgtcaatgccaccgcagtcgatgcgcaggcacacggcgtctttgcaaactaccagcatgtcaatatcgctccggatctcagcatcgcggagaactacttcctcggccgtcagcccaagacgaagctcggcctcgtcgactggaagaagatggctcgggacagcaagaagatcatcgataaatttgaaatgggcgttgaccctctggcgaagatccgcgagctccccattgccatgcaggcgatggtcacgatcagcaagatctccgtgaacgaggatatccgtcttgtcattttcgacgagccgacggctctgctcgagaatgaaaaggtcgatatgctcttccgcttcatcggagagctgaagagccagggcgtcagcatcatctatatcagtcatcgtctcgaagagatcatgcagatctgcgacagcgtgaccatcctgaaggacggctcctacgtcgatacgatgcccattgagaacgtgacgaaggattcgctgatccagatgatggtcggccgccccgccacggatatctacaacatccgtcactttgacactgacgaagagctgctgcgcgtggagaatttcagcgacagcaagcacttcaagaatattaatttcaccctgcacaagggcgagatcctcggctttgccggtctggtcggcgcgggacgcagcgaagtgatgcgcgccctgacggccgtggaaaagcgcctgagcggcgatgtctatctgaagggcaaaaaggttcacctttccaatccgaccgacgcgctgaagcacggcatcggcttcctcaccgaggaccgccgcactgacggctgcgcgctgaagctggatatcaagacgaatgtcaacatgagctcctacgatatgatcagcaaggcgggctgcctgaacctccgcaaggagaagaagcgcgcggaggaattctccagaagcgtgaatgtcaaaacgccgtctatttcgcagctcgtcggcaatctctccggcggcaaccagcagaaggtcgttatcgccaagctgctttgccgcgatcccgaaatcctgatctttgacgagccgactgtcggcatcgatgtcggcgcgaagcaggagattttcaagctcatcgagcgcctgaccgaacgcggccgcggcgtgatcctgatctcgtcctatctgccggaggtcatgggcctttccgaccgtctgatcgtcatggcgcagggcaagatcaccgcagaatacgacaaagaagctctgaagacccttacggaagcggatgttctccgtatggcctccattgaagactaagaggagagatagttatgtccacgcttaccaaaaataaaaagcccaatgcgtttgtgcggctgaccaagcactctgagttcaccatcggcctggtcgttatcgcgctgttcctgctggccacgttcctgaccaagaacttcttcggctcctacaacctgaagaacctgacgaagcagggcgctatcgtcggcgtcctggccgtcgcgcagaccttcatcatcatcacaagcggtatcgatatttccggcggcgccatcgccggtctcggctgcatgacaatggccatgatcatgaacggcaagggcacgtccatgctcggcattgccatccttgccaacttcgtcgtctgcaccctgtgcggcttcctgaacggcgtgatcatcttcgacctgaaggtccccgccatgatcgccaccctcggtacgcagaccatcttccgcggcattctgaagctgctgtgcaacggcaactccatctcgttctttgagccggacggcgcaacgttcgtcaagctctttgacaccatcggcaactatgacatcttcggtgtcctgccggtcctggcctgcatctggatcgttgtggcagtcattgccttcctcgtcctgcgctacaccgtcttcggccgcgacctgttcgtcatcggctccggcatcgaggtcgcccgcctgagcggcatcaaggtccgcaagaccttctaccttgtttactccctcgccggctttgtctatggcatcgctgccatcatgtttgccggccgtatcctccgcgccatgccgaacaccggcgacggctacgacatggacgccatcgcggcggcagttatcggcggcgcttcgctggctggcggccgcggcgcgatcactggcacgtttgtcggcacgctcctgatggtcgtcatcaagaacgccggcaaggccttccagatcaacgactacatcctcgacgtcatcaccggcgctctgatcatctttgccgttgcaatggacatggtcaagagccgcaagaaggcgtaacctcctaccctcattccttttccgtcccccggtttcggccggggggcggaaaaaagaaaaaatacaagaaaacgcttgacaaaccgtgcaaaatcggatataatcattttgctgtttcggcggcgggtcatatatggcggcatagctcagttggtagagcattcggttcatacccggagtgtcattggttcgagtccaattgccgctaccaaaacggcccgttggtcaagtggttaagacaccgccctttcacggcggtaacatgggttcgagtcccgtacgggtcaccagaaaacaacctttgtcctgaggacaagggttttttctctgtctatggcacattttggcggataccatggcgcaaaatgtaaattgaatgtagtgcgactagtaaaaaagaaatggaaattcctgtggctgcaaaatagtaacagacctgatatcatcggtccagtcctcgcgagacgaattcacaggaggaggtttcccatgttctgtatccatgattttgattgcagcgcgatccggacgaagcggtgcattctgtttggcatgggctgctgagcggcagccgcagcggccggggggatccccggccgctttatcgttcgccgcaatgtagcggctgcaccagccattgtaggggagcggcgtgcccctcccggagcaatactggcagtttgcaccgggtatcgaaaaatggtgtgcaccaattgcgtctgtagcggcgctcactgcgcagccgttggcggctctgccgccttacggatgcggcgtgccccttgcgggtattgagcgccttgtacgggagtattcaacggcaggagggtgctggtgcaccgccgcattaccctgatgtgtcattgcgaggagcggagcgacgtggcaatctcgggaaggcgcttacgttttcgccggaactcccctgttatccggcattgtactgcgagattgccacgtcggcctttggcctcctcgcaatgacaaacctttgattttcaccattttaacgatagcctgtttatttcgcaggtgcagtgccgggcccggctgtccgctcccctacaaggcgtgtgcgttcggcgatgccgccctataacttgccagtctgcaaggcgctcagtgagcgccgctacattcttctctcgcccggcggtcttgcgcagtgagcgccgctacactccatacttcggtgcataccgtttatcggcagccggtacgggacggcagtgccttcccgagattgccacgggcgcaaagcaccctcgcaatgacaattcggggaccggcaccattttaacgccgtcccgttcgtaacgcaagtgcagcgccgggcccggctgtccgctcccagcaggaaggagcggtgctgcgccagaacggtttttcctgcaaaacacaagatggggcttgacattttgcccgctgcggagtaaactttagttagaaacaactaaccgaaagaggggagacgcatggagaaacaaagcttctgggaccgctatgcgcggcggtattcgcacttcgtgcgcgcggatcaggaggcctatgcgcagatgctcgagtggatccgtccggccgtccgtgaccgcaccgtgctggagctggcaacagggacgggcgtgatcgcgcacgggatcgtgcacgaggcggcctctatcgaggcgacggatgcctctgccgggatgatcgacgtggcacgaagccattcccattcccgcaagctgcacttctctgttcaggacatgcgctatctgccctatgccgacggcagcttcgaggtcgtcatcgctgccaatgtgctccacctgctgccggagccagacaaggcgctcgatgaggctgcgcgcgtgctcgcaccgggcggcctgctcatcgtgccgacgtttacgcatgcgggggagggcaggcttgcaaggctgcgcctctggctgatgcgccgtgccgggttcccgctgcgctggaagtggtcgcctgcggagtttctgcagttcctgcgcagacacggctggaaggtcgtgcagcaccatgtgctgcagggcacgttcccgctgacgtatgccgcctgcgtgcgccgctgtgcggatgcggagcatgaaaagcctgttacggaacacgaaacggcctgaatttgtagtcatgttataagatatccatatcggcccggactgcggaattctgctgcagaccgggccgattttttgtgaaggtagagggagaaatatgggctctgcagcaagctgattcagcaattcgcacaaatcaatcggtacgattttatggaaagctccaaaaatttttttgcggatttacaagcggattcaaacgtggtatagttcaaacatagtttgttaaacgtttagcagtgggaagtgttttccgactgcggcgaagtatcctgctagatgtcatcagcaacgaggctctctcgtcattgcgtgcagggcaaggaatgcccgcgccaaggcttcgcacaccgtttgtccggcagctcggctttatcaggcggtttgtatggtaatatcgtacaaaaatgcctgcggaaggagggaaagcgtgcgctgacaaagctgttacaagctggaacgggtcattcctggatcggaatccacgcaggataccagctgccctgttgggcaatattttttcaccgcaaatgttaaacgtttagcattttcgacggaactcgaaaggactatagaatctgaaaggagagaacatttcatgcaaagagtgaaccacctgcccagacgtgtgatctcgatcgtgctgaccatcgtcatggtcgcgtccctgttctccggcatcctgccgggcctcggcgtgacggcgaaggctgcagcgaacgaaattgcaaatgacagtctgaagatctctgtcggtgatctcggacagatttctacgctcaacatcgtgaataatcccagaaatcgaagcaatcgtgagatcaacttcgtcctccccaatgacacccgtccccagaacggtgtgcagcatcagtggatgggcgaaatgatcttctccgtccgctccagcgcggacggcagcttccccgccgacaacaccggctttgtcgaggtcgacacgaacaagaccctcgcagccggcggctcgactaccgcttccaacatcgcttccgataacccctatatcgagaagaccgttgtcagcgacaagaaggtcgaggtcaacttcatcggccaggacctgagctccacgacggaccgtaccatgaagggcttcgatgtgaagtccacctatgatatggataccgaggatggctccctgctgtggaccatcaccctgaagaacaagagtggtgcgtatctggaattcggcgacgtcggcctgccgatgccgtggaacaacaagtacacgaaccagaacagcgtttattccgagcgcgtcacggcccatacctttgcaggcgcggacagcggctatgcctatgcgatccgctgcagcggcgaaggcaactacatcctcttcacgccggtcgccacctccggtgcccgcatcgagtatgtggataactggatcggcagcaacaacggcgtcagcgacaaccgtaccggcagcacgttctccaactggacgggcgactccggcgaatggcagccgggcctgagcgtttactacatccactccaaggatatccacaagaccggccgcagctactttgaagatgcgaccagcctcatcctcgagccgggtgagagccagacctaccagttcaagttctctgctgtccgcgcgggcgacaacaccccgcaggaaagcgccgagagcccgaacaacgcctctgactccatcgagcagcgcgagacgaacatgcgctctatcctctatcagaacggcctcatcgacgccatcgcggtcccgggcttccagacggctctgaacatggacacgcgcctcgacctgcactatgatgacagcctcatcaaggtcgactccgtcgacatccagtgcgtgcacgagaacgatccgttcgacgaagcgcatacgccggagcaccgttccggtatggtcaacaacagccgtaccggccgcggcctgcatgacggcaacgagggctatgaggaatccgtgagcttcgtcgagacgaagaccgtcgacggcgagcagcaccacatctacgacctgcacttcggctgcatcggcaacaacagcgttcgcgtcgagtacaagctgaaggtcggtgacgaatgggtcagcaagttcacgcagttcgagttcaacgttctgaccgagctggatcaggcatccgacacgcatgccgacttcatggtcaatgagacgcaggacacgaatcctgacagcccgacctacggcatctacagcgactggtactttgccagcggcagagattccaaccagcgcaaccactggggcgatgactggagccatgacaacatcaacttcatcgccatgaagaactatctgaacccggatgccgagcaggtcaagtccatcgagacctacctgatcgacttcatgtggaacacctacatgaagaacacccaggataacttcatcgttgcgaactacctgtccgcttccggcgcttacagcacctccagcggcccgtacacccgtacgttctccgaagtgatggaggccaccggcttcttcaacatgtaccgcatcgtcaaggcttatccggacctcattgagtaccgtaagcctgcagcgtggtatctggaaaaggcctatggcatttactccaatcgcgtcggcaccggcgccatcggcttctacggcgagcagcagatccccgacatgatcgaggcgctctatgccgagggtatggacgaggaggcctttaacctgcaggagcggtttgcatggtacaaggcgaacaattgcatcaacgccacctatccgtacggctccgagtttgcctacgacaacaccggtgaagagggcgccttcgccgccatccaggccctgacgaagtactggccggacagcgacgccgccaagaacgcctacagtgccatgagcatggccaaccacaagacccgcgcgatgcgcggcatccagcccacctggtaccagtacgccgacccggtcttcatcggcggcgagagctggtggaacttccagtacaccgcctcccttgcaggctccatcatggacgattggatgcgctacgaggagctcgaggacggcgataccaccgcatgggctgcccgcgtgaactacgcggccaagatctccaacttcaacgccatcaacatgggccagatctccgacaagtatgtcggcaacgtttcctggcgctacaacatgtataagggcggctacggcgcgatgaacgtcaacgacggcggcacccgcgtcatgaacaacggctggcaggacttctccggcgaaagcgacgagggcctgtacggttccctgctgcgcatcagcgcagacgtcgtgaacgatccgatcttcggcctgtatggctacggcgcgaacgtcactgccgacgagacctcctacacggtcatcccgactgacggtttcggcaagcgcgtcaacatcctcgaccagaagatctacgtcgaaacgacgcaggacaccatcaccagcgcaaagttcgctatggacggcagctccatcgagctgaacgtcaagggctacactgcggcaagccatgtttcccacattgctctgagcggtgcaggcctgaaggacgtcttctatgccatcaacgtcaacggcgagaaggtcggccaggtctatgtaaagaacaatgaggccaacgcgaccatcaccatgcccgccggtgagaccaatgtcgtgaccatcacggccgatccgaacggcgagaatgccgctccgcaggccgccattaaggtctccagcgacgatctgcaggccatcgtgacctacaccctgacggccgttgcctccgacgacggctatcccggcaacagcctgacctatctgtgggcctttgagagcctcgcaggcgagggcgcaagcgcgttcctgagcagcgacgccgctccgacaacgcagttcaacgtcagcgaggcaggcgagtatgtcatctccctgaccgtcagcgacggtgagaagtccacgaaggtcgaaaagactctcgttgtcggcgaagcgcccgagcgtctggccccgacgatcgattccgcgaccggcacgcccgttgtcggcaatccgaccgttgccgatctcaaggccgaagccacggtcgacccgctgtatcagggcgtcccgcgcttccactgggagctggtcagtcagcccgagggcggcaatgccatgatcggcaatccgaacgagaaggaagccaagctccgcgtcgacaagggcggcgagtatgttgtccgcctgactgtcaccgacgaggacaagacctcctccacggaagtcaccgtcaccatgacggatgctgccgacggcatccagcgcgtgaagaccgtcatcacgcaggtcggcgtcgccccgacgctgccgaacggcgtggtcgctgtccgtgacgacggcacctactccggcggcgcagtcgattgggacgagatctccgaagacaagtatgcacaggccggtgagttcgaggcctacggcacgctccgtacccagacgacccgcgtggccgtcaaggtcatcgtcgtgaagggcgaccgcaagaatgttgctctgttcgcgaccccgaccgccatcatcaacactccgtccgatctcggcggcgttgccggcctgaacgacggcttcgacccgagcagctcccgtgatacgagccacggcgtctggcacaactggcagggcgcgcagggcgacgctgcatgggtcatgtacacctgggacgtccccgttaccatcgacggcgcggatgcctactacttcaccgacggcaactttgcgccgaaggatgcgaagctggagtatctggcagaggacggtcagtggcacgaggtcccgaacgtcagcggccttggtgttacgctcaaccagtacaacaccacgagctttgatcccatcaccaccacgaagctccgcatgaccatgaacccgaagacgctgggtatcggcgttatcgagtggaaggtctacggctacggtgaattcgtcgaccgctccgctctgaagagcgccatcgcaactgcgaagggcatcaacacgaacctctttgtcgaaggcagcaagtatctgctggatctggccattgcgaaggcacagaccgttctgagcgatacggccgctacgcaggagcaggtcgatgccgcagcggcggagctgaatgcggtcattgccggtctcgaaagcgcggacggcaacctcgcctactctgctgccgttaccacgagcttctgctccagctgggagtccctgtccgccgtgaacgacggcatcgtccgttccaactcctacgacccgtccaagccgcgctacggcacctggggcaacacgtcttcctatgagaccgtgacctacacctgggctgcagacgtgatcatcgattccaccgacctgtacctgtggtacgacggcacggagggcgagtacaccagcggcggcatccttgtgccgaagtccgtggaattcgagtacctcgatgcggaaggcaactggaagtccgttcccaacgccgagggcctcggccgcgagatggacaagttcaacaagaccacgtttgatccctttaccaccactgctctccgtgtgaagctgaacaagcagtccaacgaccgcaacggcgtcggcatcatggagtggaaggtctatggcaaggtcgccggcggcgagaccctcccgactgcggtgaaggtcgtcatcgcccgcattgatgccatcggcgaagtcacgctcgacagcaaggacgccatcgaggctgcccgcgctgcgtatgacaagctgaccgacgagcagaagaagctcgttccgaactatgagaccctgaccaaggccgaggagacctacgctgcgctggctgacgccgccgctgtgaaggaagtcgaggatctgatcgacgcgatcggcgaagttgacgagaacagcaaggacgccatcgaggccgcgcgcgctgcctatgacgcgctgcccacgcgcctgcagcccgaggtcagcaactacgacaagctcgtcaaggccgagaaggattacaccgatctgctgacggctgtcgaggctgcgcagaaggccgccgaggatgcccgcaaggcattcgagaacgccaaggctgcgcaggagaaggccgaggccgcgaaggctgccgccgaggctgcgcagaaggccgccgaggaggccgcacaggcttccggcgaaaacagcgaggctgccaagaaggcgcaggctgccgccgaagaggcacaggccaaggctgaggctgcccaggctgctgccgaagaagcacaggccggtgccgaggctgcccagaaggctgccgaggacgctgctgccgccgctgccgcgaacaacgcgctggccgccgaggctgccgcaaaggccgccgagaaggctgccaagtccgctgaggaggccggaaaggccgctgcttccgccgaagcggctgcgaagtctgctgccgacgccgccgaggccatgctgaaggcccagaaggcgcagaaggctgccgaggatgccgagaaggctgccgaggaagctgagaagaaggccgaagaggcccagaagaaggctgaggaggccgccgcctccaccgctgaggaccgcgaagccgccgagaaggccgctgaggaagccaaggctgcccagaaggccgccgaggatgcccgcaagtccgccgaggacgccaagtccgccgcggagctggctatgcaggctgccgagcagtccaacaaggaagccgccgcatccgctgcgcaggctgccgagtatgcaaagaagatggctgaggcctatgaagagatcgtccgcatcaaggccgagctcgtcgagtacctcgccaaggcacaggccgaggccgagcgcgccgaggctgagcgcaaggccgccgaagaggcccagagaaaggccgaggaggccgctctggccgctgccaagtatgccgccgcttacgagctggctcagctccagcagaacggcgagggcctgaccggccacgcgaaggaagcgtatgacaaggctcttgccgacgccgctgccgccatcgaggccgcaaagacgcccgctgaggtcgacgccgctctggctgccgcccgcgaggccctgaacaacgccgtctgcccgagcgcagcgttcacggatgtcgaggagaacgtctggtatcatgacggcatcgacttcatggtgagaaacggctacatgaacggcgttgccgccgacacgttcgatgtcgaaggcagcctgacgcgcgcccagctcgtcacgatcctctaccgcatcgccggtgagcccgagaccagcgccgccatcccgttcgcggatgtcgccgacggccagtggtacacaaaggccattgtctgggccgccgagaacggcatcgttaagggcgtgaacgaaacgacgttcgccccgaacgatccgatcacccgcgagcagatcgccgtcatcctctaccgctatgcgcacgaggagaacaccgaggacggcaagctcacgagcttccccgacgcaaaggacatctccggctacgcgctggaggccatgaactgggcggtcgccagaggcctcatcaacggctctgacggcaagctgctcccgcaggacaccgcgacccgtgcacagatcgccgtgatccttgcccggtacctgaacgcctgatctttccccctgctccccatgcggccgaagccgcatggggagccccccagcatttcctggcaattggacccagacaaacaatatgctcgaaaatcgaacttgggaggaacaataaaccatgaagcatgtgaaacagctgctttctgcactgcttgtgctggctgttgtactctcgctgctcccggctggcgttctgaaggcatccgccgcagaggccctcgcagcgctggacatcggctaccccacattcaagaacacagagcttctcgacgaggtctatgacctgtcgaagctcggtgtgtcctattccgaaaaggacatcatgatggcgatctataagcaggatcttgccaatggcggcgactccttctatatggaccgcatcctcgcccgtgagggcgtctgcaacggcaacgccggttcgaacggcaacgccgacggaaacaccttcctgacccgcggccgcgcgctgtatatgtacacgagcagcccgtccgtcatcggcttcggcggcaacaccgcctatcatcagccgcttggccggggcgatctggtccgcgttctcttctcgaacgccgacggcagcctgaccacgaaggaagacaccagcaagcgcgttaatgcgccgagtaactggtctagcacctactctgtcggcagcaacctgacgctggatgtcgtgaagttcatccatcaggagaacgtcgccgtcacgacgatgacgctgaccaacaaatccgcagaggatcaggcaattacggtggcagcggactccatctttgcgacggagcccggcaaggtcacggtcaatggtgcagagcagacagagctgaccggcacctgctcttcccctgcaggccttactaccatctatgcccgcatgaccggcgacggtttcgaggccgcttcgtccgacgactattgctggctgtcccgcgacgtcaccgtccccgcgggcggcagtgtggagctgaaggtcgtcatcgcctttacgacggaagagatcccggagtccaccgagcagtacctccgcttcgcaggcctcggaaaccttgaggctgtccgtgcgcagaaggcggaatacaacctctactgggcggagaacctgccctacatcgacgtgccgaagaaggccgtccagaaggcgatcgattatcgctggtggctggagcgcttcaactcgctcgatgccaacatccccggctatgactatcagtaccccgtcaccatcgagggcgtcctcggctacaacaacgcgattatcctgacgcagccgatgcacctgcaggatacgaagtggctccgctctccgtatctggcctatggccagctgctgtctgcgggcaactcctcgcagagcagcgccttccttgataaccccggcaaccgcaacaactggaacaaccactatggtcagtatctggctgaggccggctatgaggcgttcaacgtcatcggcggcggcgcggaggtcgcggagaacttcgcgtactacttcggccacgatgctaccggccagctggagcactacggcaaccacattgagggccgcgacctcatcgcttaccgcaacaactacatgaccggcaacgacgccgataccatctccatgcatgctcccggcaccggcacctggaaggcacacggcgaaaacgcctacgtctgggccgctgccgacgccgccgcgaagctctatgagcagctgggcaacaccgagcaggccaagtattaccgcgatctggccgacaagatcaaggccgacgtcctcgagctcatgtggtgcgaggagtgccagaagttcgagacctatgccgtccgtccgaccggcacacagcataacgctaaccagcccaacctcgtcaagtacaccgagtccaacaactacaactactttgccgtgggcctcgtccccgacgatgccgcttccgtcacgaagtacaaggaagccctcaaggccttctccaacggcaaggagttcccgatcttcccgttctacaccgccaaccaggtccacaaccaggaggtcagcggttcgaacaacttctcgaacatcaacttcaccgtgcagctccgtctgtatgagtccgctctgcgtacctatgacaaggagcagacctacatcaccgacgacatgctcgccatgatggccgagtggatggcatggaacgtctaccccgatgcaggcgacatccgctatccgaacaacaacgagttccacaacatcgacggcagaacctatgagaactactatcgttcttggatctaccacaacatcctcggcaactacacctacctcttcatcgaggacatggccggtatccagccgcgttccgatgagaagatcgagctgagcccgatcgacttctcctatgaccacttcatggtcaacaacgtccgctatcacggacatgacctgacggtcgtgtgggataagccggacgacggcaagacctggtacaacgagtgccccgagggctactccctgtacatcgacggcacgctggccttcaccctgaaggatctggcccatgtcgtctatgactccgccacgaaggaaatctccttccccgacggcgctgtcgagatcgtcaccaataacggcggcgctgccatccccaccgcgatgaacaccgccatcaccgaggagaaggtcctcaacatgctggagaagtccggtatgcacggcatgacgaacctcgccgagggcgcggaggtcaccgccaccttcaccccggacaaggcccgcgccgcgtcctgggcagaaaagcaccgcgccgacggcagcgactccacctccaaggcagtcaacgagactgtgcccgatccgcaggcagttgtggacggcacgaccgtcgatatgccgttctggggcaactacggcagcgtgaacgagcgcgacagcctgacgctgaagctctcctccaagcagaccgtggacatggcgacgctgtacttctacaacgaccgtcagaccaacggctactccgagccctccaagttcgcagtcgagtactgggacggcgaggcctggcaggccgtccggcagcagacccgtaccccgtccgctccgcgcgcgaactacaacgccgtgtacttcgcaccggtcgagacggatcagttccgcttcaccttcaccaacaaggacaagggcttcactgccgtgaccgagatccagctcttcaacgagggcggcgaccgcgatcatcccgcgcagaacacggctccgtccgtcaagctcgcggaagacacctccatgaccggcaacctctacactaccctgaaggcgacctgcaccgacgacggcctgccctatgacaaggacatgagctacgcctgggagcttgtctccgctccggagggcgccgaggttatcctgagcagcgccaacaagcccaccacgaccatctccggctccgtggaaggcgagtacaccgttcgcttcaccgtcagtgacggcgagctgagcgcgactgccgagctgaccgtcaccctgaagcagggcgcagcgggcggcctcggcgaggacgtcgctccgtccgcttcctccgtcgagagtgactacacctccagctgggagaacctgaacggcatcaacaacccgagcttcgagccgaccagctccaacgtgggcgccggcaagggttggggcaactggcgtcagagcgccggctccgagcactatgtcggctatacctgggatgaggccgtgaccgtcggcggcgcggacatctattggtatgacgacggcggcggaacgcaggtcccgtccaagctgcgcatgcagtacctcgatgccagcggtacctggcaggatgtcaacatcaccaccccgttcgagagcagcattgcaaagaacaagtacaaccgcattgaattcgaccgcgttaccaccacccgcctgcgcctgtatgtgaccgtccgttccggcgcggaagcaaacggcatctaccgcttcaaggtctattcctccgttgacgtcgcttccctgaacgaggtcttcctcgccacgaagcccggcgtcatgcccacgctgccctccaacgtcacggcagtcacctcggacggcgcgctcatcagcgtccccgttacctgggagaccctgacggctgacatgatcgccaccgacggcgaggtcaagctccgcggcgtgaacaactccaccggcaagatgaccacctgcacgatctatgtccgcagcgacatggacaaggccaccatcacgagcgtcgagcccgttgaggtcaccacgacgcagggtatcgtcccggcgctgccgaagaccgtgaaggtcggctacaacaacggcgcgttcgacaaccagaccgtcaaggtcacctggcccgccatcacggctgccgagctggccaatgtcggcgacgtgaacttcgagggcgaggtcgaaggcaccgccacgaaggccatgctgacgatccacgtgctcaaggccccggacgaccccgctgtcgttgcggtcaaggagctcatcgacgccatcggcgaggtaacgctcgacagcggcgacgccatcgacgctgcccgcaccgcctatgacaagctgcccgaggccaagaaggtgcttgtcgacaactacgagaagctgactgcggcagaggaagcttacaccgccctggtcgacgccgctgccgcaaaggctgtggatgacctgatcgacgccatcggcgaggtcacgcttgagagcggcgacgcgatcaaggctgcccgcgccgcctatgacgccctgaccgacacgcagaaggaactggtcaagaactacgagaagctgaccgctgctgaggaagcttacaccgccctggtcgacgccgctgccgcaaaggcagtggacgacctgatcgacgccatcggcgaagttactgccgacagcggcgacgcgatcaaggctgcccgcgccgcctatgacgccctgaccgacacgcagaaggaactggtcaagaactatgaaaagctgctcgctgccgaggagctgtatgaggaactgacggcatcggctgcggcaatcgcccagaaggccgctgaggaagccaagcaggcccaggaagaggccgaagccgcgcagaaggctgccgaggaagccgttgaggccgccaaggccgcgcaggaggccgctgaggccgccgctgccaaggccggcgagaacaacgccgctgccgaggaagcccgcaaggctgctgaaaccgcgcaggccgctgccgaggccgcacaggccaaggccgaagaagctcagaagaaggctgaagaggccaagaccggcgccgaagccgcccggaaggccgccgaggagaacaacgccgccgctgccgctgaggctgcgaaggctgtttccgaggcactgaaggctgccgaagaggctggccgctccgcgcagagcgccacgcaggctgctcagagcgctgcgcaggctgccgacagcatgctgaaggcacaggaagcccaggctgccgccgaggctgcgcaggctgctgccgaagccgccaaggcaagagccgaagaggctcagaagaaggccgaggaggccgctgcttccagcgccgaggacaaggaagctgccgagcgcgccaaggttgaggccgaggccgcgaagaaggctgccgaggatgctcagaaggccgcagaggaagcaaaggccgctgccgagctggcgctcgaggctgcgaagaagtccgaggtcgaggctgctgcctctgccgccgaggctgccgagtatgcccgccagatggccgagacctatcagaaggtcgttgagatcaaggctgagctcatcgattatctggccgaggcccaggctgctgccgaaaaggcagaggccgagcgcaaggccgccgaggaagcccgcaaggctgccgaggaagctgcgcttgccgcttccaagtatgccgcctccttcgagctggcacagctcctgcatgagagcgagaccctgaccggccacgcccgtgaggattatgccaaggtcatcgaggacgccaaggctgccatcgaagccgccaagacgcccgaggaggtcgacgagatccttgcggccgcacgcgaggccctcaagaccgcaggctgcccgagcacgaacttcaccgacgtggaggagaatggctggtatcataccggcgtcgacttcatggtgaagaacggcttcatgaacggcgtcgcggacgatgcgttcgacgtcgacggcaacctgacccgcgcccagctcgtgacgatcctctatcgcatcgcgggcgagccggagagcacggccacgaacccgtttgccgacgtggcggacggtcagtggtacacgaacgctgtcatctgggcagcggagaacggcatcgtcaagggcgtgaacaccacgacgttcgccccgaacgaccagatcacccgtgagcagatcgcgacgatcctcttccgctatgccaaggcggagaaggtcgagggcaagctcgccggtttcccggatgccgggaaggtctccgattacgccgccgacgccatggcgtgggcagtggagcagggcctcatcaacggtatctccgagagcgacggcaagacctacctcgccccgcaggagaccgcgacccgcgcccagatcgccgtcattctgatgcgctatctgactgcggagaactgatccaaaaaaatccctgtccgccgatgcgggcaggagaggagccgcccaccgggcggctcctttttgactttgtatatgtaatatgcaggggcggggacagtcaggcccggcgcagcacttgcagcccgtacaagcctccgttaaaacagcatgcaccaattgcgtctgtagcggcgctcactgcgcagccgttggcggctttgccgccttacggatgcggcgtgccccttgcgggttgtgagcgccatgcaggctggcagtatttgcggcacactcttctatgacgcgaggcttccagatttgtcattgcgaggaggccttaggccgacgtggcaatctcgtgcaggcagctgcaatttcgccgggagtgtcctgttatccggctgggtactgcgagattgccacgtcgcttcgctcctcgcaatgacacatcaggaagcatggcgcaggaaacggtacactgcaccgaattggtgctgcttttgccgcttcgcgcacgggtggggcatgccccgcccctaccatgaatgacccagaatgacccaatacagacgcaaaaaaccggcgcaggggggacctgcgccggtaggggatatcttcaggatcaggaaaggcggaagcggagcatattccacgaggcggcggggagctccggggcttctgcgccgacggcgaccacgcgcggcagagcgggctgggcgtctgccgtgttctcactgtccagcgcgggggcggtcagcgtgacatgctgctccagcacggcgttcaggccgtcgagctccagcgtcatggcctcgtcgaggcttttgttcacggcaaagaccgtcacatgcgtgccgtcctcggagagcacggcggagctggaaaggtacggggccttcgggctgacaccgcaggcataggtcgggacctcgacctcctgctgcagggccgtgccgcggccgaactgcgagccatagaggaacggccagtacgtcgtctgcgcccaggcgcggccgcccggctcggtcataatgggggccagcgcgttgacgagctgggccaggcaggcaaccttcacgacgtcggcgtggttgagcagggtgttgagcatgctgccgacgagcagagcgtctgcaaagtcgtagttctcctcttcaatggggcgggcgaccgtccacttctccggcaccctgccgttcttggcatagtgataccagacgttccactcgtcgaacgacaggccgatatgcttctcgctgccgacctcaaggcggatcttttcgcagatggcggcgacctcctgaatgaactcgcccatctcctcgctgcgtgcaaggaaattcatgacgtcgccctcatggttcgtataatactgatggagcgacagatagtcgacgtagggatagctctggcggaggacctcctcttcccaggtgccgaacgtcggcatcgtgcggtaggagctgccgcaggcgacggtctcaatggtcgggtcgaacatcttcatgagcttggccgtctcgcaggcgatgcggccgtattccgtggccgtcttcgagcagatctgccaggggccgtccatctcgttgccgaggcaccagagcttgacgttatagggggcctcgcggccgttttcgcggcgcttgtccgcccagtaggtgtgcatgtcgccgttgcagtattccagcagctccacggcgtccttcggcgtgccggtgccgaggttcacggccatcatcggctgcgcgccgatgcgctcgcaccactgcaggaattcatccgtgccgacctgattcggctcaatggcgctccaagccatgtcagggcggacgggacgcttgtccttcggaccgatgccgtcgcgccagtcgtagccggacaggaagttgccgcccggatagcggatctgcgtgacatgcagcggacggatgagctcttccacgtcgccgcggaagccgaaggcgtcggcagtcgggtgacccggctcatagatgccggtatagacggcgcggccgagatgctcgatgaacgagccgaacacgcggggatcgatgggggagatgatgcagtccttctgcagtcggatgcgagctttcatgaattaacctcctgtggattctcgtttgatgatcgtacattccagcatgatgtccttctgcgccggatgcttgccggagagcatgtccagcagggtatggcccgcgctctggcccatctggaacagcggcagggcgacggtggagagcgacgggcggcagacggagctgatctcacggttatcgtagccgatgaggaagatgtccctgccgacctcgatgccattctggttgcaccagtcgatcacaccggtgccgacaaggtcattttgggcgaaaatggcctttgcgcccgcacggatgagctcgccgccgagacggtagccggagtcacggtcccagtcacttgcgcggacgagcgaagagtcataggctacgccgtggtcgtgcagggcctgcaggaagccgttggcgcggcgcagggtgtgcacggagtggatgggccccgtgatcatgccgatgtgctccgacgtgtgctccagcagagtgcccgtggcctcataggcggcaagacggtcatcatagccgacgcagggcacgtcctgatcctcgcaggtgcagtagacgcacacgaacgggatatgggcatgcgccttcagcgatgcgacaaggtggctgtgacagccgatatagatgatgcccgcgacctgcttggacagcagatcgttcacggcggagcgaacgagcacgttgctctcgggatagtcccagggattgtcgtggtagcgcttgttgaaacgcagattgctcagaatataatgatagttcagcgtttcgcatacggaggcgacgccgtcgacgatctccggcgtgttgaagacggtcaggtcctccgtgatgatgccgatggtgcgcgcgtcgccgagcttcagcgagcgggcgttgagattcgggcggtaattgagctggtccgcgatctgcagaattcggtcggccgtctcctgcttgacgccggatttgttgttcaggaccttggagaccgttgcgatggatacaccggctcggtccgagatttcgcgaatggttgccatgaaatggttcaccttctctggtaatttacaatgcgaagcgttgatataatcatatcataccgtacgaaaaacagcaagagctaaacgttttatttcggggaaaatgctaaatttgacgcaaattacagggaaatcccgcgtgctgcactttttttggcttacatgcagtccggaacggctgcagaccggcagatgcgcagcttgatcgttgtggattctgcacaaaaaatagtcgggaaagttgtataaactcacgattctgtaattctgcctttacaaatccgaaaattatgatataatcaggtcagaaaaagttaaacgtttaaatcaccggacgccaattgcggcttcggcacgcggcgaccgacgacgggattccgcgttttcttttctgatttcttcttaaacgtttaaccaccaatggaggttccacattatggcaagcaagatcacgatccccgatttgaaaaaaattagagtaacggatccgctgttcagccattacgcgggcatggtcgcaaagaaaatgatccccgtgcagtgggagatcctcaacggcaagcagggccagagccgctgcttctgcattgataatttccgcatcgccggcggcacgctccagggcgagcaccgcggcgtcgtgttcggtgataccgatgcctataaatggcttgaggctgttgcctattgcgcaaataacggcgaaacggagtacatcccccaggcggatgagctcatcgagatcatcgggcaggcccagcagccggacggctacctgaatacatatttcacggtctgccatcccgagcttcgctggaagaacctcaccgagggccacgagctctacagcgcaggccatctcatcgaggccgccgttgcctactataacgcgaccggcaagcgccgcctgctcgacatcgctgccaggttcgcggacctcatctgccaaaccttcggcgacggcgagggccagcttccgggctatcccggccatcaggagatcgagcttgcgctcgtgaagctctggcgcgtgacgggcgaggagcgctacctgaagacggctcgtttcttcattgactgccgcggccgcacgccgaactacctgctgcgcgagatgaatgacccgaaccacaaggtcattttccccgaactgcgcagctacgatccgtcctactcccagtcgcatgtgcgccccgtggagcagaagacaatggagggccacgcagtccgcgccatgtaccagtgcagcgcaatggccgatctggccgatatccagcaggacgaggccctgcgcaatgcctgccagacgctctgggacaatgtcacgaagcgccgtatgtatatcacgggcggcatcggctcgtccggcctgcttgagcgcttcaccgtggattacgacctgccgaacgaccgcatgtactgcgaaagctgcgcgtccatcggtctgatgatgttcggccagcgtatggcggccatgttccatgacgcctcgtactacgagacggtggagcgcgccctgtgcaacacggtgctcggcggcgtcagcgctgcgggcgatcgctacttctacgtcaatccgctggaggtctggcctgcaaactgcaaggaccatacatctatcgagtatctcaagcccgtccgccagccgtggttcgaggttgcctgctgccctgcgaatatcgcccgcacgcttgcctccctcggccagtacatctatgcgatcgatgaacgcagtatttatgtcaacctgctcgtcggctcgaccatcgagacgaccctgcgcgataccgacgtccgcatcgagcagcgcagcggcctgatgaacggcggcgcgctggagctggatgtccgctcgagcggcacgcatcccatcgttgtgcgcctgcgtctgccgaagtggatcgaggctcccgtcttccgcctgaacggcgaggagatccagcctgcggtcgagaacggctatgccgtactggccgtgaactgcgcaggagagcatcacttcacgctcagcggctcggtgccggtgcaccgctgtgccgcgaacctgcaggtccgcgccgatgtcggccgcgtcgcgctgcagaaggggccgttcgtctactgcttcgagcagcaggacaacggcgaaaaccttgcagccctgcgcatggcgccggatgccgccgttgaagagaaggtgcccgccgagggcctgcccggcaacctgccggagctggacgtgaacggctgccgcatcgtttcaaccggtgtggacgacgctgagctctatgccgactgcgtgctgcgcaccgagccgtgcacgctgcacgccgttccctatggcctgtggggaaaccgtgtgcccggcgagatgcgcgtctgggtcgacaccacaatttcgtaattatatgcagcaggaagctgctataataaaaatcatgaaatgaagaaaggaacctgaaccatgaagaagatcatcgcgctcctgctgtgcctgctgatggtcgttggtatggtcgcctgcgcaaccaacaccgacaacaacgatcagaccgacggctctcaggacaccacccccgccacggagaactccgattcctccgatgacaccaacggcaatgacggcgacgtcgtcaccatcacctactcctattggggcaccccggacgaggctgccagcgtgcaggccgtcgccgacaagttccacgaagagtatccgaacatcaaggttgaggtcatggcgatccccaacgaagagtatgtcacgaagctgaacaccatggctaccgcgggtgagcttcccgactgcggcatcatgaacgagtccggcgttctggacttcgcttccgacggcctgctgtacgacatctccgccatgtacgagggcgccgactccatgccccttgattccatcaccttcaagagcgaaggcaagcccgttgcttactccgctgcaaacgaagtcctgtccctgtactacaacaaggacatgtttgatgccgccggcctggactatccgtccgctaccgaggctatgacctgggacgagttcgtcaccctggccaagaccctgaccctcgacgccaacggcaacaacgccctgagcccggatttcgacaaggaaaacatcaagcagtacggctgcgtcgttgacaactggacctggcagcttgaggtttgggcactgtccaacggcggccgctggttcaccgaggacggctccgcctgcaccatcaatgacccgaaggtcatcgagtccatccagaaggtcgctgacctgaccctcgttgagaactgcatgccttacaatgcaggcctcgaggacaacggcatgcagcgctccctgctgaccggcaccgtcgccatggcgaccgctggcgcatggaacgtcggcacctgccttgccaccgcccgtgacgaaggcctgaactatggcgtcgcccgtctgccgaagatggtcaacgaggtcaccatctgcaccggcggcccgcaggtcgtcttctcccagaccaagcatccggaagaggccatgaccttcatcaagtggtacatgaaggaagagaacagctgggacagcctgatcgccaccggcatctggatgcccatcctcgaagagtactacaccgatgagaccctcaccaacaagtggatcgacaaccccaacttcccggatcatgacgagtacaagggtgctgtcgttgactacgcaagagattgcgctgagtctacctgctggtactacatcccgcacaccaccgagttcatcgagctcctccgcacggtcctcggtccggtctggaccggcgagcagaccgctgagcaggcgatcaccgagaactacgacgcactgaacgcagtgttcatgggcgagtaagcagaaccctctgactgatatctgaaaccccggttttggccggccgcccggagcggcggccggccaaaatgtctttttcaactcctaactcaaagaaagggtgagcaagttgcccaaacgcactaagaaacccaagagcaagctgctccgcaaggaagcgcgcgctgcgtatctctacctcatccccgcatttatcggcctgatcgtgctgacctatattccgctgatcgcggtgttcggcctgagctttttcaagtggggcggaaccggcgcaccggaatggaacggcatcaataactatatcaagctcttcaccacggatccgtacttcaaggaatccatcaaagtcaccgtctatttctccctgcttgctgtcgtcggcagcatggtctattccctgattgtcgcaatgctgctcaaccgcaagatccccgcccgcggcttcttccgcgcggttttctacctgccctatgtgctgcccgcagccgccgtctacatcggctggagctggctgtacaacacggagtggggcctgttcaactacatcctctccaagctcggcatcgaacgcctgatgttcgtcagctcgtcctcgcaggtcgttccgtcgctggcactgatcgccgtgtggctctccggcaacctgatcgtgattttcctggcgggcctgcagaatgtgccccgcgtgtaccatgaggccgccgagatcgacggcgcaaatgcatggcagcgcttctggcatgtgaccttccccagcatgacccccattatcttctataatatgctgatgtccctgatcaccaacatgcaggtcgtcacgcctgccctcgctctgacgaagggcggccccggtaaatcctcttactttatgtcctacatgctctacaactacgcgttcaagcagcgcggcaagatcggtctcgcctgcgcgatcgccttcgtgctgttcctgctgatcggcgcctttacgctgctgctgtttgccaccagtaagagctggatcttctatgaaggaggcgacgacaaatgagcagcctgaaaagccgcaagcgcaccgagcgcatcacgaatgcgctgtgcttcatcgcgctgatcttcctgacctgtctgtgcatgctgcccatctggtggatcttccgttccagcctgatgtcgaacgccgagctgttcaagtggccgcctgccttcttaccgccgcgctggttgttctcgaactacgccaatacgctggaatacttcaagttctggacctacctgaagaacacgatgatcatcatcgtcccgtctgtcatcttcggcaccatcacagccacgatgtgcggctatgccttcgcgcgcctgcgcttccgcctgcggaacttcctgttcacgctgtgtgtcggctccatgctgctgccgaccatggtcacgctcatcccgctgtacatcatgtggacgaagttcttcaacatgtccaacacgttctggccgctgatcctgccgtatctctgcggcggcggcgcgttcaacatcttcctcatccgccagttcgtccgctccatcccgcgtgagctcgacgaagctgcaacgatcgacggcgcaggctacttccgtatcctcctcaacgtcatcgttccttccatcaaatcggcgatgatcgtcgtcgccatgttcctcttcatccagatctggaacgatctgctccagcagatgatctatatcaatacggatgataagttcacgatctccatgggcctgagccagctcaagggctccctgaagacggactggtccgccatcatgtgcggcacctgcatgtccttcgtgcccggcgtcgtgttctatctcctcggtcagcggtacttcgtcgaaggcatcgtgatgaccggtatgaaaaactgatgcagcgcggaatgcgtcgggaaggccgcggccttcccgcgccccgcgagggtgcgcgtcggtttttctatctgttttggaaccatgcatggaagctcatccgtctgaacctgctgtttctggcctgctgcatcccggtcgtgacgatgccggctgcgctgtgcgccatggaccgcgtcctcatcgtgctcgtgcgcgagggcaatgtgcttttatgggaggagttccgggacgaatttaaaaaggacttttggcgcagtcttccgctcggactgctgttcggcggactgctgtttctgggatatttcctgctcagcctcggcatgggcaacttcggcaccttcctcggcccgatgttcttcgccttcggcctgtttaccgtcggcttcgcgctcggccgcggcagctatgccttcctcatgcgcgctatgttcgatctgcccaacggccagatcctgaagaatgccaacggcatgtccgccctgcgcggcggccgcggctggctgccgatcgtggtgcatggcgtcggcttcctgttcggcttcagctttttcccgtacacgctgatcgtgatcgcactgttcggcatcagcctgccgcaatatctgatctgctatctgctcaacgaccccatccagaaaaacatcatttctccgtgggagaggatgcaggctcaaaaggagacataatatgactcatacgcttggtatcgaattcggctcgacccgcatcaaggccgtcctgatcgacgaggccttccgtccggtcgcctccggcgactacacctggaagagcgacctccgcgacggcgtctggacctatgacctcgaggaggcctggagcggccttcgcacggcactgcgcgccctcggcgaggtctccgtggatgccatgggcatctcggccatgatgcacggctatctggcctttgacaaggactggaacctgctcacgcccttccgcacctggcagaacaccatgacgggcgaagaggcggcggagctgacggagctgttcggcttcaacatcccgcagcgctggtcgatcgcgcatctctggcatgctatccgcaccggcgaggcgcatgtcggcaagcttgcgcatatcacgacgctggcgggatatttccactatatgctcaccggcgtgaacgccgtaggcatcggcgaggcctccggcatgttccccatcgacagcgaaacgctggactatgaccgcggcatgatggaaaagttcgaccgcctcatcgcggatcagcccttcacgctgcgcgagctgctgccgcaggtcctgcccgccggtgtcccggcaggcaagctgaccgccgccggtgcagcccgcctcgacggtctgctgcccgagggcatcgtgtttgccccggccgagggcgacgccggtaccggcatgacggccacgaacgccgtcggtccgcgcacgggcaacgtctccgccggcacgtccatcttctccatggtcgttctggagcatccgctgcagaaggtctatccggagatcgatcttgttaccacgccgacgggccgccccgtcgccatggtgcactgcaacaactgtacgaacgacatgaacgcctgggcaggcgtcctgcgcgagacggccgagctgttcggcagctccgtcgacacgggcgagctgttcacgaagctctaccgcaagagccttgagggcgaggccgactgcggcggcgtcatggtcgtgaactatctggcaggcgagggcgtgacccatctcgatgagggccgcccgctggtcctgcgccgcccggacagccgctttacgctggcaaacttcctgcgcgcacagctctattccaccatggctacgctgaagatcggcatggatctgctcgcctccgagcaggtggccatcgattcgctcaccggccacggcggcttgttcaagacgccgggcgtcggccagaaatacatggccgcggcctgcggtgcgcccgtgaccgtcatggagagtgccggagaaggcggcccctacggcatggcgcttctggcggccttcgtcctgcagggcggcggcgagacgctggaggacttcctcgcaaggcacgtcttcgccgatgccgtccgcacgacgctccagccggacccggcggatgttgaaggcttccgcacgttcctcgatcagtataaggcctgcctccgcgtggagcaggctgccacagaaaatctgtaaggagtgtacaaagatgaaaaactatgaattctggtttgtcgttggctcgcagacgctgtacggcgaagaggtgctccgcaccgtcgctgcccgcgccgaggaaatggcgcagaagctttctgccgttctgccctatccgctgaagtacaaggtcactgccaagagcaacgccgagatcctcgacgttgtgaaggaagccaactataacgacgcctgcgccggtatcgtgacgtggtgccatacgttctccccgtccaagatgtggatcaacggcctggagctgctccagaagccgtggtgccatttcgccacccagtataaccgggagatcccgaacgaagagatcgacatggacttcatgaacctgaatcaggccgcccacggcgaccgcgagcacggcttcatcggcgcccgcctgcgcgccccgcgcaagatcattgccggttactggcaggatggcgatgtacaggagcgtctggccagctggatgaaggtcgccgtcggcgtcgccttctcccgcagcctgaaggtcatgcgcttcggcgacaacatgcgtgaagtcgccgtcaccgagggcgataaggtcgaggtgcagcgcaagctcggctggcaggtcaacacctgggccgtcggcgatctcgtcaaggagatgaacgccgtcacggaggccgaggtcgacgcactcatggacgtctaccgcgagaagtatgactttgcaacggacaacgtcgaagccatccgctatcaggcgcgcgaagagatcgccatgaagaagatgatggaccgtgagggctgcaaggcctttgccaacacgttccaggacctctacggcatggagcagctgcccggcctggcttcccagcatctgatggcgcagggctacggctacggcggcgagggcgactggaaggtctccgccatgaccgccatcctgaaggccatgggcgagggcggcaacggcgcgtccggcttcatggaggactatacctatcatctcgtcaaggggcaggaatacagcctcggcgcacacatgctcgaggtctgcccgagccttgccagcgcccgtccgcgcatcgagacccatccgcttggcatcggcatgaacgagaaggatcccgcccgtctggtcttcgagggcaaggccggtaaggccattgtcgtcagcctgatcgacatgggcggccgtctgcgcctcatcgtgcaggatatcgaggccgtgaagcccatcatgcccatgccgaacctgcccgtcgcccgcgttatgtggaaggccatgccgaacctcacgaccggcgtcgagtgctggatcaccgccggcggcgcacaccacaccgtcctgtcctatgacgtcacggccgagcagatgcgcgactgggcccgcatcatggacatcgagtacgttcacatcggtgcggataccacggtggagtctctggagcacgacctgttcctgagcgaccttgcgtggaagctgaagtaaggagcgcgctatgctggaggaactgaagcgtcaggtgctggaggccaatctcctgctgccgaagcacggtctcatcacctttacctggggcaatgtctccgggatcgaccgcgccagcggtctggtcgtcatcaagccgtccggcgtcagctatgacggcatgacggtcggggatatggtcgtcgtggatctggacggcaaggtcgtcgagggcaaatggaagccctcgagcgacacgccgacgcatgtggagctgtaccgtgccttccccgggatcggcggcatcgtccacacgcattcccgctgggcaacgagctttgcgcaggcgggcgtcggcatcatccccatgggcacgacgcagggcgactacttctatggtgagatcccctgcacccgtccgatgacgccggaggagatcgcgggcgaatatgagaaggagaccggcaaggtcatcatcgagacgttcgcgggcaaggaccccgaggccatccccgccgtgctggtcaacagccacggcccgtttgcctggggaaccgatgccgaaaacgccgtgcacaatgcggtcgttctggaggaggtcgccttcatgaacttccatgcgctgcagctcagcccgaaccgcggcgcgatgcagcaggagctgctcgataagcactacctgcgcaagcacgggaaaaatgcctactacggacagggctgatctgtcttacagatagggagaagagaggaaatggagctgctggtaacggcggctccattttccgcgtccaaaggcagccggccgaagatttcggagggaagaaaagtgggaaaggaaaccgtcagggtgtcctttcccgtttcataacccgccgcagcggccaaaattgcattttgcaattttgaaagcagcttgtcaaaaaaggcccagaggac

SEQ ID NO: 11179 - DNA, 9041 bp, Unknown
  gut microbiota DNA sequence
ccgactcgtgctactataatgcctagaaataccgtaggtaatataggaattcgaaaggagcctgttttatgaaagtctattccagcatttccgagcttgtcggccacacgccgctcgtgcagctgcagcgctttgccgcggcgcgcggcctgaaggcaaacctgctggccaaggtcgaatattttaaccccgcgggcagcgtaaaggaccgcatcgcctgcgccatgctggacgatgccgagcagcgcggcctgctgaagccgggcgctgtcatcgtcgagccgacgagcggcaacaccggcatcggccttgccgccatggcggccgcgcgcggctaccgcgtcatcctgaccatgccggagaccatgagtgtcgagcgccgcaacctgctcaaggcttatggcgcgcagctcgtcctgacggacggtgcgcagggcatgaagggtgccattgccaaggcggaggagatcgccgcacagacgcccggcagcttcctgcccggccagttcacgaatccggccaaccccgccatccaccgcgccacgaccggcccggagatctggaaggatacggacgggactgtcgatattttcgttgcgggcgtcggcaccggcggcaccatcacgggcacgggcgaatatctgaagtcgcagaacccgaacgtgcgcgtcgtcgcggtcgaaccggccggttcgccggtcctgtccaagggcacgcccggtccgcacaagatccagggcatcggagcgggcttcgtaccgaagacgctcaacacctccgtctatgacgaggtcttccccgtggaaaatgaggacgccttcgccaccggccgcgcgctggcgcgggaggagggcctgctcgtcggcatttcgtccggcgcggcggtctttgcggcggcggagctggccaagcgaccggaaaatgcaggcaagaccatcgtcgccctgctcccggataccggcgaacgctacctctccactgccatgttcacggagtaaaatccgcacaggcctccagatttgtcattgcgagggcgctttgcgcccgtggcaatctcgtgcaggcattcgcaggtcgtacagcgtaacgttaaaacggtgtgcaccgattgcgtctgtagcggcgctcactgagcaccttgcgcacccatgagttttccagcacaaattcattggcgcaatgctcccaagtttgtcattgcgaggcccaaatagggccgcggcaatctcgcagtgcccagtaggatcgcggggaagctatcggcaaaatcgtaactgccttcccgagattcccacgtcgcttcgctcctcggaatgacaaatcgggggagcacggtggtgcaccagcgcccctgcgcgtttgaattgtcctgtacagacccaaaacaaaatagcgcacccgctgcgggtctccgcagcgggtgattttatgttgccctattgcaaaaacagaaagatcgccagcgtcatcagcacggagccggagtcctcgttgccctccgacaggagcagcagcaaaatgagcacgaccagcacatcaccgctgtccatgccggggatcagcccctccagaaacggcagccgcagcggtgggcgcggcggaccgggcggcgggggagaacacggcggcggtcccggcggctgcggcgcaggcggcggaccgggggaacacggctgccccggcggtgggccgggcggacgcttcggctccgggacgggcttgcgctggtattgcccgccgggcgttggggtataacggttatacatcgttcggccctcccagcaggccgccgtgctgcttcagcgcgccgcctgcgatctgcgagatgcgcgcgatgcgcatcgcgcggtcgagcttttctcgccgctccggccgtagatagggcttgagcgccgccagcagtgcctcctgcggcccgtccttctgattcgcctgccggacgagctgcaggatgccgcgcacgaaggcgtcgtcgccgggcggcgggccgggtgacggcccgggcggcggaccgggaggcgggggcgcatcgggcggccccatgccgagcgactgcgcgaatgacatcagctgcgccatggaattcgggtcgttcaggacctgactgagcttttcctccagattttccgtgccgatcacctgccctgcttcagcttttccagcagagcggccgcctgcgggtcgtccagcagcggcttcagcatggactgcgcccccgccatgtcgccgcgctgcgccgctgccgccgcctgctgcagcgtctgcccgccgccgcgggagagcagcgcaaggagctgctgtgcctccggggcgtgaaggatccgctgcgcctctttttttgcatcttcctgcttcataaatgattgcctcccgctctgtggcctgctataatatatgcaccaaacgcgaaggaggtgacgccatgaagctcctgatcctttcggattctcatggcgagcaggaattcatgcagcttgccgtgcggcgggagcggccggacgccgtgatccatctcggcgaccactgcgccgatgccgaccgtcttgcggaggaattctgcggcctgccggtcctgagcgtccgcggcaactgcgacctgtggggcccgccgcgcgcggagacgctgctccggacctttgagggcgtgcgcattttcggcacgcacgggcaccgctacggcgtcaagcaggggctgctccgcttttctcttgcggcgcaggagcagcaggcgcaggtcgcgctgttcggccatacccacattccctattgcaggcaggagggcggcctctggctgctgaatcccggcgcctgcggcggccgcgctccgagctgcggcatcgtgacggtggacggcggcaaagcagtctgctgcgtgaaagatctgttactggaggaaaccttatgatccttgcaattgatatcggcaataccaacgtcgtcctcggcggcatcgaggggaacgacatcctgtttgaggcgcgcatggcaacggactccatcaagacgtccgatcagtactgtgcggagctcaagaacattttggcgctgttcgacgtcgttccgtccatgatcgacggcacgatcgtcgcatccgtcgtgccgccggtgctcaattcgttccgcaccgccatccgcaagctgacggggaagagctgcctcgtcgtcggccccggcatccgcacgggcctgaacatccgcatggacaatcctgcggagatcggcagcgacctcatcgtcgcttccgttgcggccatccatggctatggcgcgccgctgctcatcgtggatatgggcacggcgacgaccatcacggccatcgacaaggacggcgtctataccggcggctgcatctgccccggcctgaagatctcgctcgaggcgctgaccggccgcacggcccagctccccggcatcagtctggacaagccgcagcgtgccatcggcaaaaatacgcgcgacgccatgcgcagcggcatcatgttcggtgcggcagccatgctcgacggcctgctcgaccgcatggagcaggagcttgggaccccggcaacggtcgtggcgacgggcggcatctccaaattcgttgtgccgctgtgccgcagaaagctcatctacgaccgcaccctgatgctcaagggcctgaacctgctttatcagcgcaatgtccgcgcctgagcggcgcgatccgcaggacgccgtctttgcgccggaggagctgctccgcgcgcttccgacgccctgctatgtctatgatgaggcgcagctccgcacccgcgcggcccggctgcgcagtgccttttcgtggagcgccgggttccgggcctggttcccggtgcgggcgctgccgaacccgaccgtcctgcgcatcctgcgcgaggaggggcagggggcgctgtgcgtcacggcgggggagtaccggctggcgctggccagcggcttttccccggagtccatccgctttgcgcccgagtttcccacggacgccgagctggccgttccggctgcggaccttgtgctggacgacggcgggctgctgctccggctggagcgggagcgtccgctgcctgcacggctcggcctgcggcttcggccggagccggaccgcagcttccacaaggcggaggccacgcgcttcggaatgcggacgggcgagctgctggatacggcgcaggagctgcggctcaagggtgtgcgcgaggtcggcctgagcgccatgctcggccttggcctgcgcgatcccgaggccttttccgcgctggcccgcgccctgttcacctgcgcggcggcgctgcatgacagcttcggtctgcaggtgtcctattgctgcctcggcggcggtctcccggtggcccatcgccgcacggagcgcgacgccgacatcgcggccgtctcccgcggggtgcaggcggaattttcccggatcatggagcctgccggccttggcggcgtgcccgtggagacgggtcttggccgctggctcacggcccatgcaggcatcctgcttacaacggtgacaggcgtcaagcgcggcgcgcaggattggctcggggtggatgtcagccgcgccgatctgctccggccggagctctacgggacgtatcatcatatctctgtcctcggcgacgaccgtgtggaagggcggcggcgctatgccgttggcgaccgcatcccggagccgcgcgaaccgttcggccagcgccttctgccggaatgccgcagaggcgcgcgtcttgtcatccatgacgtcggggcctacggcgcatccatgggctattcctatggtctgacgccgcactgcgcggaatatctctatcaggcggacggcacgcttcgctgcatccgccgcgcgcagcgggaggacgagctgttctccacgctcgacgaaaacccggactttacagcgccagcagaaacgccgtcagggcaagcagaaagccaacgcccatcagaagggtgacgacagtctccaccgcggcggcaatgctgccgaattttcgcttgcggcggcgcggcgcgggctgctcgggcagataggcggtcagatcgatcacggaattcatgaacatgcacttctttcctgttattttttgccgggcagctctgtttctgcggcccgaacgcttagcatgctcctatcatacaggacgaggtgtccaataaatcggactttggaggatttctatgctggaatttgaattttcttcgcacggagccggaatgatccacgcctatcgctgggagccggagggccagccgcgcggcgtggtgcagatcatccacggcatcgcggagtatgtgccgcgctatgccgggtttgcggccttcctcaatgcccacggcttgctcgtcacgggcgaggaccacatgggccacggcaagtctcacggcacggagccctgccatttttccggcggctggtgcgccgccgtggacgacagcatggagctgctgcgccgcacgcagcgggactatcccggcgtgccgtatttcgtgctgggccactccatgggctcatttttgacgcgcacgctgctgtttcgctatccggacgccgggctgcgcgccgccgtcatctgcggcacgggctggcagcctgccccggtgcttgcggcgggccttgccctgtgcgggctggaaaagctgcgccttggcgagacgggccgcagcaagctgctggcaaacctgatgttcggcgcgtataaccggaaattcccggacgcccgcacgccgaacgactggatctgcagcgatcccgaggttgttgtaaaatacacggccgacccgctgtgcgggcaggacgcgaccatcggcctgacgcgcgagatgctgcgcggcatccgcatgatccagaggcccgccaacctgcagcacatggacaaggccctcccggtatttttcatcgccggaaggagcgaccccgtgggcaatatgggccgcggcgtggaaaaggcggcggctgccttccgcgcggccgggatgcaggatgtggcctgcaagctctatgacgggcggcatgagatcctcaacgagaagaaccgccagctcgtctatgatgacgttcttgcgttttatgagcggcatctggactgatctgacgaaaattgttacctttttgtaatgtttttcggccgcagaacttgttaaaagacctctgaaccttgacgaacgggaacggttttgttaaaatggggtagaatcccgaaagaaggagttaccctatgaagcgaattctgtgcggcgcgctctctgcgctgctgatctttaccggcatacagctgcccgtgcgggcagagacggccgggaccgaggaaacggctgccgtgcagccggaggagaccgctgcgacggagccggtagagtccgttccggaggaaacgcaggctcccgagacgatcgggccggatgcgaacgagcgcgccccgcaggccatgacggtcagcgacagcggcatcgctatgctcgaggagctggagggccgcggcgtctccagcttccgcacggccctgacgcaggtggagaacagcgtgaacagcttcctctctgcaaacggcctgaccctgacgcagcagcagttcgacgcgctggcctccctgcagttcaactgctccgccgtgctctcgggctgccgcgtgacccgactgcttacgggcggggactataccgaggtcagcatggccaatgcgtggtgctcgtgggtcagcgtgggcggcagctattcttccaaaatgctcgagcggcgtatccgcgagctgcaggtctatttctatggcgactataccggaaacgagagtgaccccggcttccgctaccttgtccatatgccgaacggcggctcgctggaggacaaccgtgtcctgtgctatccgcgcggcgagacctatgccgcactgcagacggccacgcgctccggcatgtattttgccgggtggtacacggcagcctccggcggcgcgcacattaccaattccacacccgcggcggagaatctcatcgtttacgcccactggtcttcgaccccggtcgaaaacccgaatgaggacaacggcggcagcggcgaggaccctgtcacgctgaagacgagcgaggcctgcatccagtttatcaaggatcacgagggcttcagcaagttcgcctactgggactacggccagtggacgatcggctatggcacgcgctgcgaggagaatgaattccccgacggcatcacggaggaggaggccgaccagcgcctgcgcctgatgctggtggactttgaaaaaatggtggacgacgtgctcgacgcctcgccgctggtccacacgcagtcgcagtacgacgcgatgatcagctttaccttcaatctcggcccgcagtggatcaatcccaagtacaatatctatcagtatttcgtctatggcggctatacggagatggagttcgtcaataccatgggccgctggctcagctccagcagcgaggtcgttgacgggctggccaagcgccgcatcgacgaggcggatatgtatctgaacggcgtctaccgtctgggcagcacggcctatgtccgcgttgtgttcaatgccatgggcggcgaggccgaggaggactatgtttattataagacgggcagatcgcttggcatgctgccgaacgcttatcgctccggccactattttgtaggctggtatgaccgcgccctctcgggcggcacctgctatacgcccgaaacgactgcccccgcgcgcggcaacatcacgctctacgcccgctgggaggccaccggcctgccgtatcaggatatttcccgcgatgcgtggtattttgaggccgtgtctgaggcaacggaccgcggcctgttccaaggcacgagcgagacgaccttcgagccggagagcacgatgaaccgcgctatgctggcaacggtaatctaccgcatggcgggttcgcccgcaggggcggcaaaggcgcccttcacggacgtcgcggcggcggactggtttgccgatgccgttgcatgggcctatgaaaacggcgtggtcaagggcatgtcggcgacgtcttttgcgccgctgcaggagatcacgcgcgagcagcttgccgtgatgctgctgcgctatgccgacctgtgcggttatgacacatcggcccgcacctcgctgaaggactttgccgatgcggcgaaggtctcggactatgcagccgacgccatgcagtgggccgtggccaacggcatcctgaacggcacggacggcaagcgcctcgaccctgccggcagcgccacgcgcgcgcagtgcgccgcaatgctcgttcgtttcctggataagttcgaggccccggcggcgtaatttttccgaaacagcgaaaatttgtctttccgagtccgatttattggacagtaaacctgttatactttctctcagaaacaacaggagggatcgatatgcaggttcagattcgaaatgttcggggacactatgaggtctatgctgcggacgggagcttcctcttctccgcggacacgcaccgcgaggtgatggaggagctttgcagaattaccgactgacgcttgcctatgacggcacgcgctatcgcggctggcagcgtctgccgccgcccgccaaaaccgtgcaggccagcgtggaaacggcccttggcgagatcttcggccagccgctcgagatcagcggcagcggccgcacggatgccggggtgcatgcggcctgtcaggtcgcgtcgttccatgcgccgaagcggccaacggacgaggtgctggcgcagctgcgccgccttctgccggaggatatcggcgcgctggcgctcgactatgcacccgagcgcttccacgcccgcctttcggccgtcgagaagacctatgtctaccgtctctggaacagcgaccggccggacgtgtttgcccggcgctaccgcgcctgtgacccgcgtccgctggactgtgacgccatgcgcgccggtgcggccggactggtgggaacacatgacttttttacgttctgcgccaaccggcagatgaaaaagtctacggtgcgcacgctgcgccgccttga

SEQ ID NO: 11180 - DNA, 8820 bp, Unknown
  gut microbiota DNA sequence
ctgcccgcactgttcgacgcccgctgccgcgcgctggcaggggagacggccccggcaaagggcctgtggctcatggaggtgcgatattgaacattcagatcttcggccgctcgaagtgctttgacacgaagaaggccgagcgatatttcaaggagcgccgcatccgcgtgcagcagatcgacctgctccgctacggcatgtccggcggagaatttgacagcgtgctgcgcgccgtcggcggtgtggataagctcatcgactggtcgcgccgcgacccggacatcgatctgctgcgttatatggacgacgtgcgcgccaaggaggacaagctgtttgaacggccggagctcatgcgcacgccggtcgtccgcaacggcaggaaggcgaccgtgggctattgcccggacgtctggaagcaatgggaggagagcgagaaatgaagctgcagcttgcaagactcatcaagaatatctgctatgccgcgggctgtgcatcggcagtgctcagcctcgcgctgaagagcgccccgcagacggcgcagcgctggctgctgttcggcggcatcgccctgctggtgctgggcttccttgtcagcgtgacgttctaccgctgcccacactgccaccgggtgctgcctgccaaccgcgggaagatggacgactgcccgtattgcaaactccctctgcgggatacgaaatgacggcccgcatcacgatcccgccgcaggttcaggcactgctccggcagctgaacgcggcgggtttttctgcctatgcggtcggtggctgcgtgcgcgacagcctgctcggctgcgcgccgcaggactgggatatctgcacgagcgccgcgccggagcagacggaggtctgctttgccgcggaccgcaccgtcctgacgggcgcgcgctacggcacggtcacggtcgtgcgtgggggcgtgccctatgagatcacgacgttccgtgccgagtccggctatgccgacagccgccatccggaccgggtcgactttctgcgcgagctggcacccgatctggcgcgccgcgattttacggtcaacgccatggcggccgacgcagcgggcaccgtgacggacctcttcggcgggcaggacgacctgcgccgcggcgtgatccgctgcgtcggcgatccggcggagcgctttgcggaggatgccctgcggatgctgcgcgcactgcgttttgcggcgcggctgtccttccgcatcgacggagagacggctgccgccatccatgcggcccggacccggctgcgcgccgttgcgccggagcgcctgcacaaggagcttagcggtattctgtgcggcaggcaggctgctgcgctgctggaggaattctccgatgtgctgttcgagctcatcccggagcttgccccctgtcagggctttcggcagtataatccgcatcatacgcgcgatgtctggacacacacgctggccgttgtggacggcgttccgcccgaggagccgctccggctggcggcactgctgcacgatgccggaaagccggcgacatttttcttcgataaaaatctcgtcggccatttctacggccacccggccgccggggccgccgtgacggcggaggttctgcgccgcctgcgctatgaccgggcgacggcggaattcgtcacgcagctcgtcgcggtgcacggccggcccattccggatgacctgcgcggcatgcggcgcatgctggcccgcctcggtgcgccggtctgccgcgcactgatcctgctgcgctgcgccgatgccatcggcaccggcacggcggatgctgcggagcagaccgcccggtgcgaggctgcgctgtccctgctcgcgcaggcggagaagggctgcagcagcgtttctgcccttgcagtctccggccgcgacctgctggcccttggcatgacgcccggaccggccgtcggcgccgttctgcggcggctgctggatgccgttctggacggctccgtgccgaacgaccgtgcatccctgctgaagcttgcttccgagattgggaataatgcctaaaaatgaggagaaatatttggctgcaattgacaatgtgataaaatagtgctattataatataacattttgaacgagaggggcgatcgcatgggatcttttgtgctgcacggcaacattatcgacagtgaatctccggagcggctccgcgttgcggcagattcctatctggtttgcgaggagggacgctgcaccggtgtcttttcggcgctgccggagcgattttccggcctgccgctgacggatttcggcgaccgcctcatcctgccgggcatgacggacctccatctgcatgcgccgcagtttgccttccgtgggctgggtatggatctggagctgctggactggctaaacgcccacacgttcccggaggaggccaaatacgccgatctcggctatgccgcgctggcctatggccagttcgtggactgcctgcgccgcagcgccacgacgcgcgccgtcgtgttcggcacggtgcaccccgccgccacgacccttctgatggagctgctggaggccagcggccttgtcagctatgtcggcaaggtgaacatggaccgcgactgtcccgaggccctgcgcgaggcggatgcggcggcctcgctggccgcaacggagcaatggctggccagcgcgcgcttcgcccatacaaagccgatcctgacgccgcgcttcgtcccgtcgtgcagcgatgctctgctgcaggggcttggcgagctggcggcccggcgcggcctgccggtgcagagccatctttccgaaaatctcggtgagatcgcccttgtgcagtccctgtgcccgcagacggacttctatgccgaggcctatgaccgctgcggcctgctttcgcagccgtgcatcatggcccactgcgtgcactgcccgccggaggagcaggacctgctgcaggcgcgcggtgtgttcatcgcgcattcgccgctctccaattccaacctcagctccggcattgcaccggtctccgcttatctggcgcgcggcctgcgcgttggcctcggctcggaccttgccgccggagagacggagaatctgttccgcgtcatggcggaggccatccgcgtctcgaagctccgctggcgtctgctcgacgacaccactgcgcccctgacggtcgcgcaggcgttctatctggccacgcgcggcggcggtgcgttcttcggagaggtcggctgcttcgagccgggctttgcgctggatgccgtcgtgctggacgacagcgctctggtccatccgcaggagctgaccccgaacgagcgcctcgagcgctgcatctatctggcagacgagcgccatatcgcggcaaaatatgtcgcgggtacgcggctgttctgatagaaataaccggcgctcccggtgcatccgtgccggcagactattttgaccgaaagaggaatcaagacccctggttttcaacagcgccatatttctgatctgttttctgccgctctttttcctgtgctattatctgctacccgcgcggttccgcaatgcgttcctcctcgtggggagccttgggttctatgcgtggggcgatccgggcaatatcctgctcctgctggctgcctcggcggcgacctacggcttcgggcgcgccatggctccgtcagccccgaaggtccgccgcctcggctgatcttgccgcagccatgcaggaaaacggcctgctggacggtgtggtgctgcccgcggcggaggactttgcctggcaggaccttgactgtccctatcgcggtgacctgaaccggcgcttctcctatctgttttccatgcaggaggagatcccgtattattccatccgcgagacgtccgagctgcagtattatgatgccaaagacgtcgaagttcctcgtgagtctatttgggccagagggctgcagagcggagaggagatgcagtataacctgctctcgacggaaaacctcgggttttaccgcatctgtaatcccaatgcgcgctctgcgcggcgtgttctgattctgaaggattccatggaggacccgatgacggactattgggcggagctgttttcggagatcatcgtgatcgacccgcgcagctacctgcgtgaggaatccctgccggagctggtggcggagtatgacatcgatatggcgctgttcctgtatcaccagaacaatctcagcgaggaactcatcgattttctgaatcgcggcgaataagtgtataaaatcagtctgtcgaaaaacctgctcagccggaggtttcggagggaagaaaagtgtgaaagactaactattaaaagtcaagcccgaaatgcggaggagcggcaaaaatttagacggttcaaaaggggtatagcaaagctgacgtccttctggacgcctacttgagcttatgaaaaatcggggttatgctgcggcgcagtatggccgctgagatttctccattgcaaaaatcagacgtaccaatttctttgccgcatgagagagcgcaacgttgtagtgcttcccctcggcccgtttcttggcaaggtaagcggcaaaggtcgggtcccaatgacagacgtgttttgtggcattgtaaagagcgtagcgcaagtaacgggaacctcgtttttccatgtgcgagtaggctccagacagtgaaagctgcccggactggtaagtggaaggtgacatccctgcgtatgcgaggattttatctggcgagtcgaagcgagagaaatcacctatttcagccaggataaccgctcccatacggacacccatgcctgggatcgtagtaatgggagactgcatttcgtccacgatggcttgaatggcagtttcaatatcttcgatttcggcgtccaattcacgaatcaagcgaatcgtgtgctgtaattcaagagacttggcgggcatgacagagccgactgaggagcgtgccgcattccgaatggtctcggccatctcctggccatagcggccttgagaagcgtttttcaaaactgctttcaaatgcgtcatgtgcgtgctggaaatctgtttggcgccaggaaattcgctgagaagtgcgtaaacagaggccgaatgcagtgacgagaccaacttttcaagctctgggaacaagattgtgaccagacgggaaacggactgcttcagctttgctcgttcacgaactttgtcaaaccggtatcttgtgagtgactttagctcctcgttgtggtatactgtgtctgtgtaggacttgaggtccacatcagacatgagcatagccgcaatggttcgcgcatcgacacggtctgtcttcgttttgcgaaggctcaggctttttcggtagagattggtgtgcagcggattgatgacataggtgggtagacctttgtcaagaagaaatccgaggatgttgtagctgtagtgtccggtagcctcaagccctacttttattttatcctccggacgagtactgcggcggattgcctgcaagagcgtgtcgaagccctctgcgttgttcgggatggtgaatacatctgccaggatttcaccttccgagctgatgatgaagcagtcgtgcttgtccttggccacgtcaattcctacgcaaaccatgagaatacctccgatgtgtttatttgatgctgattccacagaactctttactcttgtagccttgttccacataaaccgtctggcggtatctaactaattaacaatactgtaaagggctgtggttggagcctttcaaaaaccgtctagcggtagggaaccgaaaccaatccacagcatcccttacagtgtagcacagcccttggataggggctataaaaactactactctataatacaaggaaaccgtcagggtttcctttcgcgttcaataacccgccgcagcggcagaattgcaaaataatactacaaaatttcattttgcaattctgaaagcagcttggcgaaaaatcccgaagggacttttttgacaagctggtataaaatgaccctcccggcgcacgatagcgtcgggagggatttttatgtggttacagaccggaaaaccgttcggccagcagatcgaaaacgacccggaggcgtattttctgctcggctcgctctcaccggaggagcgcaggctgcttgacccacatgatctgcgcaacgcggcggcgctgcgggcgttcgtaacgcgcctgcgcagacgcgagaattaggaaccaatcatctgcgctgagcggcgaatttcctgctgcttgaatcagagctgccttatgcccggccgttgccaaagaagaacagacccagcataccgggaccgacatgcgcgcccgtgaacggctcgtgcgggcagatgatcagctccttcggctcggcgatggcacggatgcgctcggccagcgcctgtgcgtcctcggggcagtcgccgtgcgtgatggcaacgcgctgcagctccgggtggacggcgcgcgtctcatagcgcgcggccagattcgcaatggcgcgggcgcggccgcgcaccttttcgcaggtgacgatgtggccctcctcatcgccgcggaggatgggcttgaggttcagcaccgtgccgaccagtgcggcggctgcctgcacacggcccgtgcggtgcaggaacatcaggtcgctgaccgtgaaaaattcgcagaggttctggacctcctgctccagcacggcagtggcctctgcggcactgcggccctcgtcccgcagctcagctgcgcggcaggccagcaggccggtgccgaagcccgcacccatggagtccacggggcagacggtccgctccgggaattcgtcgcgcagctccgcggccgcgatgcacgcggcttgataggtgccgctgatcccggcagacaggccgacatacacaacatccagcccctgctccagcgcggggcggaaatgatcgaggaagacctgcgtgttgagcagggaggttgtgacgcgcttgccctgccgcagcagttcatagtaggtgtgggcatcaaaggcctcgatgtcgccgccatagatgatctgctttccgtccaccgtatagctgcaggggagcacccggatcccaaagtgctgcagcaggctgcccggcagattggagcagctgtccgtaaataccgcaaaagacataaaagtccctccgtttcggctctgctgacggcagggccttttctgttatacagtataacagattttacaaagaaaagcaatcaccgcggcgggaaatttacaaaccgtttccgaaattccgggcttgacaaacagacctatctatgctatactccaaacagatacaaaagtatcgatataaacatatcaaataaagcggaaggaagtggtcttttatgaagggttacgcaatgcttgggatcggaaaaacgggttggattgaaaaggaacgcccgctgtgcggaccgctggacgccattgtgcgccccatcgccgtctcgccctgcacttctgacgtccataccgtgtgggagggcgccatcggcgaccgccacaacatgatcctcggtcacgaggccgtgggtgaggtcgttgaggtcggcgcgctcgtgcgcgacttcaagtgcggcgaccgcgtcatcatccctgccatcacgcccgactggggtgcgctcgaatcgcaggcgggctattccatgcactccggcggcatgctggcgggctggaaattctcgaacttcaaggacggcgtctttgccgaattcttccacgtcaacgaggccgatgccaacatggctcacctgcctgcggatgtcgatccggtcgcggccgtcatgctggcggacatggtcccaacgggcttccacggcgtggagctggccgatgtgcagttcggcgatgatgtctgcgtcgtcggcatcggcccggtcggcctgatgtccgttgcgggcgcggccctgcacggtgcggcacagctgtttgcagtcggctcgcgtccggtctgcgcggaggcggcgcggcgctacggcgcaacggaaatcctgaactaccgcgagggcgacatcgttgcgcaggtcatggaaaagacgaacggccgcggcgtggaccgcgtgatcatcgcgggcggcgatgccgagtgcacgttcggcgaggccgtgaagatgctcaagccgggtggccgcatcggcaatgtcaactatctcggcagcggcgagaatgtcctcatcccgcgcgcggaatggggctgcggcatgggccacaagaccatcgcgggcggcctgatgcccggcggccgcctgcgcatggagaagctggccgcgctgctgcagaccggccgcctcgataccctgccgctcatcacgcatcgcttccacggctttgagcacatggaggaggccctgctgctgatgaagaacaaaccccgcgacctcatcaagccggtcgtgatcctcgattgagcgatttgaagggcctgaaaaaatgaatagaagcagcacgaggaccgcaaaggggagtgaccgtttccggctctcttgccaatgccacaagtgctgcttccaaagccatgataacatgcgtggacgatcgtgtcaccccccatatcgtcacgcatttcgggccgggcgcatcatacgcccggcccacttgcgtacccgatgctcacgcaaactatcgttaaaatgctgatggctcccgatttgtcattgcgagggcgctttgcgcccgtggcaatctcgggaaggcagtgccgtttcgtaccggctgccgttaaaatggcacgcgccgattgcgtctgtagcggcgctcactgcgcagccgttggcggctttgccgccttacggatgcggcgtgccctttacgggcggtgagcgcc

SEQ ID NO: 11181 - DNA, 2628 bp, Unknown
  gut microbiota DNA sequence
agaagccgtcctcgttgggctcggtgtttcttttgcgctggtcaatatctgtctgatagccctcaatgcgctgttccaatgactggattttctgcggaaactccttgataatctgatcctccagagcatagcgctggctcagatggttggccttgagcagcttcagacgggacacatcaatgtccagatccatcttctccttgatgtggggatcgccggcgcacagcgccttgatttccgcatagctcagggcggtttcgtcaatgtcctccgcagagcgcaccggggatttgctggtcatgatctgcccaataaaacgcagcaaccaaaaccggaagctccagccgcgttcccttgacaacctcaaatagcttctgcatttgctctgcgtcaagaaaggtcggctgaaacgagttcttcctcggcctatccaccttcatggcaacattctgcggtaccatgtcggttttcatcgcatacttcaaggcctgataaattaccgcatgatagtggataaccgaattcggcgtgacggttttcagcttctccgtatccacgctgacggacggatgaccttcaaattccagggaggcaaaacgctcacctcttattgacaattctctaatcacgttgtataatcggtatataccggaaacaaaggagggcgtgtccatgccaagaccgccacggtgccgtcggatttgtgacgcaccgcaagtcgataaattctgccccaacgggagcgaggatgtcgagccgatcctgctgacactggacgagtacgaggtcattcggctggttgacttggagcagcaaacccacgagcagtgtgccgtgcaaatggatatttcccgctctaccgtgcaggagatttacgaagtcgcacggcgcaagatcgcagcgtgccttgtccacgggaaaccgctgcatatcacagggggaaactaccgcatctgcggaggacaggaggcagcccactgcggccgttgctgccggatgcagagaaccaacacagaaaaatccaacaaaaaatgcaaaggagattccattatgaaaattgcagttacctatgaaaacggtcaaatttttcagcatttcggccacaccgaacagttcaagctttatgaagctgcggacggcaaagtcatccgtgcggaagtcgttgacaccaacggcagcggtcacggcgcactggcaggcttcctgatgcagaacggcgtggacactttgatctgcggaggcatcggcggtggtgcgcaggcagctctggccgaggcgggtatcaagctctatggcggtgtcagcggggacgctgacgcggcggtgagcgcattgctcagcggaagtttgggctacgatcccaatgttcactgtgaccaccatgaccacgagcacggcgaagctggtcacacctgcggtgaccacggctgcggcaagcatagctgccattgatatggaacaaacactgacacagcttccgttctggtcatccttgactgaacacgaaatggaaacgctgcgccgaagtgcctttgtccgtcattatgaaaagggtgcgttcgtacacaccagcgacaacgaatgtcttggaatggtgttcgtcctttccggcgagatccgcacctatcttctctccgaggagggccgggaggtaacactgttccgcctgtatccgggccagctttgcgtgctttctgcctcctgtgtgatcagtcagatcacctttgatacgcaaatgaccgcaggaatggatacgtacgttctgattatccctgcaaatatcactgccgcgctcaaggagaaaaatctatatgtccgctgcttcctctatgagctggcaacgaaacggttttctgatgtgatgtgggcgatgcagcagatcatgttcaagggattggaccggcggctggcagaatttctccttgccgaagcggagcgtaccggctccgacaccatacgcatgacccatgagcagatcgcccagcacatcagctcggcgcgggaggcagtggcacggatgctcaaatgcttttcggaggacgggctggtggagctaagacgaggcgcgatcacgctgcgggatacagatggactccatcgtctgaaataaaaatgcgactatacaataaaaaattgaaaatgaagtccggtgcttaaaaagcaccggactttttttatcaatgtaacctcgtcacagaaagatactttgtcctgcggtatgataaagccacaatcaagaaagaggtggcgaacatgaaaatcaagctcaatcccgatcaggagattgtcaataccatccgggaaggactcaagcgcaccggcggatactgtccctgccgcgtggagcgtacggaggaaaccaaatgcatgtgtcaggagtttaaggatcagattgccgatcctgatttcgagggctactgccactgtatgctctattacaaatctttgcaggattaagggaggaacgctatgctgtcaaagaaactggctgccgtagatcagacgcggtgcgttgcctgcggcgtgtgtgaaaatacctgtccgctgggggctgtcaaggtgcgccggggctgctacgccgctgtggaggcggaacgatgcgtaggctgcggcaagtgcgcaaagctc

SEQ ID NO: 11182 - DNA, 825 bp, Unknown
  gut microbiota DNA sequence
ggcagcacgccgctgttcgaaaaccgctacgcttatgccacgcaaagcggcaatcagagcacggcgctcgtcgaattcttcaactaccgcctcgcctcggacgacggcagcggcgatatcatcgtcggctaccagtacgagtacgacgacggcggcaacatcacggacatcaaggccgaggtcgacggcgcgctgatcccgctggagcattacgagtacgacgagaagcagggccagctcaaggaagcgattcgctatgaaaatggcgtagaagccgacagatggacctattcctatgacacggcaggaaatatcctgtcagaggaccacgagggaagcaatagcgagctgcacgagtacgcctacgaagacggccgttggggcgacctgctgacctccgtcgacggcatcgacctcgagtacgacggcagcggcaacccgacgctttacgcgaacgggacggagctgctctggagcatggagtggcagaacggccgccagctcagccgcgcggctaccgagcgcgacagcacgaccgaggacgtcctcgattttgcctacgacgcaaacggcatccgcacgagtaagactgttacgcggaatacttaccgccccgttcagacttataaagttactttcgtggccgatgggaagaccgtcaaaacgatgtccgtcacggagggctacaccctcaaggacagcgattacccggccgtccccgaaaaggcgggctacaccggcgcgtggcagcggtatacctcgcacgtccaaagcaatgtgacggtcagcgcgacctatacgaggctcaccgcgcagtatgccgtt

SEQ ID NO: 11183 - DNA, 207 bp, Unknown
  gut microbiota DNA sequence
aactgaaacatctaagtagggcgaggaaaagtaatcaaccgagattccgaaagtagtggcgagcgaaatcggaagaggccaaaccgtacgtagcaatatgtgcggggttgtggacggcgatatcggtaagcttcgttagacgaatggtctgggaaggccagtcaaagagtgtgagagccacgtagtcgaaaatgaagtgaacgtagc

SEQ ID NO: 11184 - DNA, 2913 bp, Unknown
  gut microbiota DNA sequence
catcccatcgacgcatgctccgcccggagggggggtggcctcgcttccgttctgccgccggttttggttagtcagtgctaactcatgttggaaagaaatccgcccagtggcggtccggatatccggttctcatttcccgtatatcctagtgtattttaccggagacatcgggtattgtcaagatggatttgtgtaaaattttcctgcggcgaacacccggttcgccgcaggtcagaatcagacaatatactgcaggacctcggtctcgtcctcgccgttgagatagatgcgcgggatgcgcttgttgatgccgcacatcagctcatacgggatggtcccgaggcggttggcaaggctcgtcagctcgatgctgtcgccgccatcctcgccgaagaccgtgacgacgtcgccgacctttgcctccggcacgcgcgtgatatcgaccatgcacatgtccatgcagatgcggccgacctgcggcacgcgcctgccgtgcagcaggaacgagacgttgctcgacaggctgcgcgggaagccgtcagcatagccgatgccgacgacggcaatgcgggccgggtcctccgtcgtgtaggtgcggccatagctgatcgtgatattcggctcaaagtcgcggatctggaagatcgtggagcgcagggacatcacgggccgcagatcgatcatgccgcgcaggtcctccgacgggagcacaccgtaggtcgcgatgccggggcggaccatatcgagcgcatactcgggatagagaatggtcgcaccgctgttgcagcagtggcggatctccggctcgatgcccacgcccttgagggcgctcagcatctgcgtgaagcgctcgaactgcgtatgcgtaaaattcgcgtcggctccgtcgatggaatccgcgaccgggaaatgcatgaaaattccctcgatgagaagcttgggcatctgcgcaacttccttcagctcctcgaccgtcttcgggtggtcataggcaaagaagccgaggcgcgacatgcccgtatccagcttgatgtggaccttgaggcggcgctctgagcccttgagctcctcgtgcagcgcgcgggcatactcgaggctgtggacctcctgccgcagtcccatggcgaccagatcgcgcgcataggcaggcggcgtatagcccaaaatcaggatgggacggcggatgccgccgcggcggagctgcatggcctcctccagattggagacggcaaggaactccgcgcccagctcacacagatggcggctgatgggcacggcaccgtggccgtaggcgtcagccttgaccacgccgagaaggcggcagccggatgggatcttcgcccggagctgctgatagttatgattcaggttgtcgagcgaaatatccgcccaggttctctttaaataatccatgtaaatttacttccgttatttcatactgaactctgatatcgtcaaattcagaatacgctgaccattatagcatacttccgcataaattggtatgccattttcaaaccaggtgtccaccttgagcattttttcttcataatccttctcataggtcgcgcggaaccggccgtcctcctccccgcccgcggcgagataggcggaggaccagcaatatgccacgacggccggaccggccgccggagcgagccttccgtttgccaacaggccgaagtccatcatcaggccatcataggtgacggttccgccggtctcgtccaccgctgcagtgattccggccagcgtctccggcgcggcgacggtgaaatgcgtcgggccgttcacctctgtctcgcagtcgagcgcaaacgggacgacataatctccgtaatctgccgtcagctccgcgcggaagctgcatcccccggcctgcaccagcgaggcgcggaacgcgatggcgggcgaaacgccctggcttcttcctccgcagccgccgagcagcaggcagaggcacatcatcagtacggcgcagcctcgccgcacgcgcatcccctcctatggcaatagatatggcagctccgccgcaacgtccgagggcagcaggccgtactcccccatccgggcggcgcagcggtcggccgccgttccgtggagccacgcagccgcagccgctgcatgcacgggcggcaggccctgccccagcagtgagacgagaatgcccgccagcacgtcgccgctcccgcccgtagcaaggcccggattgccgcagcggttctcccagcgctcgtccgcgccgcagatggcagtccggtgtcctttgagcagcaccgtcgcgccggtcttctccgcaagcgccgcggccgcgcccatgcggtcctcccccggcagcctgcccatcaggcggcggtattcgccgtcgtgcggcgtgagcaccacgggacaggccgcgccgcgcagtacatctatatgcccctcgagcacgtttatgccatcggcatccaccacaacagggcaggatgcattggcaagcacagcctgcacggcggcaaacgtcccggcacttctgcccaggccgcagccaatcaggcaggcatcgcagccggaaagccgcgccagaatttccggaacggcgctctctgccaacatgccgccctgcgcgagaagcgggaacaccatcggctcgagcagcttccccgccacgataggatacaccggctccggcacgccgacgaagatcagccccgcgccggaccgcgccgcacccatggccgccagcgccggagcgcccgtatagccgacggccccgcacagcagcagaatgcggccgaaatcgcccttgtgcgtctcgcgcgcccgccgcgggagccagccgcagagccgctccgcgtccatgaccgaaatatccgccatttttctttcccccatctgccgcaatgcggctcaaaaactgtcaaaaaagcctcg

SEQ ID NO: 11185 - DNA, 2412 bp, Unknown
  gut microbiota DNA sequence
agctgcgatcatgcggtacagccataacaaaaaaacgcctctcctgccggagaagcgcacaacaaggaacaaaacagggccttttatccccgcttccgggcgcgcaaaaccgacagaccggtcccctgaacccaaatagaacccgctgcaaagtacagataggacattctgcgcgcctcctttcgtaaaatctgatatccagtataggggaaaactgcgactttgtcaaccctgatgtccgaaatatttcgggcggcagcgcataattcatcgagagcgttcggcgagagctttttgtcaagacaaggcttgaaacgtgcagagtgctttgtgtatctgcagggggcaaagccgccaacggctgtgcaatacatcaggcctttcgaaccgatagatcggcgaaaaaagatccggcgaaggccgaagatgcaattgtgcggtgctgttccagggtttttcttgctgtttctctgtatttgtggtatgatcgggggagaattgcaacggaaaggaacgaagaaaccgatgaaatggatcattgcctccgatctgcacggctcggcccactactgccgccagctcctcgaggcctggaagcgcgaggaagcgccgcgcatgctcttcctcggcgatctgctgtatcacggcccgcgcaacgacctgcccgagggctatgcgccgaaggaggtcatcgccctgctgcaggagcggcaggccgacattttctgcgtgcgcggcaactgcgaggccgaggtcgaccagatggtgctgcccttccccgttcttgcggactactgcctgctcgagtcggcgggccatctcatctatgccacgcacggccaccattttaacgaggaccatctgccgcccctgcatccgggcgacgtcctgctccacggccacacgcacatcccccgccgcaccctgcgcgacggcgtctatgtcctgaatcccggctccgtctccatcccgaaggccgggagctggcatggctatatgacgctcgaggacggcgtattcacctggaagacgctctccggcgacgtgcgcgacacgctgcggctctgagggggcttattatggaattcacagcagcgcaggatggcctgcgcgtggatgtctttctggcgggctgcctgccggagctgacccgcagcgccgtgcagcgcctgctcgctgagggcggcgtgacctgcggcggcgcgcccgtgcggaaaaatgcgcgcacggaggccggagccgtctacgccgtcactctgccggaggcgcggcccgtggagaccgctgcacaggatatcccgctcgatatcgtctatgaggacggggacgtgctcgtcatcaataagccgaaggggcttgtcgttcacccggccgccgggcacgaggacggcacgctcgtcaacgccctgctctatcactgcggcgacagcctgtccggcgtgggcggcgagcgccgccccggcatcgtccaccgcatcgaccgcgacacgaccggcctgctcatcgtggcgaagaacgattttgcccaccagcgccttgccgcccagctcagcgaccacacgctgcgccgcacctatgagtgcatcgtccgcggcggcttccgcgaggacagcggcacggtcaatgcgcccatcggccgcgacccgcgcgatcgcaagcgcatggccgttacggagaagaacagccgcgaggccgtgacgcactgggaggtcatcgcgcgctacgggcagtatacccatctgcgctgccgtctggagaccggccgcacgcaccagatccgcgtgcacatggcgtggatccgccaccccatcgcgggcgacccggtctacggcatcggcaagccggagctcggcctgcattcgcagtgcctccacgcgaaggagctgacgttcctgcacccccgcaccggcgaggagatgacgctctcctgccccctgccggaggagtttgagaatgcgctgaaaaaactgcagaggacaatgggactgtaggctggcgtcctgcacccgccattgtaggggcgaggacagccaggcccggcgctgcacttgcagccggtacaagccgctgttaaaatggcgactgcccccgaattgtcattgcgagggcgctttgcgcccgtggcaatctcctgcaacagcttgcgaattcgccgaggccttcctgctatctaccattgtactgcgagattgccacgtcggcctgcggcctcctcgcaatgacaaatcggaggcttttaccattttaacgacagcctgttgattgcgccggtgctgcgccgggagcggcatgccgctcccctgcaacgcttcatcgataccctcattttcccataaaaccaccgcaagccggaggcattgcctccggcttggtgcatattctcgggtgctgccctagaactttcctcctccg

SEQ ID NO: 11186 - DNA, 14392 bp, Unknown
  gut microbiota DNA sequence
ggtcgttgtccttcggacgcgccgtgcgcgtcgtgttggcatagaggaacaggtcggactgctgcgtcaggtgcaggctgtcctgcacaacatagctgttcgcagcgggctgacggcgcaccgtcttatgcttcgcagccatcacgccgaccgtgatgccgccgatgagcgcgccgaacagcaggcaggccacgacccacaggaagcccggcgcttcaaacggctcgtcaggcaggttccccgtgtcataggctgagccgtttctcgcttggttgacataatcctggcattcctccgcgaacgtggaaaatgccgcggcatattcagcgttcgagagctggggcaggaagcggtccaccatggcctcgcgcccggcgggggtgatggcggtgatgccgaagccatgcgtggcgatgtaccagtcgcgcgtgtccatggccacgagcaggagcgcgccgtcgcggtcctcgccgaggccgtagttgttgtaccagaagaagtcctccgcgtaattccgcggcgtttcgccgtcgagcgagtcgacggtcacgatgacgatgtcaaactgcagcgcctcgctgcggctgtcgaggtcggccagcagcgcttccgcgtcatccgccatcagcaggtctgcgttgtccaccagccggggcaggtccgccgcagcagcgggcaggacgagcagcgccagcagggcaagcagcagcgtgagcagggtaagcgttcgtttcatatccgtgccctccctcagtgcagcagctgccacaggcacacaaggccataggccgccgcagccgcgatgccgctgaccagaccgaaccagcgccactttttccccttgtccacgggaaggtcgccgacgaatttgccggtctggccgttcatggcgaacgagaacgttttgccgttccatacggtgttcagcagccacacggggtagagcgcatagtgcaccctgccgttggccaggcggacggatgtgctctcgggcacgacggtgtgatagcccacgacggtcgaggcgaacacggactccgtgctctttttcacgcgctcgttcgcgcggccgatgctgtcgtctgcgttcacatcatagcggtcggcaagatagccggacaggtaggccgtctgaaaatcgaccgcgctggagaagtcaaacggctcgatggattccatcaggtcgttcggcatgcgggaagagccgtccaccgggacgtgggtgaagctgaggtcgccgctgcgcaggatggcatagtgctgcgtctcggtgtagtcatagtcgcggtcgctccaggtgcggatgcgcgtcgcgtggtagcggatgtgggcgtcggcgtcggcgtcgaacagccagaacggcacatacacgcccttgacctcggagatgcggttttcgctgcggaacagattcggcagcaggcgcttgcccttcatatggttgcgcagggcggcctcggccgcctttttgtcgagcttgaagggaatgacgtagtcgggcttcaggtcgccggacaggcggccggtcagcacgatgggattgccgcagaacgggcaggccgtcgcggcggtgctctcgtcgcacaccagctcgccgccgcagctcttgcaggtgtaaacgcccatctgcacgtcgtcccacggctgctgcgccgcgtcccagtgcatgtcgtccgcggcgtcctgcttcagcgcgtcgtcatagccctcgagcgtctctacgtcgaaggtcgtgtcgcagtacgggcacttcatcttctgcaggccgctgtcgaattccaggcggccgccgcagcaggggcatttgtactggatcgtttcagccatgcgaggttcccaccctttcgtcagacctgatcgttgaagtcaaaggggtcgccgcactcgggacagaatttcggcggatggcgcggatcctccggctgccagccgcacttgtcgcagcggtactgcggctcgttcgcgggcttcttcgcaccgcagttctggcagaacttgccctgattcaccgtgccgcaggcgcaggtccagccctcggcagggcgcggcttgccgcaggcggagcagaattttccggtgttcctctggccgcaggtgcacgtccagccgtttgcggcaggctgcggcttctttgctccgcagctcgggcagaagttgcccgtcgccgttgcgccgcagctgcatttccagccgtctgcagccggtgcagccggtgcagccttctgctgctggcccatggcataaagctcctgcgcattgaggccgcctgcctgctgggccatgcccatgcccatgaagcccatcatcgcgccgttcttgttcccggcggcggtcttcatggcctcggcctgtgcacccgtgagcgtggcagccgccatggacggatcgcgcagcatggccgtgcgctgcgcctgcttgatgagctccgcgtcctcctcggggaggctgatggggttcatggcaatggagacgacctgcaggccgcgcagctcgccccacttgcgagagagcgtctcgttcatgaacgtcgaaagctcctcggcgtgggcgggcagggcgctcgggcggacctccagctcggagatgcgggcaaaggcgggctgcagcgcgctgatgaactccgtcttgagcatgctgtcgatctcggagcgcttgtagtcgccctcgacattgccgcacacatgcgtgtagaacagcatggggtcggaaattttgtaggaatacacgccgttgcagcggacggacacgtcgatgtccagcccgatgttgcggtcaacgacgcggaaggggatcggggtggccgtgccgaacttgttgtccacgatctccttggtattgaagtagtaaacgcgctggtccttgcccgtgtctccgccgaacgtgaagcggcggcctacggtcttgaacgtatcgagcaggctcttgccgaatgagccggtaaagatgctcggctccgtcgaggcgtcaaagacgaactggcccggctcggcgcagaattccacgaccttgccctgctccacgatcatcatgcactggccgtccgccacggcgatgacggagccgttggagatgatgttgtcgctgcccttcgtgttggagctgcgcccggagacgcgcttttggcccttgacggccagcacctccggcgacaacgcgtcgcagtagaaaaattccttccattgatcggcgagcgtgccgccgagcgagccgacaccggctttgatcagacccataatatgctcccttccctgctgcaagcagatttttttcccattataccagctttgacgggaaaatggtagccctcggcgcagagaattttgcgtgacaggggatgcgcaggcgcatcgcaagtccatttcggtgtgcaaaaaagcctcgcagagttcgccgcccgcaggcggacgatccgtgcgcgcagcggactgcggcccgattgccggaaaagcctgaagggattttccggcagtaaaaaacaggccgcattgctgcggcctgttcggaaaatatgcaattactcagccttcgggcctgcggcgaccagcgccttaccggcctcgttgccctcgtacttaacgaagttcttgacgaagcgggaggccagatcctttgccttctcgtcccactgggaagcatcagcataggtgtcgcgcggatcgaggatcttcggatcgacgccgggcagctccgtggggacctcgaaattgaagtacgggatcttcttcgtgggggcgttcaggatcgcgccgctcaggatggcgtcgatgatgccgcgggtgtccttgatggagatgcgcttgccggtgccgttccagccggtgttgaccagataggcctttgcgccgctcttttccatcttcttgacgagctcttcggcgtacttcgtcggatgcagctcgaggaaggcctggccgaagcaggcggagaacgtcggggtcggctcggtgatgccgcgctcggtgccggccagcttcgcggtgaagccggagaggaagtagtacttcgtctgctccggggtcaggacggaaacgggaggcagaacgccgaaggcatctgcggacaggaagatgacgttcttcgcagcgggcgcagaggagatcgggcggacaatgttctgaatgtggttgatcgggtaggagacgcgggtgttctcggtgacggacttgtcggcaaagtcgatcttgccgttctcgtcgagcgtgacgttctcgagcagggcgttgcgcttgatggcattgtagatgtcgggctcggagtccttgtcaaggttgatgaccttggcgtagcagccgccctcgaagttgaacacgccgttgtcgtcccagccgtgctcgtcatcgccgatgagaaggcgcttcggatcggtggacagcgtggtcttgccggtgccggacaggccgaagaagatggcagtattctcgccgttcatgtcggtgttggcggagcagtgcatggaggccaggcccttgagcggcaggtagtagttcatcatggagaacatgcccttcttcatctcgccgccgtaccaggtgttgatgatgacctgctcacgggaggtgatgttgaaggccacgcaggtctcggagttcaggccgagctccttgtagttttcgaccttcgccttggaggcgttgtagacgacaaagtccggcttgaagttcttcagctcttcctccgtcggcttgatgaacatgttggtgacgaagtgggcctgccatgcgacctcgacgatgaagcggatggccatgcgggtgtccttgttcgcgccgcagaatgcgtcgacgacgaacaggcgcttgctgcccagctccttcagagcgatgtccttgaccgccttccaggtctcttcggtcatgggatggttgtcattcttgtaggcgtcggacgtccaccacacggtgtccttggagttctcgtccacgacgatgtacttgtctttgggggaacggccggtgtagataccggtcataacgttcacggcacccagctcgctgacctggcccttttcgtagccggtgagctcgggcttggtctcttccgcgaagagcatctcgtaggaaggattgtgcacgatctcggtggtgccggtgatcccatattgcttcagatcgatttcagccattttggattacctctttctttgaactgtccggctgccggagcagccgtgaaattacttctgcactacgtttcccgtagtttcgcatctatatattacgatttttttcggacaaaatcaatccttttttatcgttttgcaaaaagttcataattctgccgaaaaaggacggcaaagcacgctgcaggggagcggacagccgggcccggcgcaatgctgccgatccgaacaggctgacgataaaacggcatgcagccccgatttgtcattgcgaggaggcgcagccgacgtggcaatctcgggaaggcagttacgatttcgccgggaatgccttgttatccgaccatattctgcgagattcccacgtcgcgttgctcctcggaatgacaaacttgggagccttgcgccgatgaatttgtgccgtgatcattgccggcctgcatggcgctcactgagcgccgctacagacgcaattggtttttacgtttttatcggtggcctgtacgaatcgacagtgcagcgccgggagggacatgtccctcccctacaacgcccggctggcggccgtgccgaaaaattccccggagcatgtgctccggggaacggcttctttcagtcgcggaccttcgtgtcgatctccgcacggcacttcgtgcggaaatcgtctacgctcatggcgccgagatccacaccggcacgcgtgcggacggacacggtctggttctccatgtcgcggtcgccgacgacgagcatatacgggatcttctgcatctgggcctcgcggatcttgtagccgagcttctcgctgcggtagtcagactcggcacggatgcccgcgtcgcgcagacggtcgacgatctcctgcgcatagtcgtgcgcgcggtcggtgatcggcagaacgcggacctgcgtcggcatcatccacagcggcagcgcgcctgcgtacttctcgatgaggtaggccagcgtgcgctcgtagcagccgaggctcgtgcggtgaatgatatagggacggaccttctggccgttctggtcggtgtattccatgccgaagcgctcggccagcagcaagtcgatctggatggtgacgagggtgtcctccttgccgaagacgttcttatactggatgtcgagcttcggaccgtagaacgcggcttcgtcgaagccaacggtgtacttcacaccgaggtcgtcgaggatgcggcccatgatctcctgtgcctcgttccactgctcggccgtgccctcatatttattgttggggttcgcgggatcccactgcgagaagcggaacgtgcagtcctcgagcaggccgacggtaccgaggcagtacttggcaagatcgaggcagtgcttgaactcctcctccagctgatccgggcgcagcacgatgtggccctcggagatcgtgaactggcgcacgcggatgaggccgtgcatttcaccggagtcctcgttgcggaacagcgtggacgtctcgccgaggcgcatcggcaggtcgcggtaggagcgggcgcggttcaggtagacctgatactggaacgggcaggtcatcgggcgcagagcgaagcattccttcgtctcgtcgtgcgggtcgccgaggacgaacatgccgtcgaggtagtggtcccagtggccggagatcttatacagctcgcgcttggccagcagcggcgtcttcgtcagcagatagccgcgcttttcctcctcgtcctcgacccagcgctgcagcgtctggatgacgcgcgcgcccttcggcagcaggatgggcaggccctgaccgataacgtcgacggtcgtgaagtattccagctcacggccgagcttgttgtggtcgcgcctgcgggcctcctcctgcttctgcaggtattcgtccagctcctccttcttcgggaaggcaatgccgtagatgcgctggagcatcttgcgcttcgaatcgccgcgccagtaagcgccgcagcactgcgtcagcttgaaggcgtttgccttgatgcggccggtgctgtccagatgcgggcctgcgcacaggtccgtgaactcgccctgcgtgtagaacgagatgacggcgtcctcaggcaggtcgttgatgagctcgaccttatacggctcaccgagcgactccatataggccacagcctcggcgcgcggcttctcgctgcggacgagggggagcttttccttgcagatcttcttcatctcggcctcaatggcgtcaaggtgctcctgcgtgaagctgaagtctgcgtcaaaatcgtagtaccagccgctgtcgatggacgggccgatggccagcttgacctgcggatacaggcgcttgacggcctgcgccatcacatgggagcaggtgtgccagtacgtcttgcgataggcctcgttttcaaacgtgtacagattttcttcggacatggtgtttcctccttcattctgaggggcaataagtgaacctctgtataaaatcaactgcggtgcctgccagatctttttcgccaatccatcggttcggaaaacttgaaatacataccagtattccggcgtttcccaaaccttggcttgacaaaaaatatcttgccattcacgcttccattcacgcttgttgattttatcagaggttcaaaaaaatcacccctgatccaatcaggggtgagatacagatcctgtattccacggttccaccctgcttgcagcgcatggcgctgccgctcgttggcgcagtaacgggcgcacccggctcagcctactggaagttcagcggagcggctcggaagcggttcggcggcaggcgggtgcaggagctttcaccaaccgctccctctctgggcaaccgggcctgttccggtcttcgtcacagcctctttgatatcgccaatatagcacgtttgcccggccgtgtcaagcggtgcgggcaaagttttttgcctgcggcggggaggttgcgttttgtggccgttatgttaaccgttttgtaattctttcacaatatcttgtgcctccgcgcgccgtgtatgcggatatctagtccgccggaaaacggaataatagcataaaaagtttgacgaaaacaggaaaataagaaaaaagcttgacaaatcgtgaaagaatgttataattgcgcggtagttacaatatagtaacaatagttgcagcccgcaaacaaaaccggccgctgcagcgaaaattctcagaaattggaggaggcaagcatgcaaagaagcacacaacatccgcgccgccgggcgtggctgcggcggctcatcgttgtcgcggtgctggccgccgctgtcggcgcgctgctttcgcagaccgtctttgcccagaccagctatatcatcacggacggcgaccgcgtcaccgtccaccgctcctacagctccgatccctatgaggtgctcaccgaggcgggcatcgagctcgaggaggaggatacctatgagaccggctatgccgacggcatgaatcagatcaccgtccgccgcatgcagatggtcacggtcatcaaccgcggcgcgcagagcgtcatcggcacctatggcgaaacagccggctccctgctggcccgcatgggcatcacgccgggcacgggtgacacgctctcgtgcagcagcgagacgcagacctacgacggcatgaccattgagctcgtgcacacggagacgcgcatcgaggaggaggacacgaccgttccctaccccgtcaattattatgaggaccccgacctcgagccgggcgccgagatcgtcctcgtggccgggcagaacggcctgacccacgtcaagagcgaggtcacctaccgcaacggcaaggaggtctcccgcgtcatcgtgcaggagacggtccagacgaagcccgtcacccagctcgtcatccgcggcgtcgaccgcaccatcatggagcagcccgccgatccggagcctgcggagcaggcagcccctgccgcctcgtccggcacggcctccggcagctcctcgtccggctcgtcgtcctccggcggctcacgctatgacggctccgccgagacgagcggcaacgtcatcatgacgtcctccggcgagagctacacctacgtcgatgtgatgacctgctccgccacagcctacacctgcgagggctatgtcggccacacctattccggcacgctggcccgcgtgggcgccatcgcggtcgacccgaccgtcatcccgctcggcacgaagatgtatgtcgtttcaaacgacggccagtatgtctatggctactgcgtggccgaggacatcggcggcggcatcaagggcaataagatcgacctgtattttgacacctatgccgagtgctgggacttcggcgtgcgcatgtgcaccgtctatatcctgggctgaatgaaaatgaaataataatagagaagggccggactgcacgtccggcccttttgcaatgcgatgtaatgttgtaggggagcggacagccgggcccggcgctgtatctgcggaattgacagactatcgttaaaacggtgaacgccctcgacttgtcattgcgagccttgcggagcaaggcgcggcaatctcgcagcaccggccggaacacaggaaagcctccggcggattcgtcactgcctgcttgagattgccacgtcgggcttgcgccctcctcgcaatgacacgggaagaaagcactcccaagtttgtcattgcgaggctccgcaggagccgtggcgccctgagcgcgcagcgcggggaagtgcccttggggtgcaatctcagcagcactcggccggatcacaaggcactcccggcgaaaacggaactgcctgcatgagattcccacgtcgcttcgctcctcggaatgacaaatcgggagccatcgtcattttaatgacagcctgttcatttcggcagcactgcgccgggcccggctgtccgctcccctacaacgcataattggcggccctgcgcatcccccgcattgacgcgcgtggtacaatatcataaaacaccacacaatggagggtgcaatggatcagttcactgcgcagtatcatctgccgggcctgtttgaattttatgcgctctaccgcctgtttctgccgctgttttttgagcaccgggagtatttttatgactggtgcggcatcggttcgatctacggcgcgccggagggctgcctctggggcggcggacgcgtcagctgcggcgactgcgacccgcgcgacgcgcttgccctgctgcgggactatggtatctccgcccgcctgacgttcagcaattccctgctgcggccggagcacctgtccgacccgcgctgcaatgcgctgtgccgcctgtttgaatcaagcggtgaaaacggaatcattgtccattccgacctgctggcagagcatgtgcggcagcattatccggggctgtacctcgtttcgtccacgacaaaggtcctgacggacttctctgcgttccgtcaggagctggcgcggccggagtttcggtatgtcgtgccggatttccgcctgaatccggcgctggagcggctgagtgcccttctcccgcaggagaaggcgaaggtcgaattcctgtgcaacgaatgctgccgcttcggctgcccggaccgccgcgcgtgctatgaggccgtcagccgcaagaacctcggcgagcccggcccggagcaccgctgcaccgcgccggacgccgcgcagggctaccggttttccagagcaatggaaaatcccggcttcctcagcgtcggcgacatccgcgatacgcgtctgccgatgggcttttccgagttcaagctcgagggccgcggcctcggcagcgcgatggtgctggagtttctcctgtattacatgacaaagccggagtatcagatccatgtccgtgaggccatttacctcgatgccatgctggacctgttctgaggatcagcagcgcgttgtaggggagcggacagccgggcccggcgcggcactgccgatcccataccggctgccgttaaaatggtaccggccactgtaggggagcggacagccgggcccggcgctatactgccgatacgtacaggttggcgataaaacggtaatagcccccgacttgtcattgcgaggaggccgcaggccgacgtggcaatctcgggaaggcagttgcgttttcgccgtggctttcctattatccaaccgtgtactgcgagattcccacgtcgcttcgctcctcgcaatgacaagtcggaggtgcgtgccattttagcgatggcctgaacctatcggcagtgcctccaaggccctctcagtcaccttcggtgacagctctcccagagggagagccaaggtcgcttcgctcctcggaatgacacgtcagggtggcccggcggtgggaactgtgcattgcatcgaattcgcagtacttttgccgcttcgcggacgggcccggctgtccgctcccctacaatggcgcgtgcggtcggcgatactgcccggaaatttacaactgcccatggcgctcgctacccgcaaggggcacgccgcatccgtaaggcggcaaagccgccaacggctgcgcagtgagcgccgctacatttttctctcgcgcagccgccgccgctacagacgcaatcggtcggtgcgtttttatcggcaccttgaacgaactggaagtgccttcccgagattgccacgtcgcttcgctcctcgcaatgacaaatcgggggacatcctcattttaacggtgacctgtacaaatcggcagcaatgcgccgggcggggcacgccccgcctccgcgatttccattccataataattatttctcgccgtccagcgtcagccttcgaatctccgtgccctgatagtagtgcagcagaatctcatcaaagcgcctgcccgcctgcgccatggcctccgcgccgtactggctcaggccgacgcggtggccgaagccgtgcgtcgtgaccgtcacgccgtcctcctgcggggaaaactcgatgtccgtcgagcgcaggccgagcaggcggcgcagctccgtacccgtgaatgacgcgccgcccagctccagcgtcccgatgccgccgcccgccgtatagcggacggccccgaaccaggtctccggtgcgccggaaaggtcagcgtccggccgcgcgggcgtgatgcggtcccggaattcttccgccgtgaacgtcagcgtctccgtttcgcgcggcgcgtcctcctcgccggggctgggaacggactgcagatatggaatttcaccgccccagacggccacggccgcctccgtccgcccgccggagcaggaaaaatacgtcgcgtcgatgagctgcccgtcatagacgacggcaagcccgtccgtttccgtcacggccgcctccgccgccgtgtgctccggccactgctccggggcgcaccagccctggcagcaggcggcgctggcgcagacgtcggcctccgcgtgcttgcccgccccggcctgccgcagggcgaatgtccgcgcggcacaggcctgcgccttgagcgcctcggccgcaaagccggacggcacctccgccagcagcacgcagacaaggtagtcgtgcagcgtctgctcacgcacggccccgtccacaagcacgcgcagcgtcacggccccgtcgaacggctcgtccgcaggctctgcgggcgcggtctccgcctccgtcgcggcgagtgtctcggccctcccgtgcggcaggagctgccccggcagcagcggcagcgccagcagcatcacggccgcgccgagcacagcgcagccaagggcggcgaaaaatttccggatcatagcttgctcctttccccgcgcttgacgaagtccgcgcaggctggtataatgtatagataaacagaaaaagtggaagaaattgaggtgatccccttggttgacgaacgatttgacgagctccttcacactctatgcgcggattaccgcgttcataacaacttgaatctcgaggcgcggacgaacagcaacatcaagcgcggcctgcgcaacgacgacggcaccggcgtcatggtcggctgcacggccgtcggcaatgtcctcggctatacgatcgaggacggcgagcgcgtgcccatgcccggccgcctgatctaccgcggctacgacctgtccgacctggtggacggctacatccgcgagcagcgcttcggctttccggaggtcgcgtacctgctgctcttcggccacctgcccgatcaggagcagtacgacatgttcaagcggctgctgcatgattttacggatctgccgcagaattttacagaggacatgatcctgaaaaatccaagccacaacgtcatgaacaagctcgggcggtccgtccttgccctgtattcctgcgacccggacccggacagcctgagtgtcgagaatatgatgcgccagtccatcgagctcattgcgcgcttcccggtcatcgcggcctatgcctatgttgtaaagcggcattattttgacaacgacagcctctatcttcaccggccggagccggagctgtccacggcggagaacttcctgcgcatgatccgcccggacaagcacttcacccacgaggaggcgcggctgctcgacctgtgccttgtgtgccatgcagagcacggcggcggcaataactccacgttcacctgccgttccgtctcgtccacggggacggacacctattccgccatcgccgcggccgtcggctcgctgaaggggccgaagcacggcggcgcgaaccggcaggtgctggcgcagttctccctcatcaagcagaccgtccgcgactggaaggacgatgacgccgtggccggttgcgtccgccgcatcctgcgccgcgagctcggcgacggcagcggcctgatctacggcatgggccacgcggtctataccctgtccgatccgcgcaccgtcatcctgcggcagagcgcccgcacgctggccgcccagcgcggcatgctcgacgagctggagctgatggaggcggtcgagcgcgtaacgccgcgcgtgttcgccgagatcacggggcatgaaaaggtcatgtgcgccaatgtggatatgtattccggcctcatttatcagatgctggatatcccgcctgacctctttacgccgctgttcgccgtcgcgcgcatcacgggctggtgcgctcaccgcatggaggaggtcctcaccggcggccgcctgtaccgtccggcctacaagtcgctcacccgccacagggagtatatccccatggctgccagaacataccggaaaaatccgcttcccgccgaaaaaagggattgacaagccattgccgccgtgctataatatgcgagc

SEQ ID NO: 11187 - DNA, 3540 bp, Unknown
  gut microbiota DNA sequence
atcagcaggatcccataggccagatcgaactgaaacgccagccggtacagatcgcgggaaaaataccccatcagcttcaccgcgccgaatccgatcatcatgcagcccaccagaatgccgagcagcttcatggaaaagtcgggcaccgcaatgagcagcacaccgaacacgcagtacagcgcagaaaggacgatgtagctcgtcttcgccgcgcgcatgaatttcacggaacgcatgaaagcacctccttcgatttttgggcagccccgccgggcctgccccttggaacagtccagagtataccccatcgcccacccccgcgccatagacaatgccgctcccctgccggattttcagacacggaggcggttttgcctaacggaagggctaaaaaacgacaccgccccccgaattgtcattgcgaggccccgaaggggccgtgcaatctctggaaggcactgccgtttcgtaccggccgccgttaaaatggcagaaaccaaaagtcagcctgcagtggcggtcactgcgcagccgttggcggctttgccgccttacggatgcggcgtgccctttacgggcggtgagcgccatgcaggctgaaggtttggcggcacaatcgccgaccgcacatgccgttgtaggggagcggacagccgggcccggcgcggtactcacgactggtacaggctggcgttaaaaaggcttcagccccaggtttgtcattgcgaggaggccgcaggccgacgcggcaatctcgggaaggcagttgcgatttcgccataacctacctgttatccacatgggtactgcgagattcccacgtcgcttcgctcctcggaatgacaagcttgaatgtctcgcgccgctgaattaacacttcaaaacctgcagttgcctacagcgctcagggaacgccgctgcaaactggctttgggttcccatcatcttaatggcagccgacaccaatctccgctgcaattccctattgtgcactttttatacaccatccgcattctttcccttatgcaaaagcatacatgttatttaatttttgattattgtagtgatttgtatcgtttcttttgtatcacatttattccaacccccgttcttctatacgcattacagtcacaatatacatatatcttccgaagtaatttctatgttatatgtattattttttgcttcaaacgtcttgttggagtcacttgcatatggtatactcaagttgcagatatcctgcatttctttggaattgctgacttactattggaaggagtggatcaaatatcatgaagcgttcaacgattctctgttctttgctgccggttctgcttgtcctgtccctgtgcgcctgttccgcctccccgtccggtgcctctgacggcgctgaaactcccaacaacatcttccacgaactctctctccccgccgtaacggaggggcaagtctccgttctggatgcccgcggcagccggatcctctatgtgcaggaggagaagctgctctcgaaggacggcggttacgcctactacgagacaaaacaagtcggcatttacgatgtcgatgcccagaaatcacttgccgtctgggaaccggagacgcctggcaactactttggcggggccctgctggatggagatgccgccattctcgccctccagctagactacaccaacgcctcccccgcacagtttgcggccatgtacttcggcggctcacagcgcagcctcgtagagctcaccggtgaactgcagtggctgctccccttctccggcaaggaggctctggccagctatcgtacagaggaaggcgctttcggcgtctaccgtctctccgctgacggctgcacggatgctctgctgctgcaggccgatgcgaacaccgagccgatgggcggcgatcttgccgtctgcggcgaccgcttctgcttctcctatgccaagaacggtcaggtcaccctgtgtaccgtctccgccgacggcacgcaggacgctctcaccctgccggagtctgcgaagctggactcgttctggctgaccgatggcggcccgctcgtctgccaatatgtcgaacaggacagcaaggcgcagcggctgctcacgcgctatgcctctggtgaggcgcacgaggtcacacgtccggcagcagacggcgcgctgtaccagctccgctttgcaaacggctgcggctttgccgtgaacggcagctgggggcttcagctcctgcagctctccgaggatggcacggtcagctgccgcggtgtaacggagttgcccggtgagctaacctctgtgcaggtccgcattctgtcctgcggcgacggcagcttctgcctgttctaccccgaagcgcagcggttgttccgcgccgtgccaactagctgatatcgtttcccatgccgcggccttttgggccgcggcagttttagcgccgcgagactgccggatttgtcattgcgagggcgctttgcgcccgtggcaatctcgggaaggcagtcacgattttgctgggactttttcaatttaccgtactgcatattattgaaaattacgggatattttctgtaaaaatattgacaaaaaagttaaggggtgatatgctggatttaccggaagggaatacttgtcaaacgttcaattggaacggaagggaaggagaaaatacccatgaaaaacccgagatattggaaattactggctttcacgattgcagtcatcgccatttcctctctcctgttcggctgcacaaagcagaaattggcaccgatgacaaaagtctgggtttccccctattacatcagtaattgggtatacaacgcggaaggcaaatacctgcatacaggagataacggcgcggtaacagcggattctacgatggaaattctgcatgagagtacctggccaatgggcgttacggcttcaatgccaaagtatctgattccagatacggaaaagctgctttttgaagtcacggcgaaaaatgccgcgatacgggcggattccgatgaggtttatctcatagcagaactggtgaatgaggccgatgatcagtggttggagctgactgcgaacggtttccgtctgaagggcaaagtaacttcatacaacgcaagggggcattttaagcaagcagcttttccaagtgcagacgacttctattacaaactgaccggcgagcaggagagcgatctgcgggtgtactggcaggacaatacgctccggatcgtctccgaaagtcccggtgaagttacgctgcatttaaaagatttgcgtgacacctaccaattcccggcaggcggctgtgtgatcacggactttgccgacgggaagatcatcgtccaataatcaaaaaacataggtcccggcccggcggcatccccgccgggccggtgtctgcctgtagcggtggtcactgcgcagccgttggcggctttgccgccttacggatgcggcgtgccctttacgggcagtgaccgccattggcagttgcagattcccgcgcactccgccgaccgcaccggctcccggaattgtcatt

SEQ ID NO: 11188 - DNA, 6348 bp, Unknown
  gut microbiota DNA sequence
aacctgaaggtcctgcgccactgaatcaatggcgcaaatactgctgttctcccaggcgctcagggaacaccgctacatttttctctcgcgcggcggcatccccgccgggactttttccatttaccgcactgcatattattgaaaattacgggatattttctgtaaaaatattgacaaaaaagttaaggggtgatatgctggatttaccggaagggaatacttgtcaaacgttcaattggaacggaagggaaggagaaaatacccatgaaaaacccgagatattggaaattactggctttcacgattacagtcatcgccatttcctccctcctgttcggctgcacaaagcagaaatcggaaccgatgacaaacatctgggtttctccctactacattagcaattggctatacaacgcggaaggcaaatacctgcatacaggagctgacggtgaggtaacagcggattctacgatggaaatcctgcgtgaaagtacctggccaatgggtgttacagctacaatgccaaagtacctgattccagatacggaaaagctgcgttttgaagtcacatccaaaaatgcatggatgcgggtagatagcgataaaatttatctcctaatcgaactgatgaatgaggcagatgatcagtggctggagttgacagcgaccggcttccgtctgaagggtgaggtagcttcatacagtgcaaggggatggtttgggcaagtatcctttccaagcacagacgaattctattacacactgaccggcgggcaggagagcgacctgcaggtatactggcaggacaatacgctccggatcgtctccgaaagtcccggtgaagttacgctgcatttaagagacctgaaggatacctaccggttcccggcaggcggctgcgtgatcacggacttcgccgacgggaagatcatcgtccaataatcaaaaacagttcccggcccggcggcatccccgccggaccggtgtttgcccgtagcggcgctccctgagcgccatgggcagttacaagtttccggataccctcgccgaccgcaccggctcccagatttgtcattgcgaggaggccgcaggccgacgcggcaatctcgggaaggcagttacgttttcgccggaagtacccaattatccggccaagtactgcgagattcccacgtcgctttgctcctcggaatgacacgtcaagcgagtgcagcggtgcaccagtgcctttctgccgttgaatgctccccctactgggcggtcactgaccgccgctacattttcctctcgtccggcgggttgtgcagggatcgccgctgcggacgcaaccggcctatccatcctgaccgatactctgtacatcatgcaggcacacagccgggccattccgattcttttcccgcagcctgtttttcctgttgctttttccgcgtttttccggcataatataggcatctactattgagaaaggcggaaggttcccatggagcttctgaaggaacggatccggaaggaaggcaagatcctgcccggaaacattgtgaaggtggatggtttcctgaatcatcgcatcgacgtaccactgatggagcagatcgcgcaggaattcaggcgcgtgtttgccggcaaggacatcacccttgtgctgacggccgaagccagcggcatcgccctggccacaatctgcgcgcaggccttcggcgtgccgatggtgttcgccaagaaggccaagagcgacaacatcgagggcggcctctatcagagcgacattctttcctatacctataagaagaaggtcacgctgcttgtctccaaggagtggctcagtgcctcggacaaggtcctcatcatcgatgacttcatggcgcgcggtgaggccatgcgcggcctgtgcgacatcgtgaaggaggccggggccgagctcgtcggcatcggcgtcgcggtggaaaagggcttccagcacggcggtgaccgcctgcgtgaggccggtatcccgctgcattcgctcgccatcatcgaaagcgcggacgaaaacggctttgtcttccgggaggaatgagcatggaaacgattctcgttctggactttggcgggcagtataaccagctcatcgcccgccgtgtccgtgagtgcaatgtatactgcgaggtcaagccctacacgaccccgctggaggagctcaaggccatgcagcccaagggctttatcttcaccggcggcccgaacagcgtctatgacgccgcctccccgaaggtcgatcccgccatcttcacgctgggcgtaccggtcctcggcatctgctacggctgccagctcatggcccagacactcggtggcgaggtcacggccgcgcaggacagcacggcccgcgaatacggccgcacggagacgcacttctccccctgccgcctgttcgagggcctgcccgagcagagcgtcacctggatgagccacggcgacttcatcgcccgcctgcccgagggcttccgcgcctgtgccgtcacggagcattgccccaccggcgccatcgctgacgaggcccgcggcttctacggcgtgcagttccacccggaggtcaaccacaccgagcacggccaggatatgatccgcaacttcctctaccgcgtctgcggctgcaccggcacctggaacatgggcgactatatgcgctcctccatcgccgccatccgcgagaaggtcggcagcggcaaggtcctgctggccctgtccggcggcgtggacagctccgttgccgccgcgctcatcgcagaggccgtcggcgaccagctcacctgcgtcttcgtcgaccacggcctgatgcgcaagaacgagggcgacgaggtcgaggccgcgttccggaagtgggacctgcacttcgtccgcgtcgatgccgaggcccgcttcctcggcaagctcgccggggtcacggagccggagcgcaagcgcaagatcatcggtgaggaatttatccgcgtctttgaggacgaggccaagaagatcgggcgcgtcgactatctcgcccagggcacgatctaccccgacgtcatcgagtccggcgcgggcgatgctgccgtcatcaagagccaccacaacgttggcggcctgcctgacttcgtcgacttcaaggagatcatcgagccgctgcgcctgctgttcaaggacgaggtccgccagctcggccgcgagctcggcctaccggaatatctggtcatgcgccagcccttccccggccccggccttgccatccgcgtcctcggcgagatcacgcgcgagaagctcgataccctgcgcgatgccgacgccatcttccgcgaggagctggcaaacgcaggcctcgcctacagcgtcagccagtatttcgccgtgctgacgaatatgcgctccgtcggtgtcatgggcgacagccgcacctacgactataccctcgccctccgcggcgtcaccaccaccgacttcatgaccgccgattgggctcgtatcccctacgacgtcctcgaccgcacctccgcccgcatcgtcaatgaggtcccccatattaaccgcatcgtctacgatatcaccagtaaacccccagcgacgattgagtgggaataagaaaaaagtgaatatgatgggctgaaaagccttgaaaacactcactttttgaaaatctcatttcccgtttgatagcaaaatgatagcagataccaaagccattttgtttgttcttgttttggcgagcgaatggtttgcaggtttgctgtcgcatccaatcctatattgagagcgaaaaaggctctgctgactttctgtaaaagaaggtcggcagagccttttctatttagacaagagtattatttcttgcgcaaaacatttgaaacggtggattgcgaaatatccagcattgctgcaatggtttcttgattaattttttgtttgcagagatctttgattacttcgtttctttgaactgttgaggttatttcgggaagtcgatgaattgtttcggaaacaactccagaagcggttacggtctttattaaagttattccatcatctaatacagctcgtgcaattttatccactgtttttttgtttgtcttaaacgcaagagaagcaatatttgcagcggttttgccaactccctgaaggtctacattcttgaatacgttcatcagattagttgccatgtattatccctccgaaattatcaaagcaatattataataatattactttgataattagtcaagagcgtttgaacatcatttgtccaagtttattccacctgaattagcagcaatcatatctcacgttctgatgagattatcttgtgaacattgtcgctttgtgctataatacaatcagtctaaatttggaacggagaattgccatgcctatttcctacgataagctctggaagctgttgatcgataagaaaatgaaccggacagatttgaaggatgcgtccggtatcagcttcaatgtgcttgcaaagatggggaaaaacgaatttgtctctatggaaagcctgcataagatttgcttgacgctcaaatgtgatgtaggagacatcatggagttcgttgatggaagagatacagaacagtcatgatttcaatcgaactacgcaggagtgaaaagaaaatgcagcaaccgttgacttgtgttgaaatatgcgctggcgctggtggacaggctttggggcttgcaatggcaggttttgtccatgttgcgcttgtcgagtatgaagaagattattgcaaggtattaaagcagaaccgcccggagtggaacgtcatttgcgcagatgttcacgattttgacggacgcccataccacggtgtcgatctgctggctggcggcgttccttgcccgcctttctccgtagcaggaaagcagctcggacaggaagacgaaagagatctattccctgaagccatccgccttatcaaagaaattcagccgcgtgctgtcatgcttgaaaatgtccgtggctttcttgattcgggttttgatgaataccgcgaccacatttttacgtcgattcaaaagctcggctatgtaacccatatcaagctcttgaacgcatctgattatggtgttccgcagctacgtcccagagtggttatcatcggcattcggaaggatcagattggagcatttgcctatcctgatgaacaaccagacagcgcccccactgttggtgatacgctccgtgatttgatggcacagaacggatgggaaggtgcgaagcagtgggcatctaatgcaaaccggatcgctccgacccttgtaggcggctccaagaagcacggtggtcctgaccttggtcccacacgcgcccgtaatgcatgggcagagcttggcgtagatggccgaggaattgcaaacgaagcaccggctcccggatttgagggtatgccccggttgacaagccgaatgatggcacggattcaaggtttccccgatacgtggacgtttggaaatcggaaaaccgtagcctgcaggatgattggaaatgcattcccgcccccggttgcccgggcagttggagaaaaaataaaggagtgtttggagcatggatgcattgatagcaaacgcgagattccactttcacaagcagttgtttgaaaccaacacactgacgttgaccacggcaggtgtcgcatccaatgcagacaccagcagccgcggctcaaaggcgattgcgcggaggatcgttgacattcttgtagaggaacagcatcatgctgtctccacggttgacaaaatttccgggcaaactctcggaaagcaatttgaaacgctgacaatggagttcctgcgtgaaacctttccctatttgcagaacctccgtcccggaaactggaccattcttcagctcggcaataacaacaagctgaaaacaagcgattttgcccagtatgaacacctcgcttacttaaatgcgcttacgacacagaacgcacagttggctgctgcactcgggaatgattacctcgttgcgcctgacgttgttgtttatcgcgatctctatgaggacagcgagatcaatgccgctcagaccattgttgatgacgaaatctgcaaaatggctgatattcggaagtctaacggcggaaaacccattcttcatgccagtgtctctgcaaagtacacgatgcgtagcgaccgtgcacagaatagccggacagaggccttgaatctgatccgcaatcggaaaggacatttgccgcacatcgttgttgtgacggctgagcctatgccgaatcgcttggcatctcttgcgctcggcactggcgatattgactgcgtatatcactttgcactctatgaactgattcgagcagttaaagaggcaggttc

SEQ ID NO: 11189 - DNA, 2240 bp, Unknown
  gut microbiota DNA sequence
ctgcccgccgggtcccgttacaatctctcatacggctgcatatcgcggaactctcccggcgtgcggccggtatccttgcggaacgcattggcgaaggccgtcgaggacgggaagccgcacagcgcggaaatgtgccgcacggtgtcgtccgtgccgcgcagcaggaccttggcctttgccagccgcaggcgcacgatgcgcgcatagggcgtctcgccgaagcggcgcttgaacgccgtgatgaagtggttgcgctgcatgccgcactgggccgaaaggccgtcgatcgtcagcggctgcgtgtagtgcaggtagatgaattcctccatcgcccccagtgtgtcggcggactgctcctccgcctgcgcggggcgcggctgcgggcggcagccgcattcgatcagctccgagatgacgagcgccgccagacagcgcaggtccgcctcgtcgcgccgtccgtggaattcctcctgaaacaggcgcaggaagcggcgcagccgctccgacaccgcaaacatcggcccgaactgcgcgccgtcgaggcccttttcgcgcaggcgctgcaccataaaattcggcgagacctcgagactgatgtttgcaacgtcgcattgctccagcgcctgcccgtggcgcacgccgctctgcacggggtagaccatgccggggcggccgaaatagacgtccgtcccctgcaggatgatgggcatgggcgtcagcggcagcagaaattcataggccgcgtggctgtgcgtgaacggtgcgacgacctgatcgggcgagcgccgcagctctgccacggacagaatgctgcagtagctgtgatcgcacagcttcgtcagatacccgcgctgcgggcagtgggcctgaaacagcggattcattcccccgcctcctcgcgctgcggctcgtggcggctgaacaggaactgccggaatgtctgctcctttccctcgcgccagcgggcaaagttcgaccggtgcgcccagagcatggccgggaagatcagcgccagcgcgatcgtgccgcgccagtcgcccgtccgcagcaggtagagcggcgcgtagaccagcgccgtcagcagcggcaggatgctcgcccggttccagatcatgccgatgacgaaaatcagcgccagcagcggcagcacgagctccggcgtcaggccgagcaccgtgccgcacaggcaggccgtccccttcccgccgcggaagtgcagaaagacaggaaaaatatgccccagcacgcagaacagcccggccagcgccgcgcacagcggcggcagcagcaggcgcagcgggagtgtcacggcgaaagccttggagacgtccagcgccatcacgatcaggcccggcttcagcccggcagccagcatcatgttcgtggccccggcgttgccgctgccaaacgtgcggatgtcaaagccccgccgccgcgacagcagatacgaagggctgaagcatccggcaaaatagcccagcagggcgcagaggatgtatttgctcatccgaagaatccccccatgatccgtccgttttcttcattatatcacaggattttctgaatttccacaggaggcattcccatgcacgaaaaacacgaaaaaaccaatgccatgcgccagctcgaccgcaaaaaggccgcctacaccgtccattcctatgacggcggcgcgctcagcggcacggaggtcgcctccgcgctcgggcaggacccggagcgctgcttcaaaacgctcgtcaccgtcggcaaaaccggcgggcattatgtcttcatgatccccgtcgcggccgagctggacctgcgcaaggcggcgtccgccgcgggcgaaaaatccgtcgccatgctcccgcagaaggagcttctgcccctcacgggctatatccacggcggctgcagccccatcggcatgaaaaagcagttccccacgtttgcggatgcgacgatcgcggacggcgagaccgtctgcttcagcggcggccgcgtcggcctgcagatcgaaacgacgctcgcggccctgcagagcgttgttcccgtcacgctggcggacctgacggtgtgatcattgcaggggaacggacagccgggcccggcgcaatgctgccgacccgaacaggtcggcggtacaatgggaaacggtcccgacgaggcctgcagcggcgctcgctgcacaaggccgctgcgcgagagaaaaatgtagcggcgctccctgagcgccatgcagtctggcaatctttgcg

SEQ ID NO: 11190 - DNA, 41735 bp, Unknown
  gut microbiota DNA sequence
aaacccgtgcgggagcgtctcgatgaagtgatagatgccgcaggcacggcaggcgcgctccagcgtctcatccgaaacgccggtcctgttgtagacaagattctcgcggaccgtgccctcaaacatccaggtatcctgcaggaccatgccgaacaggccgtgcacctcctcgcggctcatatcctttgtggagataccgtcgatgcggatgtcgccgccgtccagatcataaaagcgcatgagcagattgaccatcgttgtctttccggcgccggtcggaccgacgatggcgaccttctgcccctgcgcaacatgggcagagaaatcatggatgatcgtcttctccgggtgatcggggtagctgaagcggacgtggtcaaactcgatctcaccgcgcaccggctgcggcgcgggcagattcttcgactcgtccggcagctccggctcctgcaggaaatcaaacacgcggtcgcccgctgcggcggcggactgcagctgcgtcatgccctgcgcgatcgtcgtcagcggcgaggtgaacaggcgcacatagaggatgaaggcagtgatgacgccgaacttgatgctgccgttcatcacgagtgcagcgcccagcacgcacacggcgacatagccgaggttgccgatgacattcatcagcggctgcatgatgccggacaggaactggctcttgcggttcgcctcatagacagcgcggttcatgccgcggaacgtctccttgatcctgtcattcgcgcgcgaaatgcgcacgacgtcatggccggaatacatctcttcaatatagccgttcagcgtgccgaggctctcctgccggtcgacaaagtatttctgcgagcgcttcatgatgatgaacatgaacacaaagccgatcattgtcgccgcgatggcggccagcgccatgcgccactccgtcacgaacatcatgatgacgcagcccgtaagctgggccacggcgctgatcatggacggcagactgttggacagagcctgctgcagcgtactgacatcgttcgtcacgcggctgaggatatcgccgtgcgcaatgcggttgaagcagctcatgggcacgcggttgatcttggcgcacaggtcgcggcgcatctgcttcgagaggccgagcgtcacggtcgccatgatatagtgctcgatataggtcagcagggcgctgagcgcatagatgccgagcagcacgcccgccacgcggccaatggccgcaaggtcgatctcccccatcaaagaatcggagatcagatttgtgatcttgctgagctgattcggcccgaggatcgtcagcaccgcgcccgcggccgcgagcaccagcgcgatcagcatcgggagcctgatcttttcggaataagagaacagctcaagctgcacgccgcgcaagccgcgcttgctcttctcagcagggcgcatgccgcgcccgcccatcggtcccattgccatcagactccctccttttccagctctgccgcagagagctgcgacatggcgatctcgcggtaaacaccgcaattcttcatcagctcgtcgtgcgtgccgatcccggccacacggccctcgtccagcacgacgatgcggtcggcatggcggatcgtgccgatgcgctgcgccacgatcaggcaggtcgtgtcgctcagctcgcgcgccagaccggcgcggaggctggcatcggtgcggtaatccagcgcagagaacgaatcatcaaagatgaggatctccggcttgcgggccagtgcgcgcgcgatggaaaggcgctgcttctggccgcctgagacgtttgcgcccgcctgtgcgatcggcgcatcgagcttgccgggcagcttgtccacaaattccgtggcctgcgccagcgagagcgcgcgctgcacggactcgtcgtcctgcggggcgctgctttcgccgaacagcacattgctgcgcacgtcgcccgcaaacacaatggcccgctgcgtcacataaccgatgcggtcgtagagcgcatcgaagctgtagctgcggacatcctgcccgtcgatgagcacctgcccctccgttgcgtcatagaagcgggccgcaaggctgacaagcgtcgttttgccgctgccggtcgcgccgatgaaggcgacggtctcgcccttgtttgcgcggaagctcacatgctcgagcacgtcgccggacgacgacggatagcggaacgagacatcgcggaattccacggtcccctgctccggggcttcggtcgtttttccctcatacagggagatcggcgcatcgagcacctcgttgatgcggacggcagagacctgcgccatcggcagcagaacgaggatcatgacgagcatcatgagcgacatgatgatatacgtcgcataggtgccgaacaccacgatgtcgccgaacgtcgaaatgcgcccggcaaggtccgttgcggatacgcggttcacaatcgccgcgccgacccagtagatcgtcagcgacagggcgttcatggcaaggccgaccgccggcatcagcaacgccatggcgcgctggttgaacagctgcgtgcgcatgagaacatcgttggccttctcgaacttgtcctcctggtattcctcggcattgtaggcatggaccacgctgatgccggtcagattttcccgggaaatgaggttgatgttatccgtcagcttctgcacgcgcttgacccgcggcagaatgacgaggaccacgatgagcatcagggccagcagcgccacgacaaagcccgccgtgatcacggacagcgtccagctcttgttgacgatcttgatgaccgcccacacggccatgacaggggccttgatcatggtctgcatgcccatggcaacgaacatctggatctgcgtgatatcattcgtcgtgcggttgatgaggctcggcacggagaattccagcatctccttctgaccgaagtccgcaaccttctggaacacgctttcgcggatgtgatagctgaagcctgccgcgacctgtgcattgagatagccgcagaggatggccattaccgcgctgatgagcgtgcaggccagcatctcaaggccggtgtgcagcacgtccgaaacggtactgcccggcgttttgatctgcacggtcagatcgctcatataatccggcagccggaggtcaaagtagatctggcccagaataagtgcaacgcacagcagcgccatgatccactgtttcgccttcatttgtttgagtagtctaagcataacaggatttccttccagaaattatctgcccataccgctgagcgccagcacgatgccgtccacgcccagcaggatgagatagaagccgatcgtcaggctcatggaaacggccgacagcacggggtgcagcagcatgagcgttgccagcacgatgccgaggatattcagaatgagtgagattgtatagctcgcgcggcccgccgtcaggcgcacccagttcaagtgcgtcaggttggagatgcagtgcgtcaggaaccacaacgggaacagcagggtcatggcccactgcccggcagagggatagaccagcagcatgaagccgcacatcacgctcagaataccactgacaagcgccgtcatcgggccgaagcccgtatggcgctccacgcgcgcataaaacgcaatgtccatgattcccgtggccacggcaagtacgccatagaccatcacaaagctctcgagcgccgcctctggccagataaaggtcgcaatgccgagcagcacgagcaggatgctgacgatgagcgccagccagccaaagccggaacggtcacgcatgatgctcttcctccttctgcgccgcgtgaaggatccgcatgaattcttcaccggtgatcgtttccttttcatacagcacctgtgccagctgatccagcagcgcgcggtgctccgtcagcaggctgtgcgcccgctcatgctccgtgcggaccagctcaacgaccttgcggtcgatctcgcgctgcgtctgctccgagcagctcatggatgtatcgccgcccagatactgattccgcgtggtctgcatggcgaccatgtcgaattcatccgtcatgccgtactgcgcgatcatggcgcgcgcgatgcgcgtggcctgctcgatgtcgttcgaagcgccggtcgtgatctcgccgaacgcgacctcctcggccgcgcggccgccggtcagcgtggccagcttggccagaagctcgccgcgggtcatcaggttcttttcgccctgctcgacctgcatggtgtagcccagcgcaccggacgtgcgcgggatgatcgtgatcttctgcacgggcgcggaatccgtctgcagggcagccacaagcgcgtggccgatctcatgataggacacgacgcgcttttcatgatccgacagcacggcgtttttcttctgataacccgcgatgacggtctcgatgctctcctcgaggtccgcctccgtgacggtcttgcggccgtcgcgcacggcgcgcagcgcgccctcgttgatgatgttggcaagctctgcgccggaagcgcccgccgccatacgcgcgatggtgtggaagtccacatcgtcgcccacacggattttgcgcgcatgcacgcgcaggatggcctctctgcccttcaggtccggcagctcgaccggaacgcggcggtcaaagcggcccggacgcgtcagcgccggatcgagcgactcggggcggttcgtcgcggcgaggatcatcacgccgttgttgccctcgaagccgtccatctcggtcagcagctggttcagggtctgctcccgctcgtcgtttccgccaaactgaccgtcgcgctttttgccgatggcgtcgatctcatcgatgaacacgatgcacggggccttttccttggcctgactgaacagatcgcgcacctttgatgcgcccatgcccacgaacatctcgacgaattccgagccggaaatggagaagaacggtacatttgcctcacccgcgacagccttggccagcatggtcttgccggttcccggagggccgacgagcaggatgccctttggcatggaggcgccgacgtccgtatacttcttcggatcgtgcagataatcgacgatctccgcaaggctctccttggcctcgtcctcaccggccacatcgctgaagtggataccggccgtggactgcacatagaccttggcgttgctcttgccgaaggccatagcgttcttgccgcccgcctgctccacgagctttctgcccacatagcggccgagcgccaggaacagcagcagcggcacgatggacgtcaggaagaagctcagcagcggcgacatcgtcttctgcacatcgcggctgaacgtcgcgccggaggcatacagccgctccgtcaggcccggatcgtccatgatgcccgtgcagtagacggtcttgccgcccttttccgtgtaatagatctcatcgtcgtcgatctcgaccttttcgatctgctgggcctcgatcttgctcatgaacgtgccgtagtcgacctcctcgatgctgcggcggttcagcagcggcgtcacgagcagattgaacagcgcaatgatcagaagcacgatgccgtagtaatacagcaggggctttttcggtgatttgacttccttcattctgcagcacttcctttcctctgttcatcccggatggcctcgagcgccacaagcagcgcatggcgcgccgcctgcatggcaaagtccatcgcatattccgcaaagaggagctgcatctcctccccgctctcatcgccgcggcggacctcggtctgcacgcggctgacaatttcgcggatctcctcaaacgcatcggcgatctcgccgacctgatgcgcgcggctgtggcgcaggcgctctgccagcgcatgggcgcattgtgccgtctcctcgcgcgtctgcgcaatggcggaattcagctctgtgctctccatctgcgcggctgaccgcagctttgcatgcacgcccgcaagctgggcgtcaacctccgccagctttcccgccagcacatcctgttccatattccagcactcctttccgtttgctcccgtattttaccccgtcggcccggaaaacgcaatttacactttcgcaggcctgtatagacaaaaaagccgaagtgtaaaggttttttacacttcgactcagctgtcaaatccttcaatccttcaatttttctggcaggcgcgtcgcaccgcccggcgcaaaggcgttcatgctggctgccatcatccggtagatatcgcgcacggtctcgtcgatgtgcgccgagtcctcctccgtccagctgcgcatcaggcccaccacagcgttgagatggtagcgcagcatcaggctcatctgctcgcgcgtgcagcccggcgggaaatgccaccgccgcaggatgcgctcgatgagcgagttgaacgactgcatcacgagccgctccagctcttcccgatagccggcgtgcatggccttttccacaaacagacgggagctgagcgacagcgtgatcaggtatttcaggctctcctccggcgtactctgcatggaggcctcctgcatgttgcgcttcaggtttcgcttcatcatccacagcagcagatccgggatatcctcaaaatgatagtagaacgtctgtcttgtgatatggcattcgttcacaatatccgtcacggtcagctttttgccgtcccggcgcaggagcagccgccttgccgcggctgcaatgagctctttgcgatcatccggcatgctttttccctcccgtgcggcggcgctgctccagcgtttcacgcagctcgcgcagatgctcgttcaaggggcgctccgagcgcagggggaagaagaagcttgccttctgcgcggagcggtcgtgcacgctgcggacgtgtgccttgaggttttcatacttgacgatgacctcattctcatccgcgagcttcttgatgcggtggatgagcttcgtggagtagacgacgtcgatgaggaacacgccgtaaaacaggccgatgacaaaggaaaacgccaggttgcgcgagagccagtcaatggcgtgcaggatgcgcggatggatcaggaagtaatatgcggcgccgagaagggcccacgccagcgagaatttcgggcagatgaggccctgaatgttgccccactgcttgctgtagtcccacaggcggacatggaagcccttgagggcgatgagaccggcgaaatattccgtcacggtcatgcaaaccgccatgatcaggaacaggaccacgcgattccagaacgggtcgcggatgatgctgaactgctccagcgaggcgatcaggtagagaaagcacagaccgcagccgtacagcggcagatacggcccgacgcagaagccgggattgatccacttccgctccgggttcgccgaggaaaagaagcgacggaacagcagctccagcacccagcccagcgttgcaccgatgaaaaacaggaaggcaagcgtcagaaaaatattcatggttcctccatgcgccacgcgctcggtttcgtcgacatcattatattctgttttcgtccgaaacgcaaggggtgatgattcagcttgtcaaaaagtccctctggggcttttttgccaagctgcttccagaattgcaaaatataattttgctgtatcttattttgcaattctgccgctgcggcgggttatggaacgtgaaaggacaccctgacggtttcctttcacacttttcttccctccgaaacttttggcctggcagattttttgacagtctggattcccgtgtaatgttaacgcaatttgcagccgctccgccgcgctccagatcaggcggctcaggccgcagcatacgagcgcaggcagcagcagaaagccggcaagcgccgcgcccgtccagaaaacagcggcagcggccgctgtccacagcctgcccgttcccgttttgcgcatggttccacctccgcagaaggatatatgcgcgccgggtgcagaaaagaaccgtgccacattgacaaatctccgattccgggatatactaaagggcagaaaggaggcgttcacaatggataacgaaaacgtcaagaaggaatggaagaaagccggttccgatctgggtcacgccttcgcaggtctgggcaagatgctcatccgcacggccaaggtcggcatggaaaaggccgatgagtgggccaatagcgacgattctcccaaggaggaaaagaagcccgaggggcaggaataattccgcacaaaaatatgccgggcgatcccgcatggcgagatcgcccggtttttctgtttattccgattccttattccgattccgcctgcggctcctccgcgaattccgcaaacgcgcggccgaattcctcggcggcaaaggcccgcatccgggcgcagtagtccccataggccgcaagcagccgctcggcctttggagaaagctccgcgccgccgccgtgccgcccgcccgtcaccgagacgagcaacggaaagcccagctcgcgctccgcctgctttacgatggtccacgccttggaataggccatgcccatggtcatggccgcgccccgcagggaatgcgcctcgcgcacatggcgcaggagctccgcaacaccggggccgaagcattttgtttcccgaaagatccggatgctgataaccggccttaatttcttgtccatagcttcagtataccacaccgcacgggccgcgtcaagcgcggcggagttgacgaatcgggcagaatgtgctatagtcagtggcaaagagatcacaaggagtcgtgtcctgttatgctattttccgaagtgctggaaattcgccccggcctgactgccgtcatgggcagcggcggcaagacctccctcgtctgccgtctggcggacgagctttccgccgcgcgcgtcatcatcgcgacctcgacgcatatgcggcaggtccctgccctgcaggcgcgcgtctgcgccgttgcgcccggcacgcccgccatcgtgggaacaccgtgcggcgacggcaaattcggcccgccggagcagagctgggccgagctctgcgcgcttgccgactatgtgctcgtggaggctgacggctcccgcgggctgccgctcaaggcccacctgccccacgagccggtcctgccgcaggaggccgggcaggtcatcgccgtgctcgggctgacggggcttggccgccccattgcagaggctgcgcaccggccggagcgctatgccgggctggccggctgtgcaccggaggatatcgccacaccggagcgcgccgcgcgcgtgctcgaggccgaggcacttcacacgcgggtgctgctcaatcaggccgatgccgccgacggcacggccctgctggcccgtctgcactgcccggccgcccttgccagcctacgaaaaggagagatcgtatcatgctcgttctgatccgcggcgccggagaccttgcctccggcattgcgctgcgtctgcaccacgcccatctatctgtcgtcatgacggaccttccgcagccgaccgccatccggcggaccgtctgcttctcgcaggccatcgtctacggcagcatgacggtcgaggacgtcacggcccgcttctgcgccgcaccggagaacgccgccgtcatcctggccgcgggagagatccccgttctggccgatccggaggcgaagtgccgcacggccctgcgcccggatgtcgtcgtcgacgccattctggccaagaagaatctcggcacgcacatcacggacgcgccctgcgtcatcggcgtcgggcccggcttcacggcaggtgaggactgccatgccgccgtggagaccatgcgcggccacacgctcggccgggcgctgtatcacggctctcccctgccgaacacgaacattcccggcctcatcggcggctttgccggagagcgcgtgctgcgtgccccgtcggacggcatttttgtgcagaagctcgagatcggcgcatctgtccgcacgggcgacatagccggtacggtaaacggcgtgcccatgctctgccagatcgatggcatgctgcgcggcatcctgccggacggcacccccgtcacgcgcggcatgaagtccggcgatgtcgacccgcgcggaaagcgcgaatactgcgaccttgtctcggacaaggcgcttgccatcggcggcggcgttctggaagcgatcctttcgctcaccggagcgctccgcgcctgagggaggccgttatggaaagccgcggaagacgcgttcactccattgaaaaggccattcgcctgctggactgcttctgggaggcggacagccctctctcgctgcacgagctggagcagcggaccggctgggccaagagcacgatccacgggctgcttgccaccatgctggactccgccgtcgtggagcagaatccgaccgacgggaaatatcgcctcggctatcatctttttgagctgggcagcgccgtccggcagggctggagcgttccggagctctgccgcccccatctgcgcgccatggccgcgcgcctcggcgagtcggtccatctggcccgcctgtccggcgacgagctcatcctcgtcgcctgcgaagccccgcagcgcggcttccacatgacctcggagacgggcacgcgcctgccggtgcacgccagctcgcagggcaaggccattctgtccgccatgccggtctacgaggccgaggccctgctgcgcaggcggccgctgcaggtctgcacgccgcacaccgtgacggccccggagcagcttctggcgcagctccccgccattcgccgcggcggctatgccgaggagcacgaggaataccggctgggcctgaaatccgtggccgcgcccatctacgagggtgacgggccatgccgctacgccatcggcgtcatctgcattgccggaacaccggctgcagaattcgcctccatgcgagccgccgtgatggaaacggcgcagaatctctccgccctgctgggccatcgcgccccgggcggtatataagagggggatcctatgcagtatgaaccaacaacgccgcagcaggacggcttttccatgcccgcggagttttctccgcatcagggctgcattctgatctggccggagcgccccggctcgtggaaaaacggcgcagccgccgcacgcaaagcgttccgcagcgttatcgccgccattgccgagagtgagacggtctatgtcgccgtgaatccgcactcgcgcccctcggccgaacggatgctcgccggaatggccaacgtccgcctgctggaccttgacagcgacgatgcctgggcgcgcgacgttgccccgacatttgttcgtcgagccgccgacggcgcggtgcgcggcgtcaactggcgcttcaatgcctggggcggcgaggtcgacggcctgtacgcccactgggagaaggacgatgcctttgcgggcagcctgctggatacgctcggcttccgcggctatgatgccgcgccgttcgtgatggagggcggtgccgtccacagcgacggcgagggcacgctgctcgtcacagaggcctgccttctgagtgccgggcgcaatccgcagctcacgaaggacgagatcgctgcggcgctctgccgcatgctcggcgcgaaaaaggtcctgtggctgccgcgcggcatcgacggcgacgaaacaaacgagcacgtcgacaacgtctgcgcctttgtacggccgggcgaggtcgtgctcgcgtggacggacgaccccgcagacccgcagtatgcctgctcgcaggcctgcctgcgctatctggagggcgaaacggacgcgcagggccgccgcatccgcgtgcataagctgcccatcccgcgcgtgccggtccttgttacacaggaggacctcgagggctatacgtttgaagacggcgaggacgtccgcgaggccggcgaacggctggccgcatcctatgtgaactactactgcgcaaacggagccattgtgctgcccgcattcggcggcgaaaacgccgcgtcggacgcgcaggccgcggccattctggccggactgttcccggagcgccgcatcatctccgtctatgcccgcgagattctgacgggcggcggcaacattcactgcatcacgcagcagatcccggaaggagcgaaattatgagaaatatcaccgtggcagccatccagatgcgctgcgtccccgatcccgctgaaaatctgcgcacggccgagcgcctcgtgcggcaggccgccgggcagggtgcgcaggtcgtcctgctgccggagctgtttgagcgggagtatttctgccagcagcgccgctacgatttttacgcctatgccacgccgacggacgaaaatcccgccgtgcagatgggaatccgtctggcgcgggagctgcacgtcgtgctgcccatcagcttctttgagcgcgactgcaacaatttctacaacaccgttgcctgcatcgacgcagacagcacactgctcggaacataccgcaaaacgcacattcccgacgaccattattatcaggaaaaattctatttcacgcccggcgacaccggcttccgcgtgttccggacgaaattcggctgcattggcgtcggcatctgctgggatcagtggttcccggagacggcgcggtccatggccctgctcggggcagagctgctgctctaccccacggctatcggctcggagccgatcctggaatgcgactccatgccgcactggcagcgctgcatgcagggccacgccgcggcgaatctcatgcccgtcattgcggccaaccgcatcggcacggaggccgtgctcccctgccccgaaaacggcggccagcgctcggagctgtgcttctacggctcgtcgttcctgacggatgagaccggcgcgctgctgcagtgcgccccgcgcgatgcggaggccgtgctgctgcagacctatgatcttgacgcgctgctcgagagccgcagctcatggggcctgttccgtgaccgccgcccggaatattacggcgctatcacccaccgcgcgcaggatagtctgacgcgataaagtaatttaaaaaaccataccggcagctgtgaatgaacagcagccggtatggttttattattttcggcgcagatactgcgccacagtgtccggctccgggaagagggaggcctgatggatgttgacctgttcgagctgctgcacgatggccgccttgcagcctgccgggatccgcagctccttgagcacatgcttgcggggcttccggtcactgtccgtctcgtccgtgtcgaggcccgacagcaggaacgcgccgtcctgccggaggatgcgtgggttgtcctgattgctctggacaaagacggggcgcagcaggtcaaacgggcggatatcgcgcgtgaaggcgttgttctccttctgaatgtcgtaatacagccgctcgaggacggcgtcgtcatatttctggttgctcttctgcgggaatttgcccggccggagcatgtagcggtacgacagagcttcgagatggcgctgatccgcatggctcagctccggcagatgagacagcatctgcacacggtcactggaggcataggccacatctgcggcctccacacagaacacgatgaccttgccgtcgcagtcaggctccgctgcgcaggcaaaatacagggcaacgagcggatttgccgtgatatcgagcaggcgcgtcggcgcgccgtagtgctgcatgtacgtcagcttttccagatagcggcggcccgcgaacggagccggacagcgcacctgcagctcatggaaatagaagtcctccggcttttccccggtgcgatagacaccgggtgcgagcaggtagcgctcatttgccgcgccgcggtagaaaaagcgcagccgctcacgggaaagcgcctgctctgcgctccctgcctccgggaagcaggcgtcatagaacgccgcggaataggcccggcttctggccgccgccagcccggcagcgtcgccgccctcgaacaggcggatctgctccccggcatccggctcccgcagcgcctcggtcaggccctcccggtccggcgttgcgtcagcggcaagccgcttccggaagccctccagctccgcattctccgggaaaaacgcctgcagaaattcctgcaaattctgacattccttcatgaaaacgcgccctctttctctctgatttgcgcggggaatgggcctcagtcgcccagggggatcttcgtgtttgggtccgggccgagcgtaccgtgctcgggaatggtgcagtaggagacgggctttccgccctcaaatgtgatctggtagccgtgaccggggtccggtgtccagacgaagcgatgcggcataccggggaaccagcggtacatcagcccgccgatcacgccgccgtgcgcgacgatgaccgtgtccttcccctgcgccagaatgggggcaagcgcctgcagcgcgcggtccgtcaggccgttccagctctcgccgccggggcagacgttgttttcataatcgccgctgcaccacgcgcggaaggccgggtcgtccttcaggtccgcgtaggtctttccttcgaattcgccgaagcgcatctcctgcatgccggggagcgtgccgtgcggccggtcgccgtacagggcggcaaacgtctgctccgtgcgggtcatgccgctggtaaaataccgctccgcctccggatagccgccgccgtcacgcagcgcgtgcagggcctcgatgccatcaggcagcagcggcaggtccatcgcgccataataaagcctgcggatgttgccctccgtcaggccatgccgaatcagggtcaatttcactttaaccgttcctccagtccgcaaaatatccggctgacgcgctccgctcgggccgcaaggccctgcagcaccgcgccgtgcacctcgcgccagcggcgctccgccgcatcgagcggcacgacgccggagccgatctcgcgtgagatgacaaatgcatcccgcgtcagcggcagcaggcggtccagcacctgctgcgccgtctcgccgcggtcggaagccgcgcgcgtcagcgcttcgagatggcggcagcagcgcacgggcgcttcgggccagccatccttcaggtcgaacaccggtccgaccataccatgcgacgccgcccaggtgagctttccctgccacgcgccgcccaagatcaggatcattttcttacctcacaagacataagaccgccgccccggccagctcgccgagcgtcagaccgaagccggaaatatcgccggacatgccgtccagctgccggaagccgcgccagacggcaaggcagtagcccgccgccgccgcaagcggcgcaagcccggccgccccgcagagcacaggcggcacaacgcaggcagccagcaggcacgcgagtgggaacacgagctgcaggcccgtaccgcgctgcatggcggcatactggctcgtgcccatcgggcgcaggcgctgcacggcaacggaagcgcaggcgcggctcgccacggggatcgctccgagcggcagcaggcgcagccacggcgcccccgcaaacagcgcgcactggcccgcggccagcaggaccatgcagataacggcgaaggcgccgcagtgcgaatccttcagaattttctgccgcgtggcaaggtcgcgccgcgacagcagggcatcgcagacgtccatatagccgtcgagatgcaaaaagcccgtgacgagccacggcgcagcggccagcagcaccgcccgcagcggcgcagggcagccgaggcgctgcagcagccatgccatcgccgcccacacaaggccgaccacgccgcccgtgagcggcaggcaggcgaccatgtgcggccgtgccttctcgtcccagatgcggcacgggcacggaatggccagaaacatgccccatgacatcataaagcccgtaaaccagcgcttcacggcaattcccccttccaaagatgcggcagtccggccgtgacctcgcagaccgtgtcgaattccgccgctagcgtgcggcagacgcgcgcaaggccgctgcggtagcgctccgtccattcgtcataggccgcaccatcgcggaaaatatcgtcgcagacgcagaccagatgtgccgcacggcagctgagcgccagcagctcctgcgctgcccgctccggggcggcggcatccggctgcgcgccggagaacatctcgtttgcaagcaaagccgtcacgctgtcaaacagcacgcaagccctctccggcagtgcggcgcgctccagcgcccggccgcactcgaccgtgctgaagccccagcccgcgcgctcgtccagatggcgggcgatgcgggcgcggtcctcgccgtccaccggctccatcgtcgcccagtagatcatgggtgcaccagcggcaagccggacgcaaagccgctgcgcaaggccgctttttccgcttttgctgccgccgagcagtaaaattttcatggtgtatccagctggaacgcatccggcgtgcggatggactccagataatcgtcgttgatggcggcctccgcaaacgtcgccatgccattcatgacggcgcaggcggccttcagcacctgaaaggccagcggacagccgctcccctcgcccagccgcatgccgagctgcaggaagggcgcaaggcccagctcctccgcagcgcggcggtagcccggctcctttgaggcatgggacaggaagatcgcatcccgcgcagccgggcacaggcgcacggcgcacagggctgcgaccacggagatgagcccgtcggctacggccgggacatgcgctgcggcaaggccgaggaacgcgcccgtcatggccgcaaggtccagaccgccgacggcggacaacacgccgacggggtctgccgggtccggccggtgcagcgtgagcgcacgccggatcacgtcctttttcttccggaaggcatcgtccgtcaggcccgcgccgcggccggtcagctcctccggcgcaaggccggtcaacgccgccagaacggcggccgacgtcgtggtgttgccgatgcccatctcgccgatgccgacggcctgcataccgtcctgcgcggcgcgctgcgcctgctccatgccgacggaaatggccgtcagcgcctgctcccgcgtcatggcgggctcccgcgcgatgtcgccggtggagcggcggatcttccgatccacgatctccgggcagcggacatccgcgtcgatgccgacgtccgtcacgacgacggaatcgccaaaggccgccgccagggcggacatgcccgtgatatgccgtgtcatattgatagactgactgagcgtgaccgagaccggcgttgccgaaacgccctcggccgtaacgccgttatccgccgcgaacacgagcacgcggcagcggtcgatccgatttttcacccggccggtcagtcctgccagccggatggagacatcctccagcgcgccgaggctgcccggcggcttggccagctccgcctgacggcgggcggcagcgtccatcgcggcgcggtccgccgggcggatggagcgcagaaaggtctgaaattcctgctctgtcatggttcctccagatagccccgcgcgcaaagccagcgcagcgagggctcacagttctgattttcgatcgtataatccgccgccgggctcagctccgccagcgcggcaaggatatccggcatcgggatcatgccctgcccgagcgcgtcgtgcaggtcccagtcgccgtcgttgttgtgcaggtgcacatggcgcagccacggggccatcggcgcgatccagtccagaggcggcgtttcgctcacgcgggtattggcatggccgacatcgaggcacaggccgaagcgcgggtcatcgacgcccgccgcgatctgcacgagcatgtccggccccggctccatcacgttttccagcgcaaggcagaggccgtccggggcgtcccgcagaaattcccgccagaattcgacggaccgggccgtgaaccactccgggaaatagacgagcgggatatagccgctgtgcaccacgatgcgccggatgccgagcgccagcgccgcctgcacggtctgccggaagcgcagcatgacgacctcgcgcacgcgcgggtcgatggcgcagggcgacagctccgcaaacggcgcatgcagccagagagagccgatcccgctgcagcgcgcccgcgcagcctccatggccgcaggttcttccaatttccgcgcctcgcagaaatccgtcagctccagcccaaggccccatttccgggccagcgaagccgcattttcatccatcccggagagaaacagctttccgcttaaagcctgcatgccttcccctcactttcaaagctgcaccgcacaattcagcaatcgcatatcgtgcggtgttgctcaaggaagctctgattaaatcagcaagagtggatggcgagagattttctgtcaagtcaaggtttgaaaaatgcaggaatactttgtgtatttcaagtttttcaaaccgatggattggcggaaaatatccgccatccaccgcagatgatttattcagagtttcctcaaatatgatatcacaaaaagaggcggatgccaacatcaatctcgatgcggcatccgccattttcccggcattcccgcaccgccgcagagcggcgcgggagcgccatagtctcagggaatctccgaaccaatcgtctgcggctgagccgcgaagcttctgccgattgattcagcgctttccttacttgccgagggaagcgaagcgcatcagcagcgttgcgacctctgcgcgggtcgccgtgccctgcggctcgaggcggccgttgcccataccgcgcagcaggccgacggcgactgcccagcgcaccgctgcgagcgcataggagctgacctgcatcccatcggagaactgcgacagatcatcgcgtgcgccggtgacaacgccggtcttttccgcataacggacgatcatcgtgaccatctgctcgcgggtcaccggggactcggggtcgaacgccgtggtggacacgccgttgatcacgccggccgcataggcccagcggactgcatcggcataccaggcatcggcagcgacatccgcaaacgggagcgccgcggagcttgccgggctgcctgccacgcgccagagcaccatggcgaacatcgcgcggctcatctggccgttcgggcggaacgtaccgtcctcaaagccgatgaacagatggttcgtgatggcatagtccgtgctgaggtgataccactgcgcgggatcaagatccgggaaggcgcggctcgggcagttcgcaccgccgtcacacaccggggccttgcccgtcaccgtgacgacacactggctgtaggtgtggttgctgtcgcccgtcgtgaggacgtagacgcctgcggtgtcaaagtgccaggcaaacgtgccgtccgcggccgtcctgccgagcagctcgccgccgcagaagatctgcacgccctctgccggagcaacaccggttcccatctggtacaccgttgccgtgaacgtctcgctcgccgctgcggtgagcgcggtctcgtggaaccagacgttgtacttatagccgtagtagctgtcggagtcggccgtcgactcattggcaaacacgccgtagatgccgccggccgtgacggggaccgtcagcggggaggacgtatcatacgcgccgttcacgaagtaatactggccccagtatgccactgccgcattggccgcgttgaagtcttccgggccggtcaggctgccgatgtagccatattcgctgaccgtgaggacatagtcctcgccgaagccctgctgcagcgcctctgcgaccgtgctggaggaagagacctccagcgtgcggtcgatcgcgccgatgccgttcacgcccgttaggcggaccgtgaccgtcgccttgaagggcttctccgtcacatggacgcggcactggctgtaggtgtgcagctcgtcgccggtcgtgagcacatagtcgcccgcatgctcaaagcggcagataaccttgccgttctcatcgctgacgcccatcacattgccgtccgcgtagaccttcacgcctgcctgcggcacggcggtattgccctgcatctggtagaccgtgacgtcaaaggccgtctcggcctcggcggtaacgctgcgctcgtggatccagacgttgtacttgtagccgtagttctcgccggtcgtgttcttctcgttggcgaagatgccgtaaactgcgccgtccgtaacggggaccgtcagcggagaggaagtgtcatacgcgccgtcgatgtagtaatactgaccccagaactcaacgcccgcattggcggcgttgaaatcgtccgggccggtcagactgccgatgtagccatagccgctgaccgtgagcgtatagtcctcgccaaggccctcctgcagagcctctgccacggtcttatccgacgtcgtgtcgaacgtgcggtccactgcgccgacgccgttcacgccggtcagcacgaccgtgaccgtcgtcctgacgggaggctgatcgccgcccgggttcggaccgtccgtgccgaggaccgtcatggtggcggagaccttctgaccggtcagcttggagaagtagtcgtcataccatgcgccggacgtaatcttcttggcatacttggcaaagacggcatgctccaggacgctctcaacggtgacagacgtgttgtacttcggctgcgtcagcaccagattctcatgggcaatgacggccggattgctggacttgaacttgttgtactgctcctgaccgccgacggaggaataatccgcctgatctccggccacgatgccagcaccatgcgcgtcgcggtagtcatacagccacgtcaggccgccgttctcgcccgcaacggcctcgcggaaggcgtgcaggctcttcgtcacggcgtactgcgactcgttcgctccgtcgttcaggccgtcccagtagtgggccttggcctgctccatgaggttcagcgcatcgtcaagctccgcctttgtcagcggcaggaccttgagggtgatctgcttctgtacggagacgtccttcgtcttgtgctgcatggtaacggtcagtgttacctccgccgcggcttcgccgggcatcgggcggtagatattggcgcggtaggcgttgatctcggccacatccggatcgtccgaagtgacgatgaacttataatcgtcatagttctcgatgccggtagcacgcgccgtgagaagctggatgtcgccgttcacggcctctgggtcaatgacctcgccggtcacaacataggtcagcttcgtgacgagatagttctcgtcaagctccttctgcatctgctgacgcagcggctcgagatcctcggccgggagcgtcaggcggaagccctccgtctgcatagtgccctcgttgagctggaacgtcagggtcggatagagatggaccttcgtgtcaacgctcgggcgtgtgacgcggcccgtcaggacttcgcccgccgtgctgccctcgatggagatcagcttggaatcggatgtccaggcgaacgtgacgaacggataagcgccggtacgctgcgggagctgcaggtcggagataatctccgcttcgcttgtattctgattgcggatggtatcgaacgtaacggaggccgccgccttttcgaggtaatcccggacggtgtccagatcccagttcaggatgaccatcgccgtgatatccgcgctgctctcgccgcgcgtaagcgtcagctccacgccggagacgcgggcaaagtgcgccgcaaggcccagcgttgcggggtccgcgttgaaataggtgatcttgccgtcggccgcgatgccggtcgtctgcgccacatccatcggataatcgagcgcgccggggtccttcacggtgacggtgatgccgtcaaggttatttctgctcagatagttttccacataggtgcagaggttcgtatccgtaccggggaccgggttcagcgtggacttgctgtccagcagggacttggccgccgtgacgagctcgtcgttctgcgccttcagggacttcaccgtgatgaggaaggtcttcgtgccggtctcgccgccataggccagcgttgccgtcagcttcacatagaccgtgcccgtggacgggagcgtcacgacgccctccggcgtgatgaccgcgccgttcgagctggcccaggtgatcgtgccgtcaaagccctcgaccgtcgaagcaagcgccagtgtgcagttctcggtgacgagcgtcggctcgaccgtgagcttttccgccgcgcgcgcaatggcctcggccgccgccgtgttgaccacatgcgtgccgccctgccatgccagcagcggatagccgccgttgcggccgtcgtcctggtggaaggcttcattgccgagcgcgagaacgaaggcagtctccttcatctccgcggcagtcttggccgtcgcttcgacattgacgccgtccttcgtgttgccggtcgcagcagaggcggagccttcgagataatagctgttccgaatttcggccgcatattcgccgacgagcgcgccgcaggaagcgcccttgacgctgccggtgttatagcagttcgtgaccgtgggatccgtgccgccggtgtgcttgcccgcgatgccgccgacgcaggtcgcgccggtgacggagccggtattgtagcagttcaggatctgcacgctgccgttttcggtgtagccgacgatgccgccgacataaccgcggttgttgctgccaccgttgatcgcgccggtgttatagcagcccgtgatgggcgcgtagcttgcgccgacgatgccgccgaccttcgcgtcggaataggcgctgctcagcgtgcaggtcacgctgccctcgttgccgcagttcacgatcgcaccgctggcatagacgcgcgcggcgatgccgcccgtcacgccgccgtaggaggccgcattcgtcacgttcacacggctgacgcagccctcgatacggccgtagctctggttggcgaaggcgccgatcgcgccgttgccctcgatcataccgacaagcgtcagattcttgatcacgccgtctgccccgaggtagccgcacaggcccatcgcagattcggaggtatcgtcattatcgcagctgtaatagccgctgatcgtcttgccgttgccgtccagaatgccgccaaactgcgcgctgtatttgccgataccgccccagcggttggccttcggagcctccgtgctgttgagcacgaggttcaccatgatgcgggcgttgatcgtcgtctcaccgccgttgaccttcgcggcgaaccacgccagctcctccggcgtcttgatgaggtaccacgtcacgccgttttcggtcttcgtctccggcgcggtatcggaggccttgcccgtccagacattgctgccctcctcgagtctgaccgtaacagtcagatccttgcccgcgaccgtgaaggaaccggccacattcagatagccgtccagcatgacggcataggaataggtgccgtccggcaggctgtagacgccgttcaccgccgtctgctcgccgccctcggcatgcgtcacggtaatgtccgcgccgctcagcgcgctgccgtcgtccgccttcacggtggcaatgcgcacactatggcgcgccgcctgctgcagcgtgacgctcaggctgtcgttttcgcccgtgaccgtcaggctgcccgccgcggtctcatagccgaacaagctcgcctcataggtgtagctgcccttcgggaggcgccatgcgccgttcacggcgctccactgcttgccatcggcatcgcgaagaacgagctttgcctcggccggggtcagcgtcacgctgacgggataggtgcggaccgagagggtgaccgtgatggtgcggcctgcgccgtcgatcgtaaagcttccggtcacatcgtcgcactcatcgcgcgtgacaagataggtatagcttccggagacaaggcgataggtgccgtcctcctccggggtctgctccacgttctgcgcatcgtagacatggacggaagcgccggtcatgttgacggagaacgccacgatgagcttggcatccgcatcctgccaggcaaggacgggatagccgctgttctgattcttcgcgtcgttcacgaatgcgccgccgagcttcagcacggtgtcgagcgacttcagctgctcttccgtgagggcagttgtgtcgccggagcctctgccgatggcctgcatgcccgtgaggtaatagcagttcgaaacggagccgccgtcgttgtagccgatgagcgagcccgcataattatagttgcccgctgcggccagtgtgatcgcaccggcattgtagcaggacgtcacggtcgtgttcgaatccgtctggccgagaatgccgccgacgcggttgccggtggcggagccgacgttatagcactcgctcagcgtagtatagtaggcagtgccaacgataccggccgagaaattgttcgtaccattgctgatcgtgccgaagttcgcgcagcgcaggacggtcgagcgcgcagcggacttgccgttcagacggccgacgataccgccgacattccggctcgtaccggtgaccgtggcatagttcgcgcaggcctcgatcgtggcgctgtccgcctgaccggcgatgccgccgacatagccgcggccggagatgctgccgcggaccgtcaggcggcgtacggccgcgccggtatccaggcagccgaacagaccggcatagtccgtcgtctgcgagacgagcagattatcgatcgtgtgatacgcaccgtcaaagctgcccgcaaagcggcgggcatcgctgccgatcggcgtgaaggccacattgcccatgtccagattggctgcgagtgtcacatgctttccggcaaaggcattgccggaggcgacctgcgcggagagataggccagctcctcgccgttcgagatgagatagggatcggcctgcgtaccggtgccgcccgcaaagccgtctgccaccgttccgtcccactcgatgccggggaccatggtgaccttgactgtcgtgtcggcctcgccgagcgtgaacgtgccgcgtgccgtcttatagcccgcagccttcacctgataggaatagtccgccgggaagagcaggtaggagccgtcctcctcggcctgcataacctcgtcgccgtgcttcacggtaacggccgccgtcgtgcctgcggcaaggcccgtgatcaagaacgccgccttatggcgtgcaagctccgtcatggtcacagggacctcaacggccgcatccgtcacggtaaagctgccggtggcctgcgcatagccgaaggcctcggccgtatagcggtactcgcccgccggaacgctggccttgccgtccgtcacggcataggaagcatccgcgctgtccgtcagcgtaaaggccgtgcctgcaggcgcgcccgtgaacgtgacgccatagtacgttttgcagctgaagtccttcagatagagcgtgtcatcgttcctatcgctgctgtagtccttggaatacccgatggtcacgacgtcattcgccgcgacctccatcgtgtaggtctggaaggacgtcatcgcaccggaatacgaggtcgcattggacttcgtcaggtccgttccgttcttcgtaaccgccatatagtcgtatttggactcactggagaccttataggagaagcggaacgtaccgccgctccggaaggtcagcttgagggcggaagtcgttccccccatacccttgttgccggatatcaggcaagtctcgtcgtcgctctccgcaaagggataggaggcgtcgttttccacggtcgccggaacgtccgcaaaaaactcatcgaaacttgccgctgctgcgaccgggatgctgcacagcaccatgcacagcacaaggatcgccgcgatcattcgtttcatgatccaatcttcctttcttaatacgaaaaaaataaaaacactgcggcagagggcctcgtttcccctgccgcagccgttttcctgcgtcatggcgcacctgcgccgcatgcttctgtaggtcttctgactcgtgctcccgggtctcccccgcaacgcggcgctcagccttctcaggtcgccccaatgaccggctttcgcccatggagcgcgcgtcttgcacatacagcgccggtcggcgttgcaggctctcactgcattcccttgtccatctccggctgtacatatgccctgccggagccacaaaagcttttaatttttaacctattcagtatagcatatttccgcagcattgtaaagccggatgaaaaacgttccgaccctataaccgccgttgacggagcgccgaaaatacgctataatttgaattgtatattatgatccgcccccggcgggaaggagtgcagcattatgatccagttatctgatttctatggctacagcatgtataccatctcttccgatacgctttccgtctccgtgatgagcctcggtgcgaccgtcacaaggcttgcctatcagggccgcaatgtcgtggtcagcctgaagactccggacgactatctgcaggacaccagctatctcggtgcgatcgtcggccgctatgccaaccgcattgcgggcggccgcttcccgctgaacggcgagacggtgcaggtgcagcagaacgagggccgcaatcacctgcacggcggcagcgtcggcttccacaagcgcatctgggccgctgaatgccttggggagcaggcagtgcgcttcacgctgcacacgccggacggcgacgcgggctatcccggcgcgctgacgatgcacgtcacctatcgcgtggagggcagccggctcttcctcgattttgagggtatcagcacaaaggacaccatcctcgcgcccacaacgcacatgtatttcaacctcggcggcacggagagcatcctcggaacgacgctgcagatcaacgccagccgctggatccccgtggacggcgagctcattcccaccggagagctgcgcccggccgagggtccgttcgacttccgcacgccgcacgccattgcgcagaactttgaccacggcttcgtgctcgacggcccggacgctcttgtggcagaggacggcggcgtccgcctgtcgctgcacacggactaccctgccctgcagctctacaccggtgaattcctctcgggcaagctccatccgaatcagggctttgccattgagccggaggcctgccccgacacgccgaaccatccggaattcggctcctccgtgctgaaggccggtgagacgttccatcgctccatcgcctataccttcgaatccaccgcaaaatgagccgcgccgatttgctttaccgcgagacgtgtgcacgcatcctgcgcgagggtgtctgggacaccgatcagtccgttcgcccgcgctgggcggacggttccccggcccatacggtcaagtgcttcggtgtggtgaaccgctatgatctgcaggaggaattcccgctcatgacgctgcgccgcacctattggcgctcatgcgtggaggaactgctgtggatctggcagaagaagtcgaacaacgtccacgacctcggcagccatatctgggacagctgggccgatgagagcggctccatcggcaaggcctacggctatcagctcggcatcaaataccgcttcccggagggagagttcgatcaggtcgaccgcgtgctgtacgacctgaagcacaacccggccagccgccgcattctgacaagcctctacaatttcgccgatctgcacgagatggctctgtatccctgcgcctattccatgacgttccatgtcagcggcaaccggctcaacgccattctgaatcagcgctcgcaggacatgctcacggcaaacaactggaatgtcgtgcagtatgccgtgcttgtgcacatgctggcgcaggtcagcggtcttgtcgcaggcgagctcgtgcatgtgatcgccgactgccatatctacgaccgccacattccgcttgtcgagcagatgctggagctggagccgtatcccgcgccggaattccggctcgatcctgcggtcacggacttctatgccttcacgccggacagcgtgcaggtggagaattaccgttatcatccgttttcagccaaaattcccgttgccatctaggaggagccatggactgcatcgtcaacgtcacgcaaaactggggcatcggaaaggacggcggcctgcttgtctccatctccgccgatctgcgccgcttccgcgcgctcacaacggggaaaaccgtgatctatggccgcaagaccctgctcaccttcccccacgcgcgcccgctgccgaaccgcgaaaactggattctctcggcgacacccggcttttccgttccgggtgcggcggtcttcccgtcgcttgcagccctgcaggaagccatgcgtacccgtccggccgattcgctgtgcctcatcggcggtgcgagcgtctaccgcgcgctgctgccatggtgcagccgcgtgctgctcacgcagacctgcgccgacctgcctgccgaccggtttttccccgatctggaccggctcccgaactggcgctgcacggacaccggccccctgcaggaggacggcggccattgcttccgctatctgacctacgaaaacgacgctccgcttccattatgaacatagaattgctcccttctgcgcagactaaacgccgaagggagtgatttttatgccgattttacctttgacggaagaaaatttcgagcaggaggtcctgcaggccgaggggccggtgctcgtagacctctttgccgcgtggtgcggcccgtgccgtgcgcttgcgccggtgctggacgcactggccgagacccggccggagctgcgcatcggaaaggtcgatgtggacgcccagcccgagcttgcggcgcggtttgacgtgctgaccgtcccgacgctgctgctgttccgctccggcaggctgctccggcgcacgaccggcgcaaaaacgctgacggagctggaggaattcctgcggagcggcgaagcatgagatgctatgacatggccgtggtcggggccggaccggcgggctgcacggcggctctctatgccgcccgcgccgggctggacgtgctcgttctcgagcggctcggccccggcgggcagatggcgcagacgcagcacattgagaattaccccggctttccggacggcgcagacggagccgcgctggcagacggcatgaaagcgggtgcggagcgcgcgggggccatttttctgctggctgacgtccgcagtgcgcagctcaccggccgcgtaaaggagctgcagacggacggcgggccggtccttgcccggaccgttgtgctcgccacgggagcgggcccgcggaggctcgggctgccgcaggaggacgagctgcccggcgtgagctactgcgccgcctgcgacggggcgtttttccgcgggaaggacgtcgccgtggtcggcggcggcaattccgccgtcagcgaagccctgctgctgtcgagactgtgccgccatgtgtcgctcgtgcaccgccgcagcacgttccgggcatctgccgcagagctggcggcgctggaaaagcaggacaatgtgacattctgccggaacagcatcgtaacggagctgctgggccgtgagcgcctgaccggcatccgcctgcagaacggccgggagctggagatcagcggcctgtttgtctgcatcggccgcacgcctgtctccgccctcggcggcgagcagctccgccggacgccggacggctattactgcgcggacgagacgacgcggaccggtctgccgggcgtctatgccgcaggcgacgtgcgggaaaagcagctgcgccagatcgttacggccgtctcggacggcgcagcggcggcgcagcaggcggagcattatctgggcaaaacgtcccgcagggcggaaatatagcgcggatccgtgccgcagcagccgccgacgagtgcagctccggcatcgatcagcgtgcgcatatgctgcgcgaatgccgccgggcccatggaatagatggcctcgccctccggcgagatctccggcatacccgcattcggcttgacaaggagcggcacctttgcagcctgcctcatgttgcgcacaaggctttcgagctggtccgggccggtggagcagttgatgccgacggcggccgcgccgagctcctgcagcgtctccacggcctcgacgcaggtcccgccgaaatagccgctgccgtcggcctgcaccgtcatgctgcacaggaccggcagtgtgcagacgctctgcgccgcctcgagggcgacggtcatctcgtcgatgccgagcatggtctccacaacgagcaggtcggccccggccttggccaatgccgtaatttgctccgtgtaaatttcaaacagctcgtgatatgtcatcgtcccggcaggctcgagcggcacgccggtcgttgtgaggtcgcctgccacgagcgcgcggccgcctgccgcctcgcgcgacagggcgacgagctgccggttcagaagcgcaacatcgttctctcggccgcagcgtgcaagcccgcgccggttggcgcagaacgtcggcgcatagatgatctgcgacccggccgcgatatagtcccgctgcagagccagcagaggctccggatgctctgtgacccagacctccgtgcagatgccgcgcggcatgcccgcacgcatcaggttcgagccggtcgcgccgtcgagcagcacggggccgcgcgcaagcagcgcctgaaaagcttcgtttgtcataggttcctccgtggtatgattttctcttctattttacccgctccggcgggaatttgcaatgagaaacttccgcatgcattttcggttgcattccggtggggtttctgctagaatagcgatagattccattcattattacaaggaggacaatatgaaaaagtccgtactgcgcaaatatgccacgctgatcgccacggtcggcgtcaatgtccagaagggtcaggaggtcttcatcgccgccgagctcgatcagcccgaattcgtaaagatggtcgttgaggaatgctaccgcgccggtgccaagcgcgttgtggtggactgggactatcagccgctgacgaagctccatgtccgctggcgcagccagaagaacctctccacgctggaaaactgggaggaggcccgctggcagcactatgttgacgagatcccctgccgcatctacctgatctccgaggatccggacggtctgcgaggcgtcaatcaggaaaagatggccaaggccggtcaggctaagtacaaggtcatccgtccgtaccgtgaccagatcgagaacaagtatcagtggtgcatcgcagccgtccccggtgttgcgtgggccaagaagctcttcccgaacctgtcgaaggcacaggccgtcgagaagctgtgggaagccattctggccgcctcccgcgtagatgacgatcccgttgccgcatggaaggcccataacgaggaccttgcccgccgctgtgcctatctgaacgacctcggcatcacggagctggagtatcacagctcgaacggcacgaatttcaaggtcggcatgatcgaagacgccgaattcaagggcggcggcgagaactctctgctcggccacttcttcaacccgaacattccgacggaggaggtcttcatctcgccgaagcgcggcgtggcagagggcatcgtctattccacgaagccgctgtcctatcagggccagcttatcgagaacttctccatccgctttgagggcggcaaggccgtcgaggtccatgccgaaaagaacgaggcccttttgcagaagctcatctccatggatgagggcgcttcctatcttggcgagtgcgcgctcgttccctataactccccgatccagaattccggcctgctgttctacaacacgctgttcgacgagaacgccgcctgccatctggcgctcggcatgggctttgccgacacgatcaagaattttgagaactacacgctcgacgagtgccgtgccaagggcatcaacgattccatggtgcatgaggacttcatgatcggctccgccgacctgtccatcgacgcgcacacgcgcgacggccgcaccgtgccgatcttccgcgacggcaactgggcattttaatggggatctctgaatatatcagagcttttctgagtcccggacataaaagctgctgcagcgattgtgctgcagcagcttttttattccgttagcagggtgagcttcccggttctgcgggtcgcattcaggtcgataaggcgctggttccggctgccgcgccagcgcagctccagagagcgctccgactcgacatacggtccgtccacgagcacgtcggccgctgcaagcagccgcaggcgcgccgggtccgcctcctgcacgagcgcctcatagcgccagcccgtgtaaacccagacattgccgcccagcgcgtgcacggcctcggccagcgcggcgcattccgccgcctgctccatcggctcgccgccggagagcgtcaggccgtcgagcagcggatcggccgcataccgcgccagcagcgccgccgtactttcctcgcggccgcccgccgggtcatgtgtctgtggattgtgacagccgggacaatgatgcgggcagccctgcgtgaatacggtcagtcgaagaccggggccgtccacaatggactcggagaccgttccggcaatgcgcatcagtccgtcaccccgtgcttgacacggtcgcgctcctcggcgcgcttaccgttgttgaagcggtcgagcgtaccgaccaggtagcccgtaatgcggcggatacgctcaaacggctggtccggcgtctcgcggcggccgcagcgcgggcaggtatcgccgataataccgttgaagccgcagagcgggtcgcggtcgaccgggtggttgatggagccgtagccgatgccgcactggcccataaagcgcacgaccttctcgaatgcgggcagattctgcagcggatcgccgtccatttcaatgtaggagatatggccgccgttcgtcagcgcatgatagggtgcctcgatgcggagcttgttaaaggccgagatcggataatacaccggcacatggaagctgttcgtgtaatactcacggtccgtcacgccggggatcacgccgaagcgcttggcatccatccggacgaagcggccggagaggccctccgccggggtggcaaggcaggagaagttcaggccgcgggccgccgactctcggtcggcacggtcgcggatgcggccgatgatctcaagcccgagcgcctgcgcctcggtgctttcgccgtggtgcgcgccggtcagcgccttcaggcactcggcaaggccgatgaagccgatggagagcgtgccgtgcttgagcacctcgcgcacctcgtcgtccaggccgagcttttcggagtccagccagacgccctgccccatcaggaacgggaaattgcgcacgcggcggcggctctgtatctccagccgctcgagcagctggccgacgacaaggtcgagcatctcatcaaggctgcggaaaaaggcctcgcggtcgccgcgtgccagaatggcgagccgcggcagattgatggacgtgaaggaaaggttgccgcgccgcgccgtgacctcgcgggagggatcgtaggcgtttgccaccacacgcgtgcggcagcccatataggcgatctccgtttcgggatggccctctttgtaatattgcaggttgaacggggcatcctggaatgagaaattcgggaacaggcgcttggcgctgcagcggcaggccagccggaacaggtcgtagttcggttcgccctcgttgagattcacgccgctcttcacacggaagatctgaatggggaagatcggcgtctcaccgctgccaagcccggcctccgtggcgagcagcaggcttttcatcacaagacggccctccggcgaggtatccatgccatagttgatggaggaaaacggcgtctgcgagccggagcgggactccatggtgttcaggttgtggataagcgattccatggcctgataggtcgcgcggtccgtctcctccgcagcgcggcgggcggcaaattcctgcgcgcggcggatatcgccctccacgcagccgaaggctgccttgagctgcgccgcctcggcatcatcataggccttctgcccggcaagcgccggagtcaggcctttttcggccagtgaagccgcaaagcccttgagctgagcatcggtcggtgttacgccgcacagcagctccagcgcacggctgaggttctggcggtagcaggcgcgatacgtcttggcaacgccctcggccatggcatagtcaaaattcacgatgctctggccgccgtgctggtcgttctggttcgactggatggcgatgcaggccagcgacgcatacgacgcgatgctctgcggctcgcggatgtggccgaggccggtggaaaaaccgccgtggaacagcgaaagcaggtcgatctggcagcacgttgtcgtcagcgcgtaaaaatcaagatcgtggatgtggatatcaccgcgctcatgcgccgtagcgtactccggcttcatcaggaaggactcggagaactgcttggcggcctcggagccgtagcgcagcatggtacccatggcggtgtcgccgtcgatgttggcgttctcgcgcttgatgtccgaatcggcggcatccttgaacgtgatctcctcaaacttgcgcatgaggctggaattcacctgccgcgcgcggctgcgctcctcgcggtaaagaatataggccttggccgtgcggccgtagccctcctgcatcagcacctgctccacaaggtcctgcacatgctcgacctccggctcgcagccctcgagctcgagcatggtctccaccttgcgggcaagcgcgtcggagacgtcctccatgccggtctgcccgacaccgaggaatgaacgccagatcgcgttccggatcttttctgtatgaaattctacgagtcgcccgtcccgcttgcggatcattttctgcgtcatgactgtctcctctcgcacacaagatatggtagtaccgcgcaggcacaaaacgcatatatcgtactgcaagttccggtgtctgtcaagcacggcccggctgaaatagtgcacaaaaaaaatcggggccgttttcggcagacccgcgattttccgtataatctgcgcaccgggtgtgcatactatccacagcatatgacaacaggagggaaatcaagatggacatgcttgcgctgatcctgagcatcatcggctcgatcaactgggggctggtcggcattttcaaattcgatctggtcgcctggatcttcggcggccagacggccgtcgtcagccgcatcatctacacgatcgtcggcctcgcagggctgtggtgcatctcgctgctgttccgccgccgcccgctgcgcgccgcagaggacgatgcataaccaccagaaaaactgcacaaaggcagactgccggaccgagccgcaatggcccgccggcagtctgtttttttcgttctaccagagtagtgcagccgcgaccgtcgggactacgagaatgcccgccgcgatgagcatcgtctgaatggtgctgcgtgttttgcgcgacagcagcaggatgaccgccgcaccgcctgcgccgaacagcacatgcacgagcgcgcgcagccccagaacggtccggatgcgccagcccgctggcacgccgctcagcaggggcaggctgtttgcctgtgcgccccactccggcagtccgtaggccccgcggacggcaagcaggcgcggcaggaaagctgccgtcaccatcaggagcaccagcaccgccgtgagcagcagcttgcgccgcagcacgcggccgttcgctccggccgccgtctgcagaacggcaacgcccgtctcctgctccatggcaaacacggcggacagcgcgaccgtcaggaagaagaacagcttcgcaaggtccagcaggtccttctgcacaccaaagtagcctagcaggacgttatagcccgtctcatagacataggactgccccggctgcagctgctcatactgctgctttgcctgctcaaagccgtcctgcgcccgcagggccgagagaacgtcgcgcgccatgaactgcagcgcatcctcgttgccctccgtgatgcgggcatagtccgcaagctcgttctgcagctccgcaaagcgggccgtctccgaggcaagataagcgttcttttccggcgtcggctcgcctgccagcttttcggaatacgcgcggtagaaccattcgtccgcattgaaataggcccggaaatcgcgatagctcccgacctgcaccagcacaaacaccgcaagcaccagcagcgccccgcccgtgagcaggagcttccgcgcctcataggccagcagcaccgtgtgccgcaggcgcggcagcggcaggccccggcgctggcgcaccggctggaccgcctgcgtgcggcagaacaccaccgcgccgccgaggcagccacccaccgtcagcagcaggagcatagcgggaagcagcgccgtctgccggagcggcaggccgaagaaattcagataaatgcagccacgccagctctcctcaacctcggccgcacggctgaggctgagcagccggggccaaagtgagccgcggctgccgagcagcagggcaagccccgcgccgccgcccgcaagcaggaacgcggcccacgcgcggcctgtcgtggtgcacagcaggaagaacagcgcgcccacggcccagccccataggagcttttcgcccaaaaagcacaaaagccagccaaacaccgtcagcgggaccgggcagctctgcatgctggggatcgtctggatggggcgcgccgggtcgcccagcccgaggacggcggacgaaacggccagattcgcgccatagagcagcacgacgcccgcaagcaccgttgccagcatggcggcagccttgcgccagtagagcgcgccgtggccgcgccgcgtcgggcgcagcagcaccatcaggcccgcgcttcgttcgcccgtcagcaggaccagccctgagaccgccgcaaacagcagaagcagcaggtccgtcagccgccagtccagcagcacctccacgccgtccgggaaggacggctccagccgcacgccgagcagggcgctgtaggccgcaaggcccttttccagcgtgcgctcggcaaagggatcggcggagaacaggccaaggcgcagcttggcctcggtctcagcgcagaggccgcggaggtattcggggtaattattcgtcgtctcgacctcgtcgcgaaccgtgctcagcagggcgtagcgccggaggtcctcgtccggcacctgcatgatatcgacgtcctcgacgtagattccgttgagcagggcgtcatactcctgctccagcgtgtccagatgggcatactccgcccggatgtccgcgcgggtgaagccgccgaggtccttggtgcagcggcggtagaacagcgccgcattcaccgcgaccgccagcgcgagcaggagcatcacatagcggttgcccagaattttccgcagctcatagctcatagcccgtcctccgcgccgaagtagtgcagatacacatcctccagctccggcgcaagcggcctgcaggcaaagggcggctgcttttccgccagcaggcgcacgcggatatgctccgcatcgacccgggcgatgccgcagaccgtcccggcggcctgcgcggcgggcagctcggactcggcaagctccgcctcccagacctgcccggccagctcatgcgtcagctcggccggagaggccttgcgcagcagccgcccctcggacaggagcagcagctcgcttgccacatactccacgtccggcacaacgtgcgtcgaaacgatcacgatcttctgcagggcgatctccgcgatgagattgcgcaccgcgatgcgctgccgcgggtccagcccggccgtcggctcatcgaggatgagaatgtccggctcatccagaatggcctgcgccagcagcaggcgctgcttcatgccgccggagaggctgcggatcgtcttgccgcgcacgtcggacaggccgaccgcgccgagcgcccagtcgatgcgctccagcgcccgtgcgcgcggcatgcggcgcagcgaggccatgtacagcaggaagcgctccgccgtaaagcccggatagagcgtctgctgctggggcatgtagcccacacggccgcggaaggccgcgccgagcgagcggatctccgcgccgttgaagcggatctctcccgccgtctggcgcaggttcccggtcaggatattcatgagcgtgctcttgcccgctccgttcggcccgagcaggccgtagatgccgcccgttagctcggccgaaaagccgatcagcgcctgtttttttccgtaattcttgctcagggcatcaaatgtcagttccatcgtccatctcccccgccgtctcagcggaacgccgcgtcatagttgcttcggtaaaagtcctctttgctgcggaggcagtcatgtttcctaagacttgaatgttcatttccggaaccggataagtcgtaacaggaatctccgagtctgtaacgcacgcaccctaggtctcgcctttcagctccttagcctcgctcacgggagcagcatggcggccgcacagattcgctatcgcagcaggctcagcattcctcgactggtcaacatggccacctcctcagttacctgtttctatcagcttgccgaacgggagcctagcgttgcctgcagcgttgtactaccattaactgacgcactaccgccaacataatttatgccagtagcatagtcaccagctgccctatacgttacatcgtaagagtatgtggtcgtgccagcctgaatcttctgtgccagagtgtatgctctcgcaccgctcttcacaatttgatagccgttgtaatgtgtttcaaactgtaccgtcaatgcattatggacgacagttgtctccgcaatcgtctcgcatttgctcctagccacattcgagctattgaactgcagatagaactttgcggagtactgtacaccatttgcggtgaacgtcttttgatcgtaccccgaaccaggtgttccatacggctcaacgtcagcatcggctgcgaacgccgggatagaaagcgtggtcagcaggcagagaaacgtcagaatgagtgcaaataattttttcatcctatatgcctcctcagaaacagagtagatgtggttatcatattacgggcatcgtctgaacatgggagttaacagtgaacaatttcttctctgtccctcccgtctctattcaactattggaatcaccgtattgtcttaatccttgtataatttagcgaatattcatcgcagtctgtcagtggaatgctccatcatagttactccgataaaagtcttctttgctaatgtaacagacttcaacattgccggatggctctgtcagcaggcccttaaaataaccatcgcactcataatccgtggaaaatatcattacatttccgctgcgggtgtccagttcggtcacgacctcatctgcaatatcgattgcccaaacccggcagacattctccgttccgcagatggcgatcacatgcccgtccagaatcatataattgtagaaatcccagttctgctcataggtaaagagttttttcgccgcctgcttctccagatcatagacatacagactgcggtcgacctgatacacagcgtactggccccagcttctgtgcgggtcgactgtcatgacaaagttctccgatgtatccacgagcacgctttcctcaccggtctggagatttctggtaagaaagcgataccggacaaactgccggtcatactcatcccatgctgttccctccggctgctgcgcaagccagtcttcaaattccggcgcatcttctgccatttccagcacgcggaggactgcgatgtcctcccagacgccgtagagatcatagttatcacaattttcgaggatcgtcgatatctcacccgtctgcaggtcgacagagacaaggctgctctcctgcgcgacagctgtcagctgtacgccctccgtcagttcataggtctctctgttcgaaataacatatgcttttccaaaggatacgcagcgcagcacacatcggcatgcctcattctcgttttccggctcccagcttgcgagggtctgcagcgggccgccggacagcggacgcgtgacgagcgccgaggctgtctcgtcgtccgtataaaccaacgcatagtagtttccccggtattccaccagagactgcaggtcgccgaagcaggcattacaggtgggatcattatgccggcagccgttctggtagcacgggacataggtcgttctggtcacggggtcataggcctgaatatagggccggaaaaacgtatcccactgccagaacccgccggtcgaagcggaggcggccatgttaccaaatactcgaatgttctcctccggaaccggataagtcgtaacaggaatctccgagtctgtaacgatcgcacccgaggtctcgcctccctgctccgtagtctcgctcacaggagcggcatagcagccgctcaggatcgctatcacggcagatgctgcaagcagcaggctcagcattcttcgactggtcaacatggccacctcctcagttacctgtttctatcagcttgccgaatgaaaacccaaagtcgaagtcaaaagtgtagtaccattgacatatacacttccaccaatataatttacgccagtagcgtgatccgtcgatgtgctatataccacaccgtaagaatatgtattggttccagcctgaattttctgtgcaatcgtgtacgatctcgcaccacccactatggtctgatatccgttacggtatgttttgaactccacagtcaatgttctatggtcaatttgtgtctctgcgagcgtctcgcatttgctcttggccacatacgaattatcgaactgtaaataaagcgtagctgtatatggcaagccattaaaggtaaactgcttctggtcataccccgaaccgggagtaccatacggctcaacacctgcatcagctgcaaacgccgggatagaaagcatggtcagcaggcagagaagcgccagaataagtgcaaataattttttcatgctatatgcctccttaatatatagagtggatgtggttatcaaattacgaacaccgtctgaacatgggagtcaacagcgaactatctcttctctgccgctcccgcctctattcgaccattggaatcaccgttgcctttcgtacagaattcccactgcagaggtctccgcagaattttcagttcttgatacattttgtagcctgagtatatcacttctgaatttccaaggcaagaggttttagcgaagtttttcacaaatttttgtagattttgttggaaacgttttcagttttatctctattcttgtatagtttaacgaatattcattgtgctctatcagcggaacgctccgtcatagttgcttcggtaaaagtcttctttgctgatgtaatactgatcagcgttattcgaagcatgcagcagaccgacgaagtagccgttgcactcataatgtgcagaaaatgccaccacattttcgccgcaggtgtccagctcaacgacagacccatccataatatcgattgcccatgcgcggcaggtatcttccgttccgcagatggcggacacatgaccatccatgattgaat

SEQ ID NO: 11191 - DNA, 2273 bp, Unknown
  gut microbiota DNA sequence
cgagtctctcggcgtggaggtccagttccagaccatcgagtgggacaacaaggtcatggagctggacggcaagaccatcgacgtcgtctggaacggcatgacgctgacggacgaggtcacgtcctccatggcgtgctcgaatgcctactgcaacaacgcgcaggtcgtcattctcccggcggacaaggccgcggattacagcacgaccgactcgctgagcgtgctgcgcttcgccgtggaatccggctcggccggtatggcgcaggccgaggaaaagggcctgacgtacacggatgtcgtcgatcaggccacggccctgctggaggtcaagtccggcacggcggacgccgccatcatcgactcgctcatggcgggcgcaatggtcggcgagggcacgaactacgccgatctggccatcggtccggtgctgaacgccgagaccggcgagcagtacggcgtcggcttccgcaagggctcggacgccgctgcggcactgaacgaatttttccggcagcagtgggaaagcggcgcgctgcaggcgctggccgagcagtacggcgtgcaggccgcgctgatcgagcagaaataacggaacgcagcagggaggcagcagtcatgatcaaaaccgtacttggcgctctgaacggcggctttttgcagacgctcaagctctttgccgtcacgctggcgggagcgcttccgctcgggctgctgctgtccttctgctccatgagccgcttcaagccgctcaaatggctgacgcggacgcttgtctggatcgtccgcggcacgccgctcatgctgcagctgctgattctgtattatgttccgggcgtgctcctgggcatgagtccgtgggcgcccggcgaatcggggcggtttctcgcctcggccatcgcgttcatcctgaactatgccttctatttctcggaaattttccgcgcgggcatcgagggcgtgccgaagggccagcaggaggccgcgcaggtgcttggcctgaccgggccgcagacgttcttccatgtgaccctgctgcagatggtcaagcgcatcgtgccgcccctgtcgaacgaggtcatcacgctcgtgaaggacacgtccattgcgcgcatcatctccatgcaggagctcatctactccggctacgccttcctgaagggctcacacggctattccggcctgctgtggccgatcttcttcacgggcgtgtactatctggcctttaacggcatcctgacgctgctgttcggccgcatcgaaaagcggctgcaatatttttcctgagaggaggggcggacatggccattctggaagtcgagcatctggaaaagcgcttcggcgggacgcccgtcctgcaggacgtctcgttctcgctggagcagggccagacgctggccatcctcggctcgtccggcagcggcaagacgacgctgctgcgctgcctgaacgcgctggagcagccggatgccgggtgcatccgcgtggcgggcgagacgctgtttgacggcggcgtccgcacggcgcagcgcggcggcagactgccgttcgggctggtgtttcaggccttccaccttttcccgcagtacaccgtgcgcgaaaacgtcacgctggccggccgcctgcaggcaaagcgccgcccggactaccgcgcgaaccgccgcgaaattctgcagcgcatcgacgacgaggccacccgcctgctcgggcaggtcggcctgctggcccagcaggaccgctaccccggccagctctccggcgggcagcagcagcgcgtggccatcgcacgggcgctggccctgcagccggacgtgctgtgctttgacgagccgacgagcgcgctggacccggagctgacgggcgaggtgctgcgcgtcatccgcagcctcgccgagcggcgcatgacgatgatcgtcgtgacgcacgagctgcagttcgcccacgatgtgtcagatcaggtcatttttctggagcgcggcgtcgtggcggagtccggcacgccggacgagctgttcctccacccaaaaaacgaccgcacgcggcagttcctcgccgcttatgtaaaataatggcgctgtagtatcgtaaggtgttgtatgggtggggacagcccggcccggcgcaccgctgccgactcaaacgggctaccggcaaaaacgtacaaaccgattgcgtctgtagcggcgctccctgagcgccattggcagttgcaaattttgaagcagttccgccgaccgcacccgctattgtaggggagcggcatgccgctcccggcg

SEQ ID NO: 11192 - DNA, 1616 bp, Unknown
  gut microbiota DNA sequence
agacctattctgcagattcattatagcacgccataataaaaaaacaaaggaattttccgaaattttgtctgtttctcatgcgttgccgcacaggcggcagtatccgcaatcggaatacggcaggcacttgcaattcgtacaggctgccggcaaaaacgcacaagccaattgcgtctgtagcggcgctcactgagcgccattggcagttgcaaattttgaagcagttccgccgaccgcacccgctattgtaggggagcggcatgccgctcccggcgcaccgctgccgactcgtacaggcccccgttaaaacggtaatgacccccgatttgtcattgtgaggagcgaagcgacgcggcgccctgagcgcgaagcgcgaggaagtgcccttggggtgcaatctcgcagtacccggtcggataacaggaaagccccggcgaattcgtggcataaaatgatccggcagcgctttggcgctgccggaccttttttccgatctcaatgcgacggccattcgaccgccgtcggccactgtacatgctggcgggagccgagcagataaccgtccagccaccaatggcagggggacgaaccatcggagaagccgtcatccgcgagccacttcagcagatctgcatcatccggagctttcgtgctgtattttgcaccgtaaacacccggatacacaaagcgccacagatcgatcacgcaggaataccaatcctgcggaagctgacgcagatcgtagccgtcttccccggaagctcccagattctgctccagaacatccgggagctgcaccataagcgcaaatgccgcctttgcatccggatactccgcaaaatacgcatcatgcgccttgacgcaggcgtcgagtttttccgctgcctcccggaaactgtcaagcatcggctgctcaaagcccggaacgagccgacccagttcgataaaataaagctgcgtgctgtcgagcaattctgtgctgcccgaggcaggactgcgggaacaggctgtcagcagagacgggaccgcacacaggaacaccgcgagaagaaaaatggacagaaccttgcgccatgcagcaaatttcataagtacgctcctttcacattgtcaacaataattggccgcaggaataacgtggacctattctgcagattcattatagcacgccataacaaaaaaacaaaggaattttccgaaattttatctgtttctcatgcgttgccgcacagggggcagtatccgcaatcggaatacggcaggcacttgcaattcgtacaggctgccggcaaaaacgtacaaaccgattgcgtctgtagcggcgctcactgcgcagccgttggcggctttgccgccttacggatgcggcgtcccctttacggggagtaagcgcctttggcagtcacaggttgttgagcggcatcgccgaacatgcaagggtttcgaattgtcattgcgaggccccaaaggggccgtggcgccctgagcgcgaagcgcgaggaagtgcccttggggtgcaatctcgcagtacccggccggataacagggcactcccggcgaaaacgtaactgcctgcacgagattgccacgtcagaggagtgctgcggtgcaccagt

SEQ ID NO: 11193 - DNA, 230 bp, Unknown
  gut microbiota DNA sequence
atggaggcctgcaggttgttgggcattttcgtcgaacgcgcaggcgttcaggtttgtcattctgaggagcgaagcgacgtgggaatctcctgcagcagcttacgaattcgccgcagcctttctgttattcaaccgggtgcagcgagattgcaccccaagggcacttcctcgcgcttcgcgctcagggcgccacgtcggcctccggcctcctcgcaatgacaattcggggg

SEQ ID NO: 11194 - DNA, 82881 bp, Unknown
  gut microbiota DNA sequence
aatctgtatcagtcgctcgtgctgcgccgggaggggcatgcccctcccctacaacgcccgactggcagccttgtgctaactttccatttcccatttcctgctttttctctcttttcctataatgcctattgacaaagtcggatttttgtgctatgatgcgtccatcaaacgaagtgaggtggcagcaatgttctttgcagcagaacgaatgcttggctcccgggcagaagaactggccgggcgtgctgccatgcgcggagcatgccgtgagtgaggagccgcactccatgaccgtttttctgaccgggagctgttttcagccccggcttttttgttgccggaataccggcggacggaaaaatcccgtccatacgatctgaaagaatcacaaaggagacatccccatgagctatcattttgagaccctgcagcttcacgtcggacaggagcagcccgatcccgccaccggcgcgcgcgccgtgcccatctaccagacgacatcctatgtgttccgcgactgcgcgcaggctgcggcccgcttcggcctgacggacgcgggcaacatctacggccgcctgacgaactccacgcaggacgtgcttgagcagcgcgtggcagcccttgagggcggcgtggccgctctggccactgcctccggcgcagcggccgtcacctataccattcaggcgcttgcgcggcagggcgaccacattgtcgcgcagaagacgatctacggcggcacctataacctgctggcgcacacgctgccgcagtacggcatcacggcgacgttcgtggacgcgcacgacgccgcagcggtcgaggcggccatccagccgaacacgcgcgccgtctatctcgagacgctgggcaacccgaactgcgacattccgaacatcgaggccattgccgccgtcgcccaccgccacggcctgccgctcgtcatcgacaacacgttcggcacgccctactgggtcaaggtcatcccgctcggcgcggacatcgtcgtccactccgccacgaagttcctcggcggccacggcacgacgctcggcggcatcatcgtcgacgccggtacgttcgactgggctgccagcggcagctatccgcagctcgccgcgccgaaccccagctaccacggcatctcgttcgtgcaggcggcaggcaaggcagcctttgtgacctacgtccgcgccattctcctgcgcgacaccggcgcgaccatctccccgttcaacgccttcctgctgctgcagggcatcgagacgctctcgctgcgcctcgaccgccacgcggagaacacgaagagaattgtctcgtggctggcggcgcacccgcaggtcgcgcgcgtcaaccatccgtcgctgccggaccatccggaccacgcgctgtatcagaagtacttcccgaacggcggcggctccatcttcacctttgagatcgcgggcggcgaggccgaggcgcaccgcttcatcgaccatctgaagatcttctccctgctggccaacgtcgcggacgtcaagagcctcgtcatccacccggccacgacgacgcactcccagctcacgccggaggagctgctcgatcagggcatccgcccgaacaccatccgcctgtccatcggcacggagcatgccgatgacctcatcgccgacctcgaggcgggcttcgccgccgcaaagggctgatagaaaggaaaatggcgcgctgcgggacccgcagcgcgccggtttttatgcagtttgggccatatgacgctcgcgctttttccagctgaggaagccatagaaatcatggaacaggaagatgccgaaattcaccgccacgggaatataggccgggtcctcgcacgaggccagcacccacagcacgacgagcacgatgtcgttcgccgcgtagccgaggccataatacgacgagcgcagcatggtcagggcggccgcgagaaagctcgtggcgacggacaggatgctgaagccgaggttcggcgtatcgagcgccgccagcagccagccgaacagggccgtcaccgcgacggtggccagcacgagcagggtcaggtcgcggccggtcaggcggcggatggccacggcgctgcccgcctcgtgcgccgtgttgcgccgccacgtcacggcggaccagaccgccatgggcaggctcatgccgagataggtgagcatctcgccccagtagcgaaagcggcaggagatggcgccgtagagcaggcagaacacgatcatgagatactgcgcgaagacctgccccttggccgcgagcatcagggccgtcacgccggtcagggcggcgatcagcgtcagcgggtcgacgtcgccgccgaggaagttggacacggccacgacggccagcgaaccgagccagagtgcccagtctctggcccgcatggaagcaaacgggttattcaaattcaaagatcgatcctttctgtcgtgattcggtcaaaccgcgtttccggaccacgggtcagggatcgggatgcttctgccgttcagggtcatcgatcttctcccagaaaaagcggccgcattacagcggccgcatggtaattttttgcatatggcaacaccgcacaattcagcgagagcattcggcgagagattttttgtcgagacgagatttggaaagtgcagatgtactttgtgtacatcaaactttccaaaccgatgggtcggcgaaaaatatccgacgaaggccgaagatgcaattatgcggcgttgcccttatttgtcgaaggcgtcccgcagcttctcaaaaaacttctttcgttttggctgtgcgctttcggaagtcgcctcctcgaacttgcgcagcagctccttctgctcgcgcgtcaggcgggtcggcgtctccacaacgacggtgacatattggtcgccgcggctgcgcccgttgacataagggatgcccttgcccttcaggcggaacgtcgtgccggtctgcgtgccctcgccgatcgtatagcggaccttgccgtcgagcgtcggcacctcgacctccgcgccgcaggcagcctgcgtaaacgtgatgggcatctcacagtagacatcctgcccctgtcgcgtgaacagcgggtggctgcggacgctgaccgtgaccatcagatcgccgctcgggccgccgttgaggccggtgttgccctcgccgcgcacgcgcagcgtctggccgtcgtcgatgccggccgggaacttcaccatcagcttgtggctgcggcgcaccttgcccttgcccttgcagcggctgcacggggtgcggatgatcctgccggtgccgcggcaatccgggcaggccgccgtggactgcatggtcatgcccatgaaattctgctgcgtgcgcacggagcccgtgcccttacagcgcgggcaggtctcggcgctcgtgccgggggcagcgccgctgccgtggcactggtcgcagtcctccacgcgagagaccgtgacctccttttctgcaccgaaggccgcctcttcaaacgtcagctcaacgcgcgcgccgatgtcgtcgccctgcatgggggcgctggcgctgcggcgcgtgctgcggccgccgccgccgaaaaagctgccgaaaatatcgccgaggtcgccgaaatcgccgaatccggccccgccgaacgggctgcctcccgcattcgggttgaaattcgggtcgacacccgcgaagccgtactgatcgtagcgcgcgcgcttatccggatcggagagcacctcgttggcctcgttgatctccttgaatttttcttccgcgcccggatcgtggttcacatccggatgatactgcgcggcaagtttgcggtaggcgcgcttgatatcggcgtccgtcgcatcctttttgaggccaaggacctcataataatctcgcttgttctcatttgccatgctgctcacctctcctgataccctttcgggcggccgacgcagggcaggcggtggccgaagccgccgcctgccgcatacattcgtccttaatccttgacttcctcgtagtccgcatcgactacgccgtcgtcatggccgccgttgttcgctgcaccgccgttattggcctcgccctgctgcggggcggcctgctgatacagcttctcggagatggcgtagaacgccttctgcacggcatcggtcgcggccttgatggcctcgatgtcattgcccttgttcttcgtcttcagatcctcgagagctgcctgcacgggcgccttctcggactcggagaccttgtcgccaagctcgttcagggtcttctccgtctggtagatgacctgatcggctgcgttgtgggtgtcgacctcatccttgtgcttcttatcctcagcggcgaactgctcggcctccttgacggccttgtcgatgtcctccttggagaggttggaggaagcggtgatggtgatgttctgctccttgccggtgccgaggtcctttgcggagacattcacgatgccgttggcatcgatgtcaaagctgacctcgatctgcggcacgccgcggggcgccggagcgatgccggtgagctggaacttgcccagcgtcttgttgtaggcagccatttcacgctcgccctgcaggacatggacctcaacggaggtctggccgtctgcagcggtggagaagatctggctcttatgcgtcggaatggtggtgttgcgatcgatcaggcgggtgaacacgccgcccatggtctcgatgccgagggacagcggggtgacatccagcaggaccatacccttgacgtcgccgccgaggacgccgccctggatggccgcgccgacagccacgcactcatcggggttgatgcccttgaagccttccttgccggtgatgctcttgacagcctcctgcacggccgggatacggctcgagccgccgacgagcaggaccttgctcaggtcgcttgccttcagaccggcgtctgccatggcctgacggacgggcttcagcgtatcctgcacgaggtgagccgtcagctcattgaactttgcgcgcgtcagcgtgacatccagatgcttcggaccggtggcgtccgccgtgatatacggcaggttgatggtggagctcgtcacgccggacagctcgatcttcgccttctcggcagcttccttcaggcgctgcatggcgaccttatcgccggagaggtcgatgccctcggccttcttgaactcggcaacaaggtaatcgatgatgcactgatcgaaatcatcgccaccgaggtgggtgttgccgttcgtggcaaggacctcgatgacaccgtcgccgatgtccagaatggagacatcgaacgtgccgccgcccagatcatagaccatgatcttctgcgaggattccttatcgacaccgtaggccagtgcagcggccgtcggctcgttgatgatacgcttgacatccagaccggcgatcttgcctgcgtccttcgtggcctgacgctgggcgtcgttgaagtaagccgggacggtgatgaccgcttcggtcacgggctggcccagataggcctcggcgtccgccttcagcttgcgcaggatcattgcggagatctcctgcggggtgtacttcttgccgtcgatgtcgaccttatagtcggtgcccatgtggcgcttgatcgaagagatcgtgcggtctgcgttcgtaacggcctgacgctttgcgacctgaccgaccatacgctcaccggtcttcgagaatgcaacaacggacggagtggtgcgattgccttcggcattcgcgataacgacgggctcgccgccttccatcacggcgacacaggaattcgtcgtgccaagatcaataccaataatttttcccataattcaaatcctcccaaagaagtaactcactgatttaatttgcgaccttcaccatggcgaagcggatgaccttatcgccgtgggcaaagccggtctggaaaacctctgcgatgacgttttccccgaggctctcgtcctcgatgtgcatcacggcattgtggcgctgcggatcgaaggtctcgcccgcttcgccgaagggcttgacgcccagcgcgtcgaggatcttgacaagctctgtcagggtcatctccacgccctttttataggcctcgtctgcggtctcgtgatgcagggcccgctcgaggttatcatagacgggaaggaacttcttcaccgtatcggcaacggcatcctgatagatgccgtccttttcgcgctgcgtgcgcttgcggaagttgtcatattctgcagccagccgcagaaactgatcgtgctcctgcgcctgcgcggccttggcctgctccagcgcatcgggctgtttggactcggccttttgcttggagccttccgcctgcttcggcgcttccgcctgcttggcggcctccggagcggcaggctccttctcgttcttttcgggttcttcgtgtttctttgccaaaatttattcctcctcctttgcctcgtgcacctccggcttcggggccgcgggcagctccggcttgccgaacatccggccaagcccttcggcaaagtagcttaatcgtgcggtgatctgtgcgtaatccatgcgctgcgggccgaccacaccgatcatgccctgcatgccgtcgccgatgtcaaagcgcgtcacgacgacggaggtatccttcagctcctgcgcaacgttttccgggccgacgaggatctgaacggggctgtccggatcgagccgggcgggcaggttggagagcgtgtcttcatccagtgcgccgagcacctcctgtgccttggtcaggtcctgatattccggctggcccagcaggcggttctgcccggtaaggtaaatttccgagcgatgagcctcctcgagcacatgcgtcgtaaaatcgacgatgacgggcacgaggctcgctgcggcgcctgcgctgcgcgtcacgcggttcatgacctctggcgtgaagccggaggcgggaagcccggtgaggctcgcattgagcacggcggacaggagcttgaggtcctgctccgtcacatgcagcggcagcttgatgaggcggttcttgacgttttcatcggacgtcatgaccacgagaatgaagctcccggcgtccgcgaggatgatctcgaaatggcggacagtcacttccccggccggagccgtcatggtataggccgggaggttcgtcagcttggagacgagtttgccgacctggctcatggccttgtccagctcctgcatacgtgattccatggcctgattgatgctctgcgtctcgtcgacggagaggcggtaatcctgcatcagacggtcgatgtagaagcggtagcccgcggggctcgggatgcgcccggccgacgtgtgcggctgctccagaaagccgagcgtcgtcagctcggccatttcgttgcggatagtcgcagaggagaagttcatgtccggcagcgcggcgatcgtcttggagccgaccggctctgcgctgcggatgtagaggtcgacaatggccttcaggatcttctgtttgcgctccgaaagctccatggctttgacctccttgttttcctttagcactccgtacccctgagtgctaagctaactataccccccaaacgcaactttgtcaatacccaaacggaagttttttttgaacgttttgtgaaccctcccacagcgacagctttcccgcatttccggggatgcatacccggatatttggacggctcggctgcagcggcgctccctgagcgcctaaagcagttgcatgtagtacagcagcaattcagcggcgcgaggcccccaagtttgtcattgcgaagaggccgcaggccgacgtggcgccctgagcgcgaagcgcgaggaagtgcccttggggtgcaatctcgcaggtcatagccggatcgcaggaaagccatcggcgaaaacgaaactgccttcccgagattgccacgggcgcaaagcgccctcgcaatgacaaatctggggccatttccattttaacgatagtctgttcgggccggcagcgtaccgccgggagcggcatgccgctcccctacaaaatagaaaaatcccgccaggagacccggcgggatgcagactgtcaaaaaaactgcccagccgaaaatttcggagggaagaaaagtgtgaaaggaaaccgtcagggtgtcctttcgcgtcaaataacccgccgcagcggcagaattgcaaaatcatgctgcaaaatttgattttgcaattctggaagcagcttggcgaaaaagtccaaagggacttttttgacaagctgaatcccgccgggagacccggcgggatgagctgtgcgatcttgaattactttgccagaccggcagcggcggcgacttcagcggcgaaatcgtcgaccttcttttcgatgccctcgcccttctcaaagcgaacggcgtcgacaaacttcacggagccgcccagcgccttggcagcgctgttcatatactgctcgaccgtgacgctgccgtccttgacgaacgcctgctgcaggaggcagttctcctcgaagaacttgttcatcttgccggcggcgatcttctccttgacctgcaggggcttggaggccatcttttcgtcgttgtccatctgggcgacgaggatcttcttctcttctgcgagcacgtcttcgctgacctggctcttatcccagaagcgcgggttcagagcggcgatctgcatggcgatatccttgccgatcacggtcgcgtcaatgccgccggagacctcgaggttgacgaggacgccgatcttgccgcccgcatggacgtaagcgacgctgaagttctccgggaagcgggcaaagcggcggatctggatgttctcgccgatgaccatgaccttctcggggatcatctcgccgacggtcagctcggagccggggtacttgcagttcttcagggcctcgatgtctgcgggagcgtccgcagcgacgaccttggcgatatccttgacgaaatcgacaaacagcggggtcttggaagcgaagtcggtctcggcattgacctcgacgacgacgccgacgccgttctcgacggtggcgtaagccatgccctcggcagcgatgcggctggacttcttggcggccttcgccaggcccttttcgcgcagccactcaatggccttgtccatatcgccgtcattctcggacagcgccttcttgcagtccatcatgccgacgttggtcatttcacgcagtttcttgacatcagcagcagtaaatgccatggttatatcctcctgtatcttctgtttcgaaaaaacgcccgccgcacgcggcgggcgtctggtttccaatgaaccggatgggattattcggcagcagcctcggcagccggagcggcctcggtgttggcctcgccctgacggccttcctgcacggcgttagccatggtggcgacgatcaggcggatggcgcggatggcgtcatcgttgccggggatgacatagtcgatctcgtccgggtcgcagttcgtatcgacgatggcgacaatggggatgtgcagcttgcgggcctcggcgatggcgttgcgctccttgcgggggtcaacgatgaacagggcgccggggagcttcttcatgttcttcacgccgccgagatacttctcgagcttggcgatctcgccctcgtgcttgatgacttccttcttggggagcatggcgaacgtgccgtcctcctgcatcttgcgcagctgagccagacggtcgatacgggtgcgcatggtcttgaagttcgtcagcatgccgccgagccagcgggcgttgacataatactgatcgacgcgctccgcctcttccttgatggcgtcctgcgcctgcttcttcgtgccaacgaacaggatgttctcgccgttggcggcaagatcacggacgaagttgtaggcctcttcgatcttcttgacggtcttctgcagatcgatgatatagatgccgttgcgctccgtgtagatgtacggagccatcttggggttccagcgtctggtctgatgaccaaagtggacgcctgcttcgagcagactcttcatggatacgactgccattttgtgtttctccttttttgttttgacctccagtccgttcctcttccccgtccaccgccgaggcggcactgggacggagcatcccgggctgtgtgggttctgaatttgcgggcctttgcccacgccgtactattatacaggaggaagtttcagttttcaagcgttttttgcgaaaaactggtccgatttttccgatttctcagaaaaattccctcttccggcggggacagcgggtcttatccagctcggactcaatgagaataatgtccgcgccgacacggcggacctgctcccacgggataacatagtcatctcggcggccgagcaggccgaacaggcggcacggcacgggcacgacgagcgcggccacgcggccgcacttcagatcgatgaccacgtccgacacacagccgagcctgcagccgtcgcagatattgatgacctcgcggcagcgcagcgaggaaaaccggtcttccatcggatcacctgccccatttcgtctgccacactctatgcggcggcggagcaggatattccttaacaaatcgccttgcggagcgtccgaatggcgtttttctccagccgggagacctgcgcctgcgagatgccgacctcggaggcgacctccatctgcgtccggccgtcgaaaaagcgcagggccaggatgcgcttctcccgctcgccgagcgtggagatggcctcgcgcagcgcgatgcgctcgacccactgctcgtcggtattcttcgtgtcgcgcacctgatccatgacggtcagcgggtcgccgccgtcggtgtagaccgggtcatagagcgagacgggcgcggaaatggcgtccatggccgtgttcacggtctcgagcggcagctccagccgtctggccacctcctcgagcgtcggctcgcgcgactgctcggcctgcatggcctcgcggcactgcagcacgcgataggccgtgtcgcgcatggagcggctgacgcggatggcgctgttgtcgcgcagatagcggcggatctcgcccgcaatcatcggcacgccgtaggtgctgaagcggacgttgaggttcacatcaaaattggcgatggccttcagaaggccgacgcagccgacctgaaacaggtcgtccgggttctccccgcggccgagaaagcgctggatgaccgacagcacgaggcgaagatttccctcgatgaggcgctcgcgcgccgcctgatcccccgcctggctgcgccgcagcagctccaccatttcgtcgtttttcagcgttttcagatgcgccgtattcacgccgcagatctccaccttgccctgcatggctccgtatcctccggtcgttttactgttcccatcaaacgggaatagtcacagtatttcccgacaggcggatttgataccagcaggcaaaaaaacggagagctcagtcctgcagctgagctccctcagaatgttaaaaaagcctcgcagagtttgcgctcgcaagcgcaaacagtggaaatcattttctccggcggcatgtacgtcgaagaaaataccgctcggctcgcaaacgtgcgaagggtgcgcccttcgtgcgctgccgcgagccgcagccctttcaaacgagagcccagtgaaacgggtctcgtttgagagcttgtcaaaaatccttttttgacaagctcagggcccacagcgcaaagatgcgtagcggctcgaaaatatcttattataatattataattataattgttcgcgcaggcgggcgatgtcacgccggacgctgtcggccgtctcgccctccgtgaagctccactccgtgcggtaaagctccagctgctcctcccgcgcagcgatggccccggcggtgtcgccccgcagctcgcggaggatggccagcgactccagcgcgtcgacatagcgcggcggggcctgctgcgtcagggcgcggcggtaatagcgctctgccgcatcatagtcctgcagctccgccgccagatcgccgagcgacaggctgacgagccattcgtccgggaatcgctcctccatctcagcccagcaggcacgcgcctcttccatgcgcccctcggcccgcagaatttttccgcggtagagcagcacgcggtagctatcgtccacgcgggccatttggacaagatagtcccgcgcctccgtcaggcggccgtccgcgatgaggtcgtcgagcagccagagatagccgcgcgggtaatccgggtgcgccgcgacgaattcgcggtaataggcgatacgcagggcgtgattgtgcacgcaccagtcgccaaacgtgccgccggtcgcctcgcagagctcgctgtgggcgtccttctccgtcggactgacggcaagcgcctgcctggcatattccgccgccagcgcatggtgctgctgcgcctgatggttgtacagctgggcgcgcaggcaccagcagcggccggggcggtagcccgcctcgatgcgcgactgcagaaagcgctcggcccgctccagctcggcctgcggcagcagacggctgtcccagatccggttctggatgcggtcgagctcattgtcgtccgtcaggcagaacagctcgtcaagcgtaacaccgaagaaaatagcaatatccggcaggagctggatgtccggcgtcgtcgtgccgcactcccacttggaaatggcctgcggcgtgacggacagctcggcggccagcgcctcctgcgtcagatttctggcaatgcgaagctcgcggatctttttcccgatctccatgttcgtttcctccgttcaaagtcgtgcagcgctgcgttctggatacagcataccacacgccgcgcaaaaaggaaagcgccgcgggagcgggagcgcgcaaccggcaggcgagtcagccgcggtggaacaggccgcgcttgacatagggggcgctctgcacggacacgagcttgtagccagtcggctcgagcgcgcggcgcagggcatcctccgggatctcctcggccgtgacgagcacggtctcgcccttgctgtgcgacgagctgaccttcttcagcgggaaggccgcgcgcagcgtgtcgttgacgtggctctcgcacatgccgcactgcatgccgtcgatcttcaatgtcatctgtaccatagaaatcgcctccatttcaggttagtgttttctaaccaacgtttcaaaaaaaacagaccgtttatgacctgcttcattctgccgaaaaagcctcgcagagtttgcgcccgcaagcgcaaagaaagtaggaatcattttctccggcggcgtgtacgtcggagagaataccgctcggctcgcaaacgtgcgaagggcgtgcccttcgtgcgatgccacgagccgcagcccctttcaaacgagagcccagtgaaacgggtctcgtttgagagcgtgtcaaaaattcttttttgacacgctctccagcctgcttttaggatagcacggagtcccgcgcttgtcaagtctcagcgctcattctcgcgcagatggccgaggcttccgcccggatgccacttgacatactgctgcggcgtgaccttggcctcgctctgcagcaggacgctcagggcctgcagcacgagggtctcggccaggatggaggcgcggggcgcgcggtcgagcgggccgccctcggcgtccgcatgggccagcagatggacctcgctctgctgcgcgagccacgaagaagcgttgccgctcacgccgatgacggcgcagccgttgttcttcacggcgctgaccgttgccttcatctcggcggtctcgccgctgttggagatgaagatgacgacatcgcccggcacgagctggccgcaggagccgtgcacggcctcggtgccatgcaggaaataggcgggcgtgcctgtggaggagaacagcgaggccgcatagcccgccagatgcgcgggcttgccgatgccggagatatgcaggcgcttgcccgccgctttggccgcgaggatcagctccgccgcgcgctcgagcgcgggatagtccatgttgtccagcgtggcggtgacgttctcgcgcgccgtgcgggcgaatttttcataatcggctttccaggtacgttccatatctcagccctccagtccgctcacgccgccgggcatggtcgcggcgacctcggccagcgtgggaagcgacggcatcgcgccgagacgggagactgtcagggccgccgtgtggttggcaaagcgcagggcgtcctcggaggacaggccgctgcaaaccgccacgcagaacgcgccgacgaacgaatcgcccgctgcggtcggatcgatggccttgacgccggggacggacggactgagcacgaacctgccgtcctccacgagggccgcaccggccgagccgatggtgatgagcagcttttccacgcccttttcgccgagcttcgcggcggcggcgcggacggaggcctcgtcgacatggctgccctcgtggccgatggcaacgccgctcaggtcgcgggcctcgtgctcattcggggagaggtacgtcaggcaggcaagcagctcctcgggcagcggggcgctgggggccggattcagcatgacgggcacgcccttgtcgtgggcatattttgcaacgatcgtgttgatctccatcgggatctcgagctggagcacgacgaggtcaaattcggcgatgcggtccttcagaaaggcgacgtcctccggcgtgatggtcatgttcgcgccgggcacgacgagaatgcggttctcggtgccgccgttcggctgctcctcgaggatgatgacggagcagccggaggccgcgttgtcgtcatagaggatgcaggacgtgtcgatcccggcctcctcgcaggtgcggcgcatctcgtcgccgttcgcgtcgtgaccgagcttgccgcacatcgtgacctgcgcgccgaggcgggccatctgcacggcctgattggcgcccttgccgccgggggccttgttgaagcgctcggcaaggatcgtctggccctgacgcgggaagacgcgcgtcgtgacgatctggtccatgacaaagctgccgacgaccagaattttcggtttctttcccattgtgtttctcctttttgcgagtctcctctgcaggcagggagacggattttcattcacgcaggcggcggaccgcccgtcagcttgtcaaaaaagtcccttcaggcctttttcgccaagctgctatcagaattgcaaaatcaatttttgcagcatgattttgcaattctgccgctgcggcgggttatggaacgcgaaaggacaccctgacggtttcctttcacacttttcttccctccgaaacttttggcttggcgggttttcttgcagtctgacgggctgcggaccgcccgtatcagtatacagcatccggggccccgccgtcaaccggatgttttcgtttgacgcaaggccttcatggcgcgttgtaggggagcggcatgccgctcccggcggagcacttgcagttcgtacaaggtgtcgataaaacggtatgcaccgattgcgtctgtagcggcgttccctgagcgccctgcaggctgtaggttttgcagcacagattcattggcgcagggcaaacaggtttgtcattccgaggagcgaagcgacgtgggaatctcgcagtacaatggtgaataacaggaatgcctcggcgaaaacgcaaccggttgcaggagattgccacgtcggccttcggcctcctcgcaatgacaattcgggggcattcaccattttaacaaggccctgtttgtatcgccggtgcagtgccgggcccggctgtccccgcccctgcaatgataaatggaacggccgccgcaaacaggtctgcggcggccgggatgcacatgttggaattatactagaatctgataaaaagctttaaaagctttttatagcgccgagggcgcgtcagattctgcatgagacggcgcagcgtgcgtcagcacgatgcgagtgtgcgtagcacacgggattcctgatgaaatgttttaatcaggaatcagtattaaagcttgcccagctcgcggagaacgccgagggtgacgtccagctcggcttccgttgcgggagcgagcggcaggcgggccggcccgagcttgatgcccgtaacagcctcgatggccggacggagcagggagttcggcaggatgcggccgttctgaccggtggtcttgcagaagcgatacatcggaacaaagagctccttggccttctcgttctcacccttctcgaacgcctcgaagatcgcgcggatctcgtggccgaagatgtgagcgccgccggagacgatgcccatcgcgccctgcacgatcgtcggcaggagcatgatgtcgtcgccgttgtaaacgacgaagttcggatcgaccttctcggtagccaggaagaaatcggtgacctgcgtcgggttgacaccggcctcgtccttcacgccgacgatgttggggatggcggccagacggccgacggtctccgcctcgaggttgacgccgacgaagatggggatgttatagagcatgatgttcgcctttgtgttctcggcgatcgtcttataatgcagatacaggccttcctgcgtgggcttgttgtagaacgggcagacgatgagggccagctcgatgccgaggtcataggccttgttcgtcagggcgatggtctccttcgtggaggcgcagccggtgcctgcaatgacgggcttacggcctgcggaagccttgacggcggtctcgaacagcttcacgcgctcgtcgaacgtcagcagggaagcttcgccggtggtgccggtgacgatgagggagtcgcagaggtcgttcgtgatgacgtactcgatcagctcggcatacttgccatagtcgatctcttcgttttcgtcatagggggtgatgagcgggagcagaatcttgccgtatttcttctggaagtccatgtcagtatttcctcctgtttttgtagggccctctgtttgtgggttcagaggctcccttaattatgtttttatagtgaacgtgctaatgtgttttacagtggatgccgcacttcggcgggtgctttcctcccctcgccggccggcagccgctaatgccagccggcgccgaggcccagtgcctcggttcccggggagatcagcgaagttcttttacgttgccctcttcgtcgaaaatgacttccatcggctccgagacgatcgtcacattgtcgagcgcctcggcatccgggatcagggcttcggaaatatagaattcagaaagcgacagggtattcttgagccagacgatgcgcgggcccttttcccagtcgcagtccgtggcagtacgcagcgcaaactgcatggcggtgcggtcgctcggcataacggcgggcaggcgcacggccagcggctccgccgcggtgatgccgttcggataggtctgttcaaagtcaatcttgcggtacaggcgctgcgttgtcacatcggcgctgccgaggccgccgaagttgccgtgggatttgtccgtcaggtcaaacacggcgatgcgctggaagaacgggcggctgatgccgaggaccggagaacggcccgtgacgttcgggtccatgcccgcgccgctgatatccttgccggtctcatcgacaaacaggatgtccgcctggtcgaacgggacctttgccatccggctcttggcgtactccagcaggggcggctcctcctcgagaatgcgcccggccggaatggcctcgatgcggcaggtctggtgataggcgttctcgatcaggccgatggcaaacatgttcggcttcttctcgatgatggcgcccgcgaattccttgacattggcagccatgctcttgaagccaagcttatggcactgatatgcgccgtgctgcttgcccatgccgatgacgagcatcttgcagatgccgctctcgacctcgccgcggaagtccgtgtgggccttgatgcggccgaccgggatcaggaaatccgccgcattggcgaacttgtccagatggatctccaggccgctcctggagtgcgcgatcacctcagtatccatggaggcgcggatcggagcgcccatggcctcctccgtcacgccgtagccctcgatgatgccgcgctgaccctcagccttggcgcccgcgtggctgcccatggcggggatgataaacgggtgtgcgccgaccgacttgacctgatcgcagatggcacggatgatgcgggcgatgttcgccacatcacggctgcccgcggtaatgcagacactgtcgccgggcttgatgcggtcgagcgtgccctcgcggcgcatagcctgcgcaacggcgccctcgatgtcatcgatatggctgtggtccatctcatgacagacgcggacaaatttcgggatctggttatcagccagcagttgatcaaagatattcatgcgttatcctccgccgtgccccggaaaccggggcacggacttcatgcagtcaattacgcctcttcggggatgaggtaatccttgatgttgatacccttcttgacgcagtacttctcgatctcggcatacgttgcggggttgatgccgacgccgtgcgccaggacgtccttctcggcgtccgcttccttgtcgccgtggacatagacgcggctctggccctcggccggctctgcatcgcgcatgctctgcaggtactcggacaggcggcggttcgtctcttccttatcgccgaacagggagtagtcaatggcggcgaagaagtggcagcacttctccttatccttcgtcacgcggacgcccttgctgacggcgccgtgggacatgaccgcgcacatgatgtcgacgagcagcgccaggccatagcccttgtggccgccgaagagcatgccttcgccgcccatgggcatgatgccgccgcgggtcttctcggtgtaagcagggttggacttgttgtcgcggatgcgcaggaagacgttcgggtcgaggcaggtcgtgccggtctcgtcgacgagcatgccgggctgcagctcatggccgatcttggcatagacctccatcttgccgcaggtcatgacggacgttgcgaagtccatgtggaacggatgcgggtcggcggggatggtcacggcgatggggttcgtgccgaacatcggctcgcgggcgtaggtcgggacgacgagcgcctcggcatttgtcatggacacgcccatgaggccctgcttggcagccatcatggaatagtaaccggcaatgccgaaatggttggagttacggacgctgaccatgccgacgccgtactttttggctttgtcgatggcgagctgcatgccctggatactggcaagctgacccatgccgtcgtgcgcgtcgatgacagccatgctcaggcggtcctctacgacctcgggctttgcatcgaccttgatgcggccgatatcgatgccgaacggataaagggtcaggcggttgacgccgtgggactcgacgccgaagcggtcggaggtcaggatgacgtcagcgaccttctcgctgtcttcccggctgaagccgtagcggatgaacatttccacggccagctcatagagctttttataattgtatcgggtataatggctcttgtcctgcatgataaaacactccttttgatcagtagttacttgcccagataggcagtgcggatcgactcgctggcgagcagcttcttgctctcgccctcgtcgacgatgacgccgttttccagaacgtagctgcggtgcgagatgctcagcgccatgtaggcgttctgctcgaccagcagcacagggatattggccttttcattgacgcgggaaatgatgtcgaacacctcgtcgacgatgatgggtgcgaggccgagggacggctcgtccatcatcagcagcttcgggctgagcatcaggccgcgtgcgatggcgaccatctgctgctcgccgccggagagggtaccggccttctgctttttgcgctcatagaggcgggggaagagctcatacatctcgttgagcttgtccgccttttccttcgcgctcatgtgcagggtataggcacccatttccatgttttccagcacggtcatgcccgggaagatctcacggccctcggggacatagctgatgccgcgcttgacgatatggtgggtcttcctggcctggatctcttcatcctgccagacgatcttgccgttcttggcggggacgaggcccatgatgctcttcatgagggtcgtcttgcctgcgccgttcgcgccgatgatggaaatgatctcgccgggattgatctcgacgttgatgtcatacagggcctggatctggccgtagtatacatcgcagtgctccattttaaagaacatggatcattctccttccataccgatcttgtaacggtcgccaaggtaagcccggatgacttcggggtcgttctggatctcggtgggcgtgccctccgcgatcttggcgccgtggttgatgaccgtgatgacgtggctgatgttcatgatgatatccatgttgtgctcgatgagcaggatatccttgccggactcatagaccttcttgataatggccacgaattcggcgcgttcgttcgggttcaggcccgcagccggctcatcgaggaggatgagggtcggatcgatcatcagcgtgcgcgccagctccgtcatcttctggcggccgtagggcaggttgccgacggtacggtcggcgtactgctcgataccgatgaagcgcatgatctccatcgccttctcgcgcagctcctcctcctcgcgcttcgtcttgaacgggtcgacgaggaaacgggcgaagttcatcttcgcatggagctggccgccgatcatgacgttctccagcgcggtcatggagcggaacagcttcaggttctgatacgttcttcccatgccggccgcggcgatcttatgcatcttccagccggtgatgtctttgtcgttaaaatagatcttgccggaggtcaccgggaaggaaccgttgatcatattgatcgaggtcgacttgccggagccgttcgggccgatgagcgcgtggatctggcgctccttgacctcaaaggagaggtcgttgactgcaaccaggccgccgaagcgcttggtcacatgctccaatctcagtacggacatggatcagccctccttctgcgttttcttccggccggcgaagaaggcggcagccttcttcttgagctgggagaacaggtgagacaggccgagcggatacaccagcaggagcagcagcgcgatgccgtagaacacgagctgataatagtcgcccatgaagcgcagcagctcgggcaggatcgtgacgaggatggcgccgatgatcatgccggaggtcgagccgatgccgcccagcatcagcataacaacgaacttcgtgccgttgtcggtggtgaaggtcgtcggagcaacgtactgcatgacccaggtgtagaacacaccggccaggcagccgaggatcgtggcgatgaggaaggccatgagcttgagcttcgtcacgctcaagccgacggactcgactgcctcggggttatcgcggacagccttgagcgcgcggccgtacttggacttcgtcaggcgcacggagaagatgatcagcaggatcgcaatgaccagaatgaaatagtacagctgcgcctgcgtctcaaaaacaataccgaaaatattcggctttgcaatgtccttcacgcccatggcgccgccggtcagccactgcatgctgttggccagcgagtagacgatctgtgcaacggacatggtagtcagggacaggaagatgccgctgacgcggagactcgggtagccgagcatgaagccgacgagaacggcgacgaccagagcggccagcagaccgatgaggttcgtcgagccggtcgcctgcgagatcagggccgacgtataggagccgagggctacgagggcgatggtgccgaggttcgtctggcccgccagacccatgaccacgttcaggccgagaacggcgacgaggttgatgagcgtctggctgaaaagctggatgtaatagttcgtggagtagatcatgggcaggacgacagccacaaccagcatgatcacgggcaggatcagggaagttaccgaaatctttttgcgtttcatttccattacccctttcccatcagactttgtggcgcatgaagccgcccggacggatcagcagcacgacgatcaggaacacgaaggcaacgatgtccttgtagaccgtggggatgaacaggatggcgagggactcgaccacgccgatgagaagaccgccgaggatcgtgccggggatgtagccgaagccgccgacgataccggccgcccagcccttcaggccgatcatgttggacatggtcaggctgatggtgaacagcgggatggtcaggatgccgatgatgccgcagacgacgcagctcaggccggtcgtaatattgatgctgcggtcgatgtcgatgcccatgatggcagcagccgtcttgttctgcgcaacgcagcgcatggccttgccgggctttgtgagcttcaggaacatctgaagcgcaatgatcagaaggatggccacaacgatgatatatccatacgccttggcaaagacgaaatcgccgattttgattacgccggtcaggaagccgggaatcgtgaaggagtagggaccgtagatcagacgcagggcctcggaaatgaccttggcgaagatctgggtgcccacaatggaatacatggtcagcggcatattgcgcagggggttgaagatggtggcggagatcagacagccgagcacgaacatcacgacgagcgtgcagaggatgctcagccagatgggccagccgaggccgacaacgaaggttccgccgaagacgaaggcggcagtggtgatcagcatattatgtgcaacgttcagcaggccggaggactgccagaccagcgtatattccacgccgaccagagcgtacacgaagccgagggcaacacctgtgatcagcagctgcaggatagtttcaagcattgctttcctccctttcttgctaatgtaaaggccgtccaaccagcatatccagttggacggccttgccagagactacaaatttatttcgtttcgattactccgcggaaaccgtggtgtacatcacagggacattgtccttgatgacggcgacggtagcggagtggatgagcaggttgttctcgtcgcaggtagcaacgccctggagcatcgggaaatccttcgtctcggcgacggcatcacggatagcctgacggtcggcgctgcccgcacgctcgatggcgtcgaacacaagcttgaaggtgctgtagacgtcggcgacgtagagctcagccttctggccttcgccgtagtcgctggcatacttgtcgcagaacgcggtgacctcgggatcatcggagttgccgacgaagtcggtcacggagtaccagccctcgacccactccggctcgcagaggtcgcggacctgatccatggtgatggccggagaggcaacggtcgggacctgcaggcccagctcgtaagcctgacgggcagtcagaacgtactcagcgtcgctggcccagacgaccatgcactcagcgcccttgctcttcagatcaaggatctgaccggtgacgtcggtgtcgccgatgttgatggcttcgggatagacagccatgccggcatccttgcaggcggcttcgatgacttccatagcgccggtgccgaactcgttgttcgtgtacatgataccgacggacttgaccttgaactcatcgatgatgagcttcgcggcgcaggaggccatcaggttgtcgtttgcgcggacgaggaagcagtactcgttgtccagctcaaggagcttggggttggtgccgaggccgaagaaggggatcttcgcatccttgtaaacgccttcagcggcgaggatcatgccggagttccacgggccgacgactgcggagatcttgtcgttgccggcgaagatgttcgcgacgttaacggccatggcgttgtcggtggcgtcgtcctggatgacgagctcgaccttgcggccgccgaggaggccgccggctgcgttgacttcgtcaacggccatctgcgcagccttcaccatgcggtcgccgttggcagcgtcagcgccggtgatcttggcgctcaggccgatgtagatgggctcaccggagccggtattgctatcgccgttgctgtcggcggtattttcggtgttggtggtatcattgccctttgtctcgtcattagaaccggcgcaggcgaccaggccggcgaccattacgaggacaagcagaagcgcgatcagctttttcattggttgttctccttataataataattctctgtcgaccgagatgcgggaccagtgcgtgggaaagggggtggtgctccgccgtgggaggcggagcaccggaggaagaatcgcttttgtgagtaggaattacttcatgtcggcaaggatcttctcgatcttgcgcttgttggcctcgtcgagctcgccgaggggcttgcggggcaggccgacatagtcgaggccctgagcctgcagcgtgtacttgcagatctcctgccagtgaggcacgccgttgaccttgtcatagaagaagtagttgatgtacggctggatgttgtcctgcgcagcgcgggcagccttgacgtcgccggcgaagcaggcatcctgcagagcgcggcactgcttcggcaggaccgccgggaagccggacagccagccatcggcgccgcagagcaggccttccattgcgcagtagtcatggccatagaagacggtcagcttgtcgccgcaggcgaacttcagctcatggacacggttgggatcgccatgggcagccttgatgcactggatggtgccgtcgtcgacgagggacttgacttcctcggtgttcagctcatagccggcgaaccaggggttgttgtagaccatgatgtcgatgtccagagcagcgcggatgtcgcggaagtgctggagaacggccttcttatgcgggttgagatagaagggcaggatgaccatgacgcagtcagcaccgtgatcctgagcgaacttgctcatcttgatggtgttgagggtgtcataacggccggtgccgcagaccagaggaacctgaccagcgaggaagctggagacatgagcgatgatctcgcgctgctcttccatattcatggcgatgttctcaccggtggagccgcagatggagatggtctgtgcgccgttgtcgagcagccaagtcagatacttttccatgccggtcttgttgtaggtctgatcggcattccagatcgtcatgctggccgggcaaaggccgtaagctttcttgtgatctttcattgtgttttcctccttgaaatgatcctttcggattttggaacaaagtaattatttccaccggctcatgccggacgtggaccggttcaggcgaagcgcatcacgacgtagatgccgagggccgcaacgaggccgccgatgatcgcgccgcgcagccacggcgtcggacgctcgatgcggctgcggataagggtcggcagaccgccgcagagcaccagcgcggccgcaaggccgagggaattgaaatgctcgccgtcgttgccgaagcggaggatgcagtagccgccgcctgctgccagaagcaggccaagtgcaagctgcgccaggatgaaaatgcgttccggcacgtttgcgatgcgttcgttcagcttcgtcatgttccgtgctcccttcgctctttctgactggattatacaccgctcgacaccggtatgtcaacagattgtatgacaacaaaatcaatttcgtagaattgttcaagaaattacgccagattttgtgcacttcgcccatatattgtctgacaatacgacatcatgccaactccgctcggaggagtctgcactttcctgcccgcgccgcccccgccgccggagcagaaaaagcgcgccggaagcgcgcattttctccgattcggccgataaaaaaagcagtctccagaaaacgagactgcatttttttggggggattgttgaagtatcgatggtgtgttgtagggtgcggcgtccccgacgcaccgtgtacagcccgcaaatttggggccgctcccgatgcatgcacctgccattgtaggggagcggcatgccgctcccggcacggtactgacggccagtgcaggctgccgataagacggtgaacgccaaaggtttgtcattttatcgacagcctgtttcttgcgcaggtgcagcgccgggcccggctgtcccctcccctacaaggcgtgtgcgtttgcccggcagttggtacaaatcggcagtgcctccccgagattgccacggcccctgtggggcctctccgggagccagcgggggcacaaaaccgccgcagaggagctctcccctgcggcggcagttattccggaaaaatcagatgcgggcaacgccggaagcctttgcagcctcggcgacagcagcggcgacagccttgccgacacgcgggtcaaacgccttcgggatgatatagtcagcactcagctcctcgtcggagatcaggtcggccagagccttggcggcagccatcttcatttcctcgttgatgtcgctggcgcgaacgtcgaacgtaccgcggaagatgccggggaacgccagaacgttgttgatctggttcggatagtcgctgcggccggtggaaacgacggcagcgccgcccgcctttgcctcgtccgggaagatctccggcgtcgggttcgcgcaggcaaagatgatcgccttctcgttcatggtctggaccatttccttcgtgaccatgccgggagcggaaacgccgatgaacacgtcggcgcccttgagctgctcggacagcgggccggccttcttttccaggttcgtgacctgggccatttcttccttgatccagttcaggccgtcgcggccagcatagatcgcgcccttgcggtcgcacatggtgatgttcttgtagccagcggacagcagcagcttcacaatggagatggcagcagcgcctgcgccggaggtgacgaccttgacgtcctccttcttcttgccgacgaccttcagcgcgttcgtcaggccggcgagggtgatgacagcggtgccgtgctgatcgtcatggaagatggggatatcgcacttttccttcagcttgcgctcgatctcaaagcagcgcggtgcggagatgtcctcgaggttgatgccgccgaagctgccggagatgttgtaaacggtctcgacgaactcgtcgacgttcttcgtcttcacgcacagagggaaggcgtcaacgccgccgaatgccttgaacaggacgcacttgccctccatgacgggcataccggcctccgggccgatgtcgcccaggccgaggacggcagtaccgtcggtgatgacggcgcacaggttgtggcggcgggtcagctcataggacttgttgatgtccttctggatttccagacagggctgcgcaacgccgggggtgtaggccaggctgaggtcgtccttcgtcgagaccggcacggtagcgacgacttcgatcttgcccttccactgctcgtggagcttcagagactcttttgcgtaatccatgataaacttctccttttcttttttgatcagtctataaatttcatacaggttatattgcttttcgctttccaaagcgatggatcggcggaaaggctccgtcatccgccgccggggattgacgcagaggggattataaaaagacgctttgtgccaatgccaccatgatcggcagcgtcaggaccgacagcagcgtgctgatggacacgaggttggccgccgtctcgctgtcctgccggaacagggtcgagaacatcgtcgtggcggcggcgacgggggccgcgatatccacgatgcaggccgccaggagcatgccgtccagccggaaggccttttgcagcaggaacatcagcccgatgctgcacagcgggatgacggcaagacgcagggcgatggtgatgtagtaattcgcgtgcttccagatggtgcgcaagtcggccttcgagagatagtagccgctgatgaccatgggaacgggcacgttcagggcgctgaaatagtggatgggctgcaggatgatcgttggcagctcgatggagcacacaaagatcacgatgccggtcagcacggcaaggatgccggggttcagcagcagctttttgaacgagatctgcctgcggtcgccgctcatgagcacaaggccgaaggaccacgccacgaggttatacacgccgatccacgttgccccgtagaacacgccgtccgcgccgaacaggacctgctgcagcggcaggcccatgtagccgcaattggcaaacacggtgccgtagcgcagaacgcggcgggtcggctccttaccgccgcggatgcagacataggcaaacgcggcatacagcgcgtgcgctgcaaaggccagcagggcaacgatgcccatggcgcgcagcatagcgctgtcaaactggcggcagaacgactcgacgatggcgcagggaccgacgatcttcagcgcaaaggccgaaaggtgggaaatgctctggtcgttgaaaatgcggatctttccgcacaggaatccgacagccagcaggacaacaaggatgaggacctgctcgccagtcgacaggatattgcccagcatagaatcccttctctctgcaagatggtctcatcatagcagagaatttggatgatgtcaacggtgaaattgtatgtcaactgattgtatgacaacaaaatcattgacaacccgcggaatttctgataggatgtttttgtgggaactgacaaaaatttgtctgatgtctcccctgcttctcatactgattcctgattaaaacatttcatcaggaatcccgtgtgctacgcacactcgcatcgtgctgacgcacgctgcgccgtctcatgcagaatctgacgcgccctcagcgctataaaaagcttttaaagctttttatcagattctagtatcagaactgcgcgtccattccggcgctgcgcgccgcctcgcgggtgtcgttcttcgagatgcgcatatgctgccgcatctccagatcggccgcctcggcatcatgctgggccagcgcctccatgatgcggcggtgtggctcgaccacgttcgagcagttcttcagaatggcaaacgaattcagccggtaggtgtgcagggcgggaatgaattgcttgtacagcgagacgaggaacgggttgttcgtgctttcgcagatcttctcgtggaacttctcgtcgagctgggccataaggttcgcgttggcatcctccggcggcagcgccgcagcatgcgccgtctggtcgacgatctgccgcagctccgcgagcgcttcctccgtaatatgccgtgcggcctcgcgggccacgagcggctcaagtgcctcgcgcaccatgtagatatcgcgcagggcaaagatattgccctcaaaccagcgctcggcctcctcgctgctgggctggcacgccttgatgaacgcgcccttgccgtggacgatcgtcacatagcccatcgtctgcagcacgcgcagcgcctcgcggatggacgaacggccgacgccgagctgcttgcccagttcattttccgtgggcagcttttcgccgggatttctgcccggctcctgaatgtagcttcggatgctttcgatcaccttgtcggtggttgacatcttgtcgatagggatcatcataatctcccgctcctctctcgtttgccagctctcgcagttaactgcacattacttgacattttgcattgcataatgttctaagtacttctgtaatcatattaacgcatcaattcagaaatgtcaagcgaatttaattcaaaatatgcggctccgcctcccggcaggacctgcaaaagcttcaggagggcttcagatcatgacaaatcagaccggctatatcgtctacgcgacggacagcgtcggcaccgcactcggcgagatcgagccgggcgcgatccgcctgctcggcgagcccggcgacgggcacgtcacggccgccgggcacatccccttcggccacaaattcgccctgcgggccctgcgggcgggcgatcccgtgatcaaatacggcgcgcgcatcggcacggccacgcaggatatcgttcccggcgagcatgtgcatctgcataacatgcgcagcgactttgacgagcgcgcctcaacgctggacgccgagaccgccctgccggaggacgtcgtctatgaactgtactgaggagggaaacgccatggaagcaacaccgatctgccaggcctggctccgcccggacggcggcaagggcatccgcaacaaggtcctcgtgctctacaccgtggagtgcagcaagcacgtcgcagagtccatcgcggcgcattttcaggcgcagcacagggacgtcgatgtcaccggctcgctcgcatgtctggacaatcaggccgtcgtgcagcgcatgctggcctactgcgttcatccgaacgtcggcgccgtgctcatcgtcggccacggctgcgaatatatcgagccggaccgcatccgcgacttcgcgcgggcccacggccgcccggcagaggcgttttacctgcagaaggtcggcggcacggaggcgggcatcgcgctcggctgcaggctcgtcggcgagatgctggaaaaaatcgaggcaggcccccgtgcgccgatgtacgcgcatgagctgatcatcggcgcaaagtgcggcggctcggacttcacgtccggcatcgccgggaacgccgtcatcggcaaattctttgaaaatctgaccgctgcgggcggcacggccatgatggaggaggtcgccgaggccgtcggtctgcgcggtcacctggtctcgcgcgccgtgaacgaggacgtcgcccgcgacgtcggcctgacctatgacaagaccatggagttctgccgcaggctcggccgctactccatttcgccgggcaacttcgtcggtggcctgacgacgatcgaggaaaaaagcatgggcgccgtcgtgaaaatgggcggctgtaagatcgagggcgttctgaagatcgcgcagcggccgaagcaccccggcttctggctgctggacgtcattccggacgacaagcccgagcccgccttcttcttcggcggcgacgcgaccggccttctggaccagatcgcctgcggctgccacctcgttctgtttaacacgggccgcggccacgtcggcggcacgcccgtcgcgcccatcctgaagctgaccggcaatcaggagacgttcgacatgctcagccacgacatcgacttctgcgcgggcagcgtgctgaccggcgcggagacgaaggcggaggccgccgagcgcctgtggggcctgattcagcgcatctgcaatggagaacaggtgcacgccgagcgcgtcggccaccgccagggcaccctgttctttaactatcaggacccccgccgcgttgtcccgtgccggtattgatcaggctctctcccagccggtaaagtagccgtccgcgccgaagaccgggcgcagcgccacgccgtctgtgcggagccacggcattgcggccgtgtctgccagcaggcgctccgtcacatagaacgtctgcacatggttcgtgtcgcggatccacatggcacgatagccgcttgccgcattcgcgcccgtgatggtatgcagggcaaagcggatggcaaggtcatcgttctccatgacgatcgggatacggaagccattgatatcgcgtgaggtcagggagttgggataggtctgctccatatcgatcttgtcaaacaggcggcgtgtcgtcacgtcggcattgcccatgcccgtggcattgtggtgcgcctcgtccgtcagatcgcgtgcaacgatgcgctcggcaaacggccgggaaatgccgttctgtgcggagcggccggtgacgttcgggtccatgcccgcgccgctgatattcttgccgatccagtcgacgatcagaagatccagtttttcatacggaattccgaagagctgcgccgccgcatccggcagcagctctttttccgtctccagaattttgtccggagcgacggcgacgacgcgatacgtctcgtgatagccgttttccatggaggccataccgcagaggatattcgtgttggcgatgatctccagaccgatctccacaatattctgcgacatgctcgggaagccctcggcatggcagatgtccgcgccgaactgcttgcccatgccgatgacgatcatcttgaggatgccgctctggatggggccgcggatgtccgtatggggcttgatgcggccgatgggaatgatccagtccgcctccgccgcatagcggtcgatccgcgccgggaagccgtgcggcttcgtaacgccgacctgtaccgtctccatgctcgagcggatgggcgcgccggtatattcctcggtaatgccgaaatcggcgagaattttcttctgtccctcggcctgcgcgcctgcgtggctgcccatggccgggatgatgaacggctctgcgccgtgctcgcgcacgacctcacagaccgtgcggacaatgagcgcgatgtttgcgatctcgcgtgagcccgccgcgatgcagacgctctggccgggcttcagctgctccagtgtgccgctctcctgcatcacgcgccgcgtctctgccgcaacgtcctcgagcttcggcgcggagcgcgtattctcgacgcggtagaaattcggcacatgatcgtgctggagcagggcttcaaaaatgctcatgcctgcgggcctgccttttcgatcaggtattccgcgggatcgatgccgaggtcctggcagatcttgacgatctcgtcataggtcttgtcattgaccttcacgccctcctccgccacgcgcgccatgtgggcataggccttgtcgccgtgcgtgtagatgcgggtctggccgtcggccagcgcagaattgcggatgtcctcgaggtactggctgaagcgcttttccatctgctccttgtcgccgaaaatggaataatcgacggccatgaagaaatggcagaccttgtcgacattcggcacaacgcggacctcgttgctcgtgcggccgccggacaggatgccgcagaacagctcgacgagcaggctcaggccgtagcccttgtggccgctgttcgtctcgccctcgccgccgacggggaaaatgccgccgagagacttcgtagcgcggatgcgcaggaaatcgttcggatcatagctgggagagccgtccgaattcatgagccagtcgccgggcagggtcttgcccgccttggcgtagacctccatctttccggcaggtaccacgctcgtggccatgtcgagatggaacggatgcggcgtgccgggcatggagacggcgatggggttcgtgcccatcatcggctgtttgccgaaggtcggcacaacgagggcctcggtgttcgtcatggagatgccgagcaggccctgatcggctgccatctttgcataataaccggcaatgccgtagtggttggagtcgcggacgacaacgatgccgacgccggccttcttcgccttgtcaatggccatctgcatggcggcgacagagacgggctggccgatggcatcatgcgcgtcgatcacggcggagacgggcgtttcgcggacgatctcactcttcgcgccgcgcttgatgcggccgatctccagagaatgcgtataaagcttcatgcgctgcacgccgtgggactcgatgcccatgcggtcagatgccagcagcacgttggcaatgtcctcacagtcggagcggctgtagccattgcgggtaaaaacttccacggtcaggtcccagagacgctgatcatcaaaataacggtatcccatagttgattcctcctgtatttagccgccgagataggtctcgcggatcacgtcgctctgaatcagttcactgctcttgcccgagtgggcgatgcggccgttttccagcacatagcagcgattggagattgaaagcgccatgtaggcgttctgctcgacaaggatgacgggcagctttttcaccgtgttgatattatggatgacgtcaaacacatcgtcgacgatgacgggggccagaccaagggacggctcgtcaagcatgaccatggccgggtcactcatcaggccgcgcgcaatggccagcatctgctgctcgccgccggacatggaaccggccttctgctttaggcgctccttcaggcgcgggaacatggtgtacatctcctcgagcttctcgttcatctgcgcagccgtgtaggagcggcagtatgcgcccatctccagattttccagaacggtcatgttcgggaagacctcgcggccctctggaacataggcaatgcccgccttgcagatcttgtgcgcatgcatgcggttgagctttttcccgtcgaacgtcacctcgccgcggcccatgtggaccaggcccatgatggtcttcatcatcgtggacttgcccgcgccgtttgcgccgatgacggagacgatctcgccggggtagacatcgacgttgatgtcatagagcacctgcaccttatcatagtaggagcagacgtttttcaggtttaaaatcggttccatactcattcctccgtgcggaagcggtcgcccagataggccttgacgacctgcgggtcatgctggatctcctccggtgtgccctcggcgatcttgcagccgaagttcagcaccgtgatgcgatggctcaggttcatgacgacgtccatgttgtgctcgatgaggaacagatcgatgccgctgtcatagaccttgcgcaggatatccacaaactcgcggcgctcactcgggttcaggcccgcggcgggctcgtcgagcaggatgagctgcggcgtcgtcatcagcgcgcggccaagctcgcagaccttctggcggccataggccagattgtcgacggtctcgttgcgcagatgatacatgccgatggagtcgagcacctcgcacgccttctcgcgcaggacgcgttcctcgcggtggctgccgcgcaggtcgacgatgaagcggagcatgttgtgggaaacatccttctggccgcccatcatcacgttctccagcaccgtcatggaggaaaacagtttgatattctggaacgttcggccgacgcccgccttgacggtctcaaaggtcggcttgccggtcagcagcgtatcgcggaaccagatctggccggacgtaggcggaatgacagagttgatgaggttcagcgtcgtggtcttgccggagccgttcgggccgatgagggcatggatttcgcgctcctgcacgtcaatggagaggtcattaaccgcaacaaggccctcgaagcgcttgacgagatgctcaattcttaatgtggtcgccatccgccgtacctcccttctccatagccggtgcgccggccctgcgggcgcgcagcctgttccatttttcgcggatcggagccgccagcgagacgatgcccttcggcaggaagagcgcgcacagcagaacggccgtgtaatagacgaaataatagtacttgccgaggaaacggagcagctccggcagcagcgtgatgatcacggcgccaatgacgttgccgaacaccgagccgatgccgccgaccatgagcatgatgacgaagttcgtggacaggtccaccgtaaaggactcggggttgatgtaaccgatgaggtgggcatagagcgcgcccgcgaagctgccgagcatggcggccagcgtgaacgcacggatttttaccttggcgacgtcgatgccgcaggactccacggcgtcaatgttgtcgcgcacggccttgaactcgcggccccacttggaattgacgatgcgccaggcgaaccataccacaagaatggccacgatgaggaccatgtagtaatacgggatcgtcccctccacgcggtagccgaagaagttatagcgctcgatgccgcgcaggccctgtgcaccgtttgttacgcccttcatgttgttgagcagcatgcggatgatctccgtgaaggcgatggtcgtcagggagaggtacacgccgcgcaggcgcaggctcggatagccgagcgccttgccgatgagccagccgacgcacagcgccgccacaaggccgagccacggagaaacgccgagcttcacattcagcaggccggaaacgtaggcgcccatggcgaacataccggccgtgccgaggttcatctggccggtcaggccggtgatgaagttcaggccgcagaccgcgatcagatagatcaggatctgacaggcgatggtcatatagtattcattccggatcatctgcggcagcagggctgcgatcacggcagcgatcagcagcggcagcagccggaagatcagcttttgttcctttttcatgcggcagcccccttacttatttttcttcccgaggaggccctgcggacggaacagcaggaacgcaaccagaagaacaaaggccacaacatccttatagaccgacggcaggatcatggaggcgatattctcgacgatgccgagcacaaggccgcccgcgatacagccgggcatgtagccgaagccgcccagaacgcccgctgcaaagcccttcaggccgatcatattggacatggtggagctgacattgtacagcggcacaaccaggatgccgatgcagcagcagatcacggtactgatggcgatggtgatcgccatattgcggttgacgtcgatgccgacgatcgaggccgccgtgcggttctgcgccacgcagcgcatggccttgccgggcttggtcttctgcaggtagaactgcagcagtgcaacgatgacgatcgcggcgatgatgagaaacaggttggattttgagataacggcattgccgatctggtaggtgccggacatgaagtccgggatcgtaaaggcgttgccgccccagatcaggcaggcgccctccatgatgaccttgccgaacatgatcgtggccataatggtgaagatcatggacttctgcttgcgcagggggatgaagatcagataggccaccagaatgccgaacaccgccatcagcagcagcgaggcgatcgcactgaccacggaattccagccgaggcccagcacgaacatgcccgcatagatgtaggcgcccagcgagaccattttgtcatggctgaagttcagaacgccggaggcgttgtagatcagcgtgtactcgatgccgatcagcgcataaacaaagcccatggcgatgccgctgatcacaagctggatgatcgtccaaatcataaacaagtctcctatgagagtctccgagccggtccggtgcgccgaattgccgccgggaccggctcgaaaggttccttatgataggggacagagcgtattggcgctctgtcccggatacgcgtgggagatggggcttaatccatggtgacctgatcctgataggacggcaccagattcttcatcacgccgatgatggcggtatgggcaagctcacgcttgtcgttggccgtgtatacaccgtaaagcgtgtcgaggttgatggtcttcagggcctcgcagaggtcagcagactccagagaggtcgcgcgcttggcagcgtcggcaaaggcatagacgccgttgtagtacgttgcggcatagatctccggcgtggagccgtacttctcgtcatagttcttcgagaaggtctgaacgagctcagaggggttctcggcgatgaagtcggtcacatagttccagccctcgatccactcggcgttgcacagggagtagacctgcggggtcgcgatggtcgtggagctgatgacgggcaggttcaggccctgctcatagaactggcgggcagccagggcgcactcgtcgtcatgggcccacatgatgaccacgtcgcagttctcttccttgaccttgaggatctgcgtgctgaggtctttatcaccggcgttgtggccggcttcgtagtattccacaccgttggcatcgcaccacttcgtgatggtgtgcatcgcgccggagccgtagtcatcgctgcagtagaagataccgatcttcttggcgccgtagttggagacggcataggacgcggcgacctccgccatgatggtgtcggagcagcgcagacggtggaaatagggattgtcgatgttgtcagtcagagcggcgctcgttgcaccgatgaggagggggatcttgccggtctggacgttctggtccatggccagtgcgagggagctgagcatcgggccgacgatagcgacgaccttctggctctggagcttgttataggcgttgatggccgtgtcggccttgccgccgtcatcctcgatgacgagctcgatctgcttgccgttgatgccgccagcagcattgatttcttccacagccatcttggcgccctgctgggcatagccgccgttcgtctgggagttgcccgtcagggagcagaggatgccgagcttgatggtatcgtcactgccgcccttgccgcaggcggtgaaagcaaataccagcgagagtacgaggaccagcgcgatcagtttcgaaaacttcttcatttcatgacgctccttttattctcttgatagtggggtctgggatcattgcctgcaaggggtatcccccgcgccggagaagcggggctcgactctccggcgcggggtgtgagaaaggtgatgacttacttaatgaggttggtcgccttgatggtgacgtccatgtcggccagcagagcgtcgaccttcttcttctcctcgggcagcaggtcgcccagcggcatacggggcaggccggcgtcgaagccgaagcacttgaggacatacttgaagacctcgtgccagtgcggatcgttgttgctgtaggtgatgaagtagtcgatgaagtcctgcatcttatcccacagcttgcgggcggccggagcatcctgctgcacggtgcagaggttgaacaggtcgacgcagaacttcgggaagatgccgggcaggccggacagccagccgtcagcgccagcgaagaaggcgggcagcggctcgtagtcatggccatagagggcggtgatgccgtccgggcagtagtgcttcatgccctggatgtagctggcgcggccgtcagccagcttcacgccgttgatgatgccctgctctgccagctccttcagctcgatcggctcgaactgatagccgcagaaacgggggttgttgtaaaggatgatgtcgaaatcatcgccgacagcctcgcggagcttcttgaagtggtttacgacagctctcttgtgcgggatgaggtaatacggcatgatgaccagcgcgccctcggcgccgcacttctgtgcgaacttcgtcatctcgatggtctgcgcggtgccatacttgccggtgccgggataaacggggacctgatggtcgacgaacttcacgaggcactcgatgatcttcttctgctcatcgtcgctcatggagatgttctcaccggtggagccggtcacggaaaggctgtgtgcgccgcagtccaaaacccactggatatagcgctcggtctctttctggttgaagctctcgtcagcattccagaaagtcatcacggcaggcataacgccggaacccttggtcttacgcatggtgctcatatttcttcctcctgatagacttgtcgtcttttctgaattggttttcatctatcatcagcgaggcctgccgtgcacaaaacaggtctacgttgactgctcattttcgcggatattgcggatgatctgctcctccacataccgcacatgggtggtgatggcactgacgagggcagcgcggtcgaggcggcggagggcgtcgcagatcatcctgtggtgatcgacggcctcctgcgaaacgactgccacgcccttgaggttcaggtaattcagcgtgacgcagttgttctgcacgcggttgtacagctccgtcatgtaggaattgcgcgcgcaggcgacgatcatacggtgcagcttcatatccgccatactggagcggtagctgtcgccgctctcctgggagcggctgcactcctcctcacactcggcgatacggtaatccatagcgggctcgccgatgtcgcagatgaggtttgcagcgccgacctcgaagaacaggcgcatctccatcatatcccgcacacgccgttcgtccgcggcggggaaaaagaacttaccggtcggggaggtctccacgatgccgtccgtggccaggcgcttgagggcctggatgaccggcgtgcggctgatctcatactgttcgcaaagacgttcgatctgcacctgctcgccggaatggaactttccttcaaaaatgctggagaggatctgttcgtaaacggcctcgtccaaattgcgcttcaggcgaaatgtgttcatatcatacttcctccagttttatcatcacgagcgatctgctgtttatgctgtatagaagtattgtagccgccattcaatctcccgtcaatattaaattcatttttgtgtttttaacaaattggtagttcgtttttctggcttcattatacaccatgtctaaaatttgtcaatcctgaaattaaattaaaaattcagttttctgttttgcacaatacacgggcgtattacttgtgcattttgcatgttattccatccggttacagaattcgatccgttttgaccgatttccacagcacaaaaaccgcacgcgccggaacaggcgtgtgcgggaaatgaggacgctgccgttctgcaagactggtcgctccggccgcaatgccgcaaaagcaggcacagcatatgaaaaagcggacaggtcagattgacctgtccgcttcagactgccaaaaaatctgcctagccgcaagtctcggagggaaggaaagtgtgaaaggaaaccgtcagggtttcctttcgcgttaaataacccgccgcagcggcagaattgcaaaataatactgcaaaattctattttgcaattctgaaagcagcttgtcaaaaaagcccaaagggacttttttgacaagctgaagcgggcaggtcagattcgttgacctgtccgcttcattttttgtttcccccgctcaggcaacgccgaagcaggtgaacataataataagataagcgacatacagcgcgcctgcgaggatgcccatccatcgcttgaatttgccgcaggcaagcgccgggatcatcacggccgcgctgatgacgaggcaggccgggatatcgagcagcatgccctggcgctcgatgggctgcgggcggccctgcagcagggcgcacagcggcatgatgagcgtcagatcgaggatgttcgcgccgatgatattaccgacagagagcgaggcctgctttttgcggatggaaatgatggtcgtgacgagctccggcagtgaggtgccgatggcgatcatcgtggcggcgataacggcatccggcacgccgatgcggcgagccagctccgagccgttgtcgataagcagctgcgcgccaagcacgatggcggccgcgccgagcacgaacttgccgatgttccacgcgacggtccttccgtccttcttcggcttttccgcgggctgctcagccccctgctcgcgccgcccggccagcagactctcggccatgtagaaggcgaatacggccagaatggccgcgctctcccacagggagagactgccgtcgcgcgtgaagacgaacagcaagcagatggcggacagcagcaggcaagccttcccggcatattgcctgcgcgtcatgacgcactgcatacacacgagggagatacacaggatgaggccggtgttggccgtgacggagccgacggcattgcccacggcgatgtccgcgtttccctcgaaggcggagaacagtgacacaagcagctccggcatggtcgtagcgaagctgacgaccgtcgcgccgatgataaacttcgggatgccggttgactcggcgatccatgttgccgcgtcgacgaacaggtcgccgcccttcatgatgcagaacaggcctgcgccgaacagggcgagcacaaaaaacagattgcttccggttagatccagcggcatggacgatccctccaatgattgcttctgccgaggcccgcaggcgatcggttcgaagattctgcaaacgtaaaagaaaaccgttgtcaagtgacaacggttttcgattctggagcgggtgacgaggctcgaactcgctacctccaccttggcaaggtggcgctctaccagatgagctacacccgcatttgcaggaatcattatagcgggatcggctcgatttgtcaagtcttttttgcaaaagatcgaaattttttacgctatggctccgtcggctcctccggctccggcgcgggattggagggataggcctccgcgtcccagtcatagccctcgtcccgcagcgcggcgggatcaagcaggtcgagggaatcgccgccctgctccacggaacgcatcaggtcgacagcataccacgtttcctcgagctgcagcaggttccaccagtgcgtctcgccgccgcgcgtgccgctgaccagacggcacgccagcccggcacgggtgcactcggcatagaacaccgaggcaaacgacaggctgtgcgcccgcccgctgctcagcagatcataggcaggcatgtccggcgtctcctccgcagtcgtataggtaaagcgggtcagcaggaagcgggccaacagctctgcgcagcgccggggcgtcgtgccgctctccacataggcagcggcagagtccagaatagtgttcaccgcggcctgcatgctgcgcagcgtgtcgcgcggctggctgtaggtaaaatgcagctccagaatgcgcgtctcgcccgtctccgggtagacggccgccgagacctccggcagggccatggcgctgtccggatgctcgaggcagtaggtgcggatgtagccggagaagtccgcatcctcatagctgcggatgcgcagcgtcagcgccgcgtcaaaattagccagcgcctgccggatcttcgcatgcgcgccgttgacgccgctcacggtcacgatagcatcgatctccgccgcggagcggcggaacacgatgctgacctcgacggtgccggtctgcgcgtcgccgcgcagctccgcatcggcatagtccacggcgtaggcgccgatggggtcctcctgcgtgatgtagcgcacggtctccgtcaggtcggcggtgagatcgccgctgtagcccgagatgcggatctcgccccgctccgtccagttgcggacaaatgagagcatcgcgccgcgcagctcgctgcggttgccggccgtgggcggctcctcctgctgcggggtctccgttgcaggtatgctcggctcaacgtgggtgcggacggagagatagctgtcgtccgcgccgcaggcggacagcccggccagcaggccgagcagcagcaggcaggcaatgaaattccgcacggcggcgtcctcctttttggctttacagctcgtttcggtcgtagcgcttgaagccgtcgcccagcacctgatgggcatcctgcaggatgatgaaggcgtccgggtcgatgtccatgaccagctccttcagctccgcgagctgcttgcgcttcacggcgctgagcaggaccatcttgtcctgccgcttgtaatagccctgccccttgagcagggtcacaccgcggtcgagctggctgtcaatggccgtggcgatggcctcatacttctccgtgatgatgagcgcgaccttggaataatccatgccgtagacgacgcggtcgagcgccatggaggagacgaccatggcaatgacgctgtagagcgtgttgttgaagtcgcggtagaccacgcctgtgatgacggcaatggtcaggtccatgcacaggatgatcttgccgatggggaaattgcggaatttcagcttcatcaggcgcgcgacgatgtcgacgccgcccgtcgaggcgttgcccaggaacacgaggccgaggctcacgcccatgaacacgccgccgaacagggccgccacgagcggctcgacggccgggaccggcaggatgcgggcgaacaggtcaaggaaaacggacgtcagcaccgtgctgtagagcgagccaaagaagaaatgccgtccgatctttttcaggccgcagagaaacagcgggatgttgatcatggcgtttagaatgccgaccgtcaggaatttcgggtgagcggcatagacgatgatcatggcgatgccggagacgccgccgctgctgatgccgcccggctccagaaacaggtcaaaattcagcgcgtagaggagactgcctaaggtgataaacaggatattgcgaaataactcggtcttctgctggttcagggccttcatgcgatgttcctccttctttcttttgcgccggacgacccggccgggaatgcgggatcaaagctcttcgagggagagctgcttttcggcggcgtcctcctcgcggagcagcgcgcccgctgcggggagcgtgcgggtgcggtagcgcgactcgttcacaatgccgctttcggcaagcgggcagacgcgggagagctctgccttgcgccggagcgtgagaacggcgacgccgagcgtcgtgcgcgttgtcttcggggccagctgggccgtctgcagaatgagggcgcgtccctcggtggagtatagcacgagctgcacatcctcctgcagcaggaaaatgccgcgcagctcactgcggtcactgtaggcgccggtcagcttgcggcggttggacttcgtctgataggcggaaagctccacgcgcgccgccttaccgttggcgaacaggaatagcatgctgccgctgtaatcgccgggcaggcagacggccgcgacgctctcgccctcgtcgaagccgagcttcgtgggcagatagtcgccgagcagcgaggccttgccgtcgtcaaaatcggcgcagcgcgccttatagacctggcagcggtccgagaagacgagcagctccgccgcgttcgtcgtctcgcacgagaagcgcaggccgtctccctccttgaagcgctgctcgccggacatgcgcagcgactgcggcgtgatcttcttgaaatagccctcgcgggaaacgaagatcgtcacgggataatcgggcgtctcctcctccggctccgggtcgagctccgccgcgtcctccacgatgacggtgcggcggtccgtgccgtattttgcggcaacggcgtccagctcctgcacgatgaggcggcggatgcgcttttcgctgccgagcgtcttttccagctcggcgatctcggcggccagcgcgtcgacctcctgcgttcggcgcagaatgtattccttgttgatgttgcgcagcttgatctccgccacgaactccgcctgcacctcgtcgatgccgaagccgatcatcaggttcggcacgacctccgcctcggactccgtctcgcggatgatgcggatggccttgtcgatgtccagcagaatctggcgcaggccctgcagcaggtggagcttttcgctctttttgcgcttctggaagaacaggcggcggcggacgcactccgtgcgccaggccgtccactcctcgatgatctcgcgcacgcccatcacgcgcggcatgcccgcgatgagaatgttgaaattgcaggcaaagctgtcctgcagcggcgttgagcggaagagcttctgcatgagcttgtccggctcgacgccgcgcttgaggtcgatcgtcagcttcaggccggacaggtcggtctcgtcgcgcatgtcggaaatttcgcggattttgcccgccttgatgagctcggagaccttgtcgatgatggcctccgtcgtcgtggtataggggatctcataaatttcaatgagatttccctccttctggtagcgccaacgggcgcgcaggcggacgctgccgcggcctgtgcggtagatttccgccatttccgccgcgtcatacagcagctcgccgcccgtggaaaagtccggcgcgggcatgaccgagagcaggtcgcattccggattcccgatccacgcagccgtggccttgcagacctcgcggaggttgaagccgcagatgttgctggccatgccgacggcgatgcccatgttggccgagacgagaacgttcggatacgttgtcggcagcagggacggctcgagcatggtgttgtcgtagttatccacaaaatcgacggtctcgctgtcgatatcgcggaacagctcggcgcagatggggtcgagcttcgcctcggtatagcgcgaggcggcgtaggccatatcgcgggaatagaccttgccgaagttgccctttgagtcgacgaacggggtgagcagggcctcgttgccgcgcgccaaacggaccatggtctcgtagatggcggcgtcgccgtgcgggttcaggcgcatggtctgtccgacgatgttggcggattttgtccgcccgccgttcagcaggcccattttgtacatcgtgtacagcagcttccggtgtgacggcttgaagccgtcgatctccgggatggcgcgcgagacgatgacgctcatcgcatagggcatatagttcccggtcagcgtgtcggtgatgggctgctcgagcacctcggcccgcaggccctcgacatgcgccgtatcaatattctttttgagctcgggttccttcttttttcttgccataaaccgatacctttacagtttattttgtccgtgaatggagatttcgttgcgggcagtttcgcatatcaatgtgggggcggggacagccacgcccgcgaagcggcaatcaatagcaccaatttgataggatgcaccgttgttaccgctgcacccgcctgatgtgtcattgcgaggagcgaagcgacgcggcaatctcgggaaggcagttgcgatttcaccggtagctttcccacgatgcagccgggtactgcgagattgccacgtcggcctccggcctcctcgcaatgacaaacttgaaagcctgtacgctcgccgaaaatgcctggaaacctgcaactgccaaaggcgctcactacccgcaaggggcacgccgcatccgtaaggcggcaaagccgccaacggctgcgcagtgagcgccgctacagacgcaattggtttgtgcgtttttatcgatacccagtgcgaatcgccagtgcaccacggggcgtcggggacgccgtcccccgccacgcccgaccggcggtttcgcgtaattttcactacgaaatatccgccatttccagatactgactgccgttttcggcgatatattcctttcttccggcgagattatcgccgaggaggaggtcaaaatagaacgccgttttctccgcgtcctccggcatgaccttgatgagacggcgcgtttcggggttcatcgtcgtgagccacatcatctccggctcgttctcgccaaggcccttcgagcgcgcgacggaaatcttctttccctcgagttttttcagaatatcagccttctccgtctcgttataggcgaaccacgtcttgtccttgcaggtgatctcgaacagcggcgtctccgcgatatagacatagccctcgcggatgagcgtgggcacaaggcggtagagcatcgtgagcacgagcgtgcggatctggaagccgtcgtaatcggcatcggtgcagatgacgatcttgttccagcgcaggctgccgaggtcaaaggccgtcaggtccttgacgtgcttgtcgcgcacctcgacgccgcagcccatgacgcgcagcaggtccgtgatgatctcgctcttgaaaatgcgggcataatccgccttcagacagttgagaattttgccgcggatgggcatgatgccctgaaactccgcgtcgcgtgagagcttgacagagcccatggcggaatcgccctcgacgatatacagctcgcggcggctggcgtcgcggctgcggcagtcgacgaatttctgcacgcggttggcgatgtcgagattgccggagagcttctttttgaccgtgatgcgggcacgctcggccgtctcgcggctgcgcttgttgatgagcacctgctcggcgatgcggtcggcctcctgcttgttctcaaggaaatagacctgcaggcggctgcggaagaactccgtcatggcctcctgaatgaagcggttgttgatggacttcttcgtctggttctcataggacgtctgcgtggagaagcagttcgtcacaagcacaaggcagtccgccacatcctgaaacgtgatcttcgattcatttttcgcatatttgccgttctgcttgagataggcgtcgatggcagagacgaacccgctgcgggcggccttgtccggcgcgccgccgtgctcgagccacgaggagttgtgatagtattccaggcggctcagattgcgcgagaagcacagcgccgccgtgatctttaccttatattccggcttgtccgcccggtcgcggccgcggcgctccgtctcccagtactgcggcatggtgaaggcgttgccgtccgtcagctccgtgatgtagtcgaggatgccgtgctcatagcagaactccgttgtctcgaacttgctgccggcctgattgcggaagcggaacgtcacgcccgcgttgacgacggcctgccgcttgagcgtgtcaagataatactccacggggatgtcgatgtccgtgaagacctcgaggtccggcttccagtggaacagcgagccggtctttttgcggtcggcgggctttttctccatctggccgtcgatctcgccctttttgaagtgcaggtgatattcgaacccgtcgcggaagatccgcgcattgaaatactccgaggcatactgcgtggcgcaggtgccgaggccgttcaggccgaggctgtattcataattttcgctggcgttgttgttgtatttgccgcccgcgtacatctcgcagaagaccaactcccagttgtagcgctgctccttctcgttccagtccacagggcagccgcggccgaagtcctcgacctcgatgctgcggtcggcgtagcgcgtgacgatgatgagcttgccatagccctcgcgcgcctcgtcaatggcgttcgacaggatctcaaacacggcgtgttcgcagccgtccagcccgtcggagccaaaaatgaccgcggggcgcttgcgaacgcgctccgcgcctttgagcgtggtaatgctctcgttgccgtatgcttgctttttggccataatgtccctcgctctgcatggtttcatgatcgtgataataaatatagtatatcccggcggctgcaaaatgtcaagaaatctgcgaagggccggactcgcggaatttattatggatatcattcctgcagcggctctcactgcgcaaccggtgtgtccgtttttatcgacagcctgtacgaatcgcaagcgcagcgccgggcccggctgtccgctcccctgcaattacaatgttccgcgaaaaaacgccttgtattttccctgcattttcggtacaataggaaaaaatcaagtcatacgttatatagatagagaggtcgatttccatgaaacacaatcgcggcgggttcctggtcgccattctgctgctggtcatcgcagtcgccgtagccggtatcgtctattacgtcctgcgtatcacgcagacaggcccggccacggccaccggcggcgtggagccgacggagccttcctcctccgccgcgccgaccggcgctccggagacggacgcgccgaccgaaacggaggccccgacggagaccacttcgcccgaggagctggccgcgcaggagatcctggacggcatgaccctcgacgagaagctatgccagctcttcgtcgtcacgccggacgcactgacgggcctctcccccgccacggcggcaggggatgccacgcgcgaggcgctggcgcgcacgcccgtcggcgggctggtgtatttcgcgcagaacatcgtatcggcagagcaggtcacgcagatgctgcagaccacgcagagctacagcaagatcccgctgctgctgggcgtggatgaggagggcgggcgcgtgtcgcgcctgagcggcgtcggcctgacggatgtactggacccgatggcgacctacggcgcggccggagacacggccgccgttgaggacatgggcaagaagctgggcggtcaggtgaagggagcaggcttcaacgtggactttgcaccggtggcagacatcgtgacgaatccgaacaacacggagatcggcgaccgctcgttcagcagcgatcctgccgtcgcctccgatatggtcgccgccatgacgcgcggcctgcaggagggcggcgtgctggcctgcctgaagcacttccccggccacggcagcacggaggcggactcccatctcggcacgtccgtcacggaccgcacgctggacgagctgcgcgaggcggagctgctgcccttccgcgccgggatcgaggcgggcgcgggcatgatcatggtctcgcatatgtccgccccggccgtcacgggcgacaacacgccctgcgacctctcccccgtcattgtgacggacctgctgcgcacggagctgggctatgacggcgtcgtcatcacggacgcgcacaatatgggcgcgatcacggcgaactatacacccggcgaggcggccctgctggccatcgaggccggctgcgacctcatcctgatgccggacgacctcgatgccgccctgcaggccctgcgtgacgccgccgcagacggcacgctgaccgagacccgcatcgacgagagcgtcctgcgcatcctgacgctgaaggcaaaggcaggactgctgggataatccgctgtaattgcagggacagggcagcgtaaggacgcgccttcctcccgtgtcattgcgaggagggcgtaagcccgacgtggcaatctcaagcaggcacttacgaatccgccggggccttcctgtgttccagccagtcctgcgagattgccacggctcctgcggagcctcgcaatgacaagtcaggaagcctgccgctgaacgtacaaaaaagcgccgcgggtgcggcgctcagactgtcggaaaagcctcgcagagtttgcgcccgcaggcgcaaagaaaatggaaatcattttctccggcggcgtgtacgtcggagaaaataccgctcggcttgcaaacgtgcgaagggcgtgcccttcgtgcgctgcagcgagccgcagcccctttcaaacgagagcccagtgaaacgggtctcgtttgagagcgtgtcgaaaaggctttttcgacacgctcaagcgccgcggatgcggcgctgcccagatcagaacgtcatggggcgctgcggccgcagcgccccgccccatgggggtatctttcgtaccgtccgcggcagttttacgccgcgcggcgcacttgacacaggctatggattccacttcctctccgaattggccgttcgaagtgcattggcccgatgccggaaaatgttccaggactgtgtccgctttcagtatgccccggcgcggcagaacaatgcacgccgcgttggttcattttttcgcatttcaggaggaattttccatgacgcaggttttatccgttgcactttccgtcgccgccgtgtttctgctcgtgcggctgctgtccacgccgctgcgctggttctggaagctgtgcatcaacacgctctgcggcgcggtcctgctcggccttgtcaatttactcgcgcccctgaccgggctctatattgccgtcaccgcgcccgcggcctgcatcgtcggctttttcggcctgcccggctttgcagccgtcgtgctgatgcagctgtttctgtgagccgcgcgggtgcggcgtcacgccccactgcggcagcggcaggcgctgcatcgcgccgaatacacgcgttttgagatcggggtacgtcttcgacagcacggcgacgagctccttgatctcctgccgcttcgtgtgcttgtcggccgggcacggattgtgcacgacgggcaggtcgtgctccgccgcgaacgtgcgcaccatgccctccgtcagatagagcatgggccggatctgcgtcacgccggtccggtcgaggtacgtcaccggctcgaagcagccgatccgcccctcgaacagcagactcatcaggaacgtctcgacggcgtcgtcatagtggtggccgagcgccaccttggaaaacccctgctccagcagcgcctgattcagcgccccgcggcgcatcttggcgcacagcgagcagggattattttccttccggtgctcgaagatgatcggcccgatctccgtctccacgcgggaatacggcacaccaaggcgctcacacaggcgtgcgaccggcgaaaagtccatgccgccgaggcccatgtcgatcgtgatggccgtgaggtcataggaatagggcacatattcccgcagcgccgccagaagcgtcagcagcgtcagcgaatccttgccgccggacacgccgacggcgatgcggtcgcccggctcgatcatccggtaatcctcgatgcagcggcgcacgagtcccatcattctttgcatgcgaattcctccgtttttcgaaaaattgccccttgagcatttgagagcatccgggagaaaaacggagcatccgagagttcttccggagaaaaatgaaatttccgaattttgtgcttgacagccggtttttcctgtggtataaagaataggctgtgcacgggaatattgtacgcgtgcagcccggttttgtcaaaatatttattttcaatatacggaggaactcactcatgtccacgacactggtcagaaaagaggacgttcagcgcaagtggtacgtcctggacgcagcggacaagcccctgggccgtaccgccgtcatcgccgccaacctgctgcgcggcaagctgaagcccgatttcaccccgaacgttgactgcggcgactacgtcatcatcgtcaacgtcgagaaggctgttctcaccggccgcaagctggaggagaagtattatcgccgtcattccggctggatcggcggtctgaaggaaacgaagtacaagaccctcatggccgagcgtcccgagttcgccatggagctggccgtcaagggcatgctcccgaagaacaccatcggcagaactgccatgactcgtctgaagctgttcaagggtccggagcacatccatgctgcccagaagcccgaagcctggacgcaggactaatcaggaggtaaaagacgatgtacgagagcaagaaacagtatcattacggcaccggccgccgcaagtcctctatcgcccgtgtccgcgtttatgagaacggcaccggttccattattatcaacggccgcgagatcgacgactacttcggtctcgacaccctgaagctgatcgtccgtcagccgctggtcaccaccgacctgcttggcaaggtggacgtggtctgcaccgtccagggcggcggtgtcaccggccaggccggtgccatccgtcacggcatctcccgcgcgctgctgggcctgaacgccgagtaccgcgccgctctgaaggccgccggtttcctgacccgcgacccgagaatgaaggaacgcaagaagtacggcctcaaagccgctcgtcgcgcacctcagttctccaagcgctgatcgagatttcaaaatgcccaaaaaccctggaaactcaacggtttccggggtttttctttttgtcctgttctggctcaacctgacccaaccaaatcgtttttaccggggacaactcggggacaactccccttttttcgtctttatgggacaacttcggggacaaccacgggaacaacttttaggcatttgggggtaacaatatcggcgcttaacgatcaacctttccttcgacatgccgaagggatatgaaacggccaacggtacgtttgatccaactgtcaatacgctgttcatcaacaaagagatgctccaatctcaaccggagtatgagcagatgttctatctgtttcatgagcttcgccatgccttgcagtatttgcacccggagagctttgacggactgattgccaggagccgcctctatgtcatccaatatgacggcacttgttataaactcgttgacggtgaatggaaagaatgcaagctcgatggatcaacagagcattttacggagctatatcttggacagccctatgaacgggacgcaaatgactttgcgtatgagaaggtgaaggcacttttgggagattcaccggagcttcaggagctccatgcattctggacgccgaaaaagccgatagcagatcaggcgtatgaggaactgtaccgacagattgatgaaatcacaggagaaacgagttgtgaaacatccagataaatggcgggaaaccattgatcctttctcgctcgcttataagtccttccatccaatagaaatacttggctatcctcacgccggtaacgacgtattccacgccaggggtatctacaaaggcaaagaagtccgggcctacatcaaagccgcaagacagaagggtgcggcgattgaaaacgaggtggcgattctgtcacagctccattcgccaatttatcccacagtccttgattgcgggtttgccggaacgcccttctccgtaacgttggagctgccgggcgaacgtctatcgaccattgtgggcgaaaacgaaacgctggaatcccttagctttatggaggaatacggcgcgacgctggcaacgctccatcagcttcgcatttccgcagagccagtcaaggacagaaggtttttccacgtgccgtctgacgagttcttaaaaaccttgggcttggaggaatataaaggaatttttgcaaatccgcccaagacgtctgtccgctgcttctgccacggagatttccactatgcaaacatcttatgggacaggcatcatatcagcggcatactggactttgagctggcaggctatggaaaccgtgacttcgacattgcctgggctctgttccggcgaccggggcagaaatttctgaaaaccgaagtggagcagaaagcctttctgcgtggctatcagagaaccgctccatgcgatcaagaagctgtcaaatactatatggcccaatgctatgtatactttctgcaattcagcggagatgatgctgaatactgcgattacatacgcacttgggtaaagcggttgatctgcaagaggtactaaaaatgtcaaatgcatattataaagcatgtccagaatttgatcgttgcaatgagctgatcgaaaaatattggaacacaaagcagtttgagaagtgctttgaaggacacatggaacttgctgagaagggctatccccttgccgaatgtcaagtgggctactttttctatgacgggatcggtgtggagaaggacgcggataaggcgttttactggacgcagcgtgccgcagagcatggtgatcgtgacggccaattcaatctcgcatatttctatgaagaagggattgggacgcctgttaatatggaaaaggcaaagcactggtataagaaagctgcggagcagaaccatgatcttgccatccaaaaatgccaggacttaaatctcggggatgaataatatgaacgcaattcgttgggtcttctttgatattggttcaacgctggtggacgaggaagaagcctataatcatcggatcagagatatgatccaaggcacctccgtcacctacgaggagttttccgagaagcgtatccaatacgccaaagagggatataacggagatcaaaaggcaatcgagtatttcggcctcaaaaaaacgccttggcacagcgaagacgaagttccctttgatgattgcgcggaaacccttcaggctctgtgcgacaggggctatcagcttggtatcattgcaaatcagaagcctggagcaaaagaccgtcttgacacttggggactcggccaatatttctcggtgattgcttcctccgcagagttgggcgtatcaaagccggacagtgagatatttctgcaggcgctggcaatggcagactgcaaacccgaaaacgctgtcatggtaggcgaccggctggacaacgacattcgcccagccaaggagttgggcatgaaaactatccaaattaggaaagggatcgccgtttatgcaaatctctcctgcggggcagaggttccggattttacagtggacagcctttcagagatattaagtattccatgtctgattgaggaattgctatgagattattgtttgagatggataagaaagactatgaacactgcacccaccgtttcgttcgcaactccgcccgcagcatcatcataagggatggaaaaatcgccatgatccacagcttgaaatacgattactacaagttcccaggaggcggcattgaaaacggagagaacccagtggaagcaatgatccgagagacgcgggaggaagccggacttgtggtcaagcctgagacggtcaaggaatacggctatgtccaccggattcagcggagcgacatggattcctccgaatgctttgttcaggataattactactatctgtgcaaagcggagccggaagcagttcggcagaatttggacgcttacgaggcgcaggaaacctatacattggaatatgttacgcccttgatggcaattcaaaagaaccgcagcgtgggtgcgagcccatataatcccatgatgtttgaacgagaagcaagagtgttggaactactgatgtccgaaggatacttttgattagatgcgaaagcaccgcttgcgtgagttttcggaatgaaacggaggctgcaatgaaacgagttgaaacagcaatttccaggctgatgccggacatcgacggcaagcgtgtgttggagcccgcctgtggctgcgcggagttttctattgcggcaacagcccacgccgcggaggtcgtctgttttgatttggatgaccagcggttgaacccagaggcaacgcataccgaaaggctccgctttgaaatcatggatgccacagcgatgcgcttcccggacggttctttcgatacagttgttttgtacaacgcaatcggccatctggcgcatatcgcagaacctgttctgtgggaatgcctgcgggttgtgaacacgaccggagttgcttgggttgtaagctccttccgcatggacaaggcagtgattcaggaaacgcttttgccgctgttggatcatatggagttgtcttattccacgcaagaggactcagtttacacctatgttcagatcaggaggaaaacgaatggcatttgattataagaaagagtacaaggaattctaccttccgaaggacaagccgtcgtttgtgacggtgccgcccatgaattaccttgccgtgcgtggcaaaggcgatcccaatgctgcaagcggtgagtacaaggacgtcatcggcctcctttacggaattgccttcaccatcaaaatgagcaagaagggcagccatcagatcgaaggatacttcgactatgtggtgccgccgctggagggcttttggtggcaggcaggcgtcgccggagttgattatgcccataaggagaactttgaatggatttctctcatccgtctgccggatttcgtgacaaaggctgatttcgattgggcggtagaagaagcaacaagcaagaagaaaaccgacttttcaagagtagagtttctgacctatgacgaggggctctgcgttcagtgcatgcacatcggcccatacgacaatgagcctgcaacagtggagctcatgcatcagtttatatctgagcaagggtatgcccttgacattacagatttgagatatcaccacgaaatctatttgagtgacgtaagaaagacagcgccggacaagctgaaaaccgtgatccggcacccgataaagaaggtgtaagctatggcctccagcaaagcctatctcgatttcatcctggatcaattatccggcttggatgagatctcctgccgggcgatgatgggagaatacatcctttactaccgtggaaagattatcggcggcctttacgatgatagatttcttgtcaagctaaccccttctgcaagagccatgatgccgcaagcgggaatggaactgccatatgaaggcgcaaaggaaatgctgttagtcgataatgttgagagcagagagttcctaacggcgttgattgacgctatgtatgatgagctccctgcatcgaggaaaaagaaggtttgagatactatgaatacagagattgatatcagtaatgtcaccttacatacaggccgcatgatcctgcgcccttggcgtcagactgacctggatgatttatacgcctatgcttctgttgacggcgttggtcagatggcaggctggaagccccacgaatccaaggaagaatcccaaataattctggatatgttcatcggtcacaagaagacttttgctttggaatatcagggcaaagtaattggttctctcggtattgagcaatacaatgaagatcactttcccgaatttgcagataaaaaatgccgtgagattgggtatgtgctctctaaagagtattgggggcaaggactgatgccggaagctgtgaaggaagtgatccggcatcttttcgaagtagttggtcttgatgttatcttctgcggtcattttctgtggaacaaacagtcacaaagggttcaggaaaagtgcggattcaagcattacgcctttgatacttacgaaacaaaagtagataccacggaagaagacgaagtgaatatccttacaagggaagattggcaggcagagagcgttgtgattagggattatgccgcctttgatttcaatgaaattatgaacctgtatacaagcgtcggctggacgaactatactgaccatccgcagatgctggaaaaggcatataagaactctctttgtacactcggcgcatataccgcgcaaggaaggctggttggcattataagagccgtgggcgatggagcttctatcttgttcatccaagacattattgtgctcccggaattccagcgcaaaggaataggaaccgatctcctcagagcaatcatccgccgttatcccgatgtatatcaaacggaactcatgacagataacacggacaagaccattgccttttataagtcgcttggttttacgcctgcgactgaatttggctgccttgggttcatgaagctgaatacatgattcaaaaaaagttctggaaattgaaaataggtattgaccttacagcaaactgcaatgatataacggtttcagaaaggaggtgccggatatgacgatcaaagaattctcgcgtctatgcggctgcaatcctcagactcttcggtactacgaccatgtggatctgctgaaaccggttaaggtggattcttggacaggataccgctattatgatgaggatcaggcactgcaatacgtgaaaatcaaaaacctacaaatggctggtttctctatcgatgaaatcagggggctccttgatgctgataacgacactattttcaaggctttctcggcgaaaataaaggaacaggaggaccgtctgcagaaaactagggagatccggcagtcatatctgagcgaagttcagcgcatgaaagaaaaggttaaagagttccgggagacagtactctccctgacggaagactatgatccgactgaggaattcggtattacagccgatgagtaccgggaaatcgttgattccctgaccacctatttggacactcacgaattcaccgagggagattttgattatgatctgtctgatgatggggatgccgctcgtgaggagccggaatacctcaatgtcctgaataatccggattttgaggtgatctatgagcagcatgggtgggaacatgctcgggaagtcattggaaagttcactgttcctgatgacggaaaagaatacatgctgctgttcactatctcaaaggataaggagaatccgacagcgtttgcaaacacagctctttccgttatgctcggggcgaatctgaagtcccgcgagagaacatgccagaacagtcagaagcttggctgtaatgtgacggtctctgaagacggtcagaatcatttttggctcttaaagagaaaataagccgtataatcaactttacaacccagatacactcttcattgaaggaggtgcagccgattggccgcacctcctttttgactttctgttaccctcttgtaattttctccgagttgagtataataacgataacgggatttgaaatcccagatagaaacagaggtgctagtatgaggacaaaagaccaagggactctcgacaaaatactgaagttcgtaaataagtattatcaagaaaatcgtgttgctcccacaatcagcgaagttgctgctggtgtcggtgtggccagatcgacaactcatcgctacatccaggagcttagcgatagagatttgcttgattacggcagaggtattctttctgcgcctgagagtgccaaaatgaagacagcctacattgccgccccgttagttggctcgatttattgtggctctccggaagaggaagaggaaaacgtcgaggagtatgtcagccttcctgtttctttgtttggcaaaggagacttttatattctccgggccaaaggcgattcgatggtcgatgccggtatcgctgaaggcgatctgctggtgatagagcgtaattgccctgcttccgaaggggatatagtcgttgcgctcgatcaggagcagcagaacacgctaaaaaggtacgttggcttcgacaacgacgaaaagtgctttatccttgcttacgagaatgaagcgcgttatccgggagaggtcataaaactgaagagcttcgaggttcaaggtgtagctcgtcacgtaataaaggctctctaaaacaaattattcagctcggcaatggttttctgttttggcatatctggtagacaacgacggcgtgtggggtgaactgcggtttgattttgaaaacggcgcagcggagatcgtgaggctggcagattgggatacgacaacgtccaacatctttgcaaaaacggcgatacggtttgtgcagggcttaccggaagcgagactgctgaaatctgtggccgtgccgttttggaaaggcagggcatcattatccgcagagcatgacctttgcgcagaacaggccgtcctgataggtaactgtacttactccaccagatttttctgcgatatggcggacggactggataccaacaccttctccttttcgcttggaggactggaataccccgtctttttcccggataactccgtcataggtgttttcaacctgaatcagtgccagactgctgccatgcagataggcggtcagtttgatcctgcgtcgggcaggcgcggtgcgcaggctggcttccagcgcattttccagcagattcgagagaaccagacacagattgatttcgtctacaggaagacattccggcagatcaatctgcacggaaaatgggatctgctcccgcttcgcaagtgcgcagtaatacccgaccacgccgtctgccgcccggttttcacagaaatgcagctccagactcggaattctggaaactgcgccggagagataggctttgatcttttcaagattcccttcttctgcaagggcagcgagctgacatagctggtggcgcagatcgtgccgcgcctgccgtgcttcctcaatggcagctttcaggctttcgtagcgctgctgctgcatggaaagcagctggttctcctgccgcaatctcacattccggttgatgctgatcgccatcagaaagaagattgcgttgaagaaaagcatcaaaaacaaaagtgcgatgctgatcacaaaatacccctgcaaaacacgcccggtatagagcgtgtccgcatacttggggatcataaacagattcagcgcaatgaacaccagcggcagcacccagaacacataccaggtctgcgcaaaattttcgtcctcgaccatcctccgcacgctgtgcgtcgcaggataataggcgatggcggcaaacagccagcagatcgcatgatagcaaaccacggcccgcagacagaaccatggcgcagactgcgcctgcggcaaaccggccagcatagcggcgttgatcgcccggcaaaggctgttgatacaggcaaataccgcacagacagataatgcaaccgttccggatttccaaagcgagatccggagcgtttttatgtagatcacggctgcgagcaaggtcagccccgcaagcaccggcgcagtcggcatacggcgcgcatagcacaccacgcctccggcggcacaaagcagcgcaagcagcggggcaagccacaaaacaagctttgacatcggctgctttaagctggattttaccgggaagtaggcaagcagcatgccgggaatcaccacgccgagctccagaattggacgcagcagctccattataccatacgccccctttgcagcaagaactccataaatgcctgccgggcacttttcagaaggtcctgactgacaaacacgcggcttccgtccgccatgcggaaggcggcgtcttccagatccttcgcgtgttccagattcacgatcacgccgcgcccgcacacaaaaaagcgtgtgtcatcctttagtggggcgatgaacgtcttgaagggttggcgcgtggcaagcgtcttttgaaccgtcgtatggatgtagatcaggtgggcgaagtgttctgcgtagacgatgtcctgatagcgcagatggatctcgcttccctccacctttagctccatatatttatccggctgcggtacgcgggcaagcagctcgtccgtcagcgcgtcgatgtccgcttcggtaaagggcttgaccagatagtgcagcgcccgtacctgaaagccctccagcgcatggtcggtcgaggtcgtggtaaaaaccagcaggcagtccgtgttggttttccgcagcttctttgccgcctccatgcccgtcatgccatccatataaatatccagaaatgcggcagtaaagggcgctttccttgccgcttccagaaatgtctcgccgctttcgtattccagaatatccgcctgcacatttctccgctgaagctgctgctccaaccggtctttcagcagtgcgcgttccgcagcaagatcatccacaatcgcaattctcatacagggttctctccttgtgcttgaattccaagggaacctctgattaaattgcaagagcggtcagcgagggattttgttccaaattgaggtttggaaattgcaggaatactttgtgtacccgcaaggggcatgccgcatccgtaaggcggcaaagccgccaacggctgcgcaatatttcaagattttcaaaccgataagttggggcgaaagacccgctgagcgccgcagccgatttattcagaggtttcctagccttccgcgctggaaatgtgcagcggtctgtgctataatattccggaatccaatttgagaggtatcccacatgatcgacaaggaagtggcggagctccgccgccgttatcgccaggatcggagcaatatcacgaaaatccacggctgctatgtcaatgtccacggcgagctcgtctccgccttcaccctttccatgggcctgcttccggagggtgagcaggaaaaatatctggagctgctgaaaaaaggcatctccggccgaatgggcaaaaccctctccgacctgagcttctcgacggcgcaggtcgcggacagcgacgagcaccgcctgctcatgcggctgcgcgactccggcctggaggacgaggaggccgtgcagaccctgtatgaaaagatcgcaggctctctgcatctggcggacaactacctgattctgctggccgcggaccgctatgacgtgccgttccgttcccgtgacggcttccggcaggaagagggcagcgagcagcagttttcctatatactctgcagcatctgccccgtgaaggagacgaagcccgtcctgcgctatgactccgcagaggggaaattccatgagcgcggcacggactgggtcgccgccgcgccggaggtcggcttcctgttcccggcctttgacgaccgcgcgacgaacctctacggtgcactgtattacacaaagaacacggacagcagctatgaggagttcgtctccgccgtgttcaacctgcagccgcccatgcccgcgggtacgcagcgcgagacgttccgcgaggtgctgacggatgcgctggaggacgaatgcagcgtgaacgtcgtccagaacgtccataccgccctgcgagagctcgttctgacgcacaaggagacccgcgccgaggagccgctggccgtcacgcggcaggaggtcggtgcggtgctggagcactgcggcgtgtccgagccgaagatggccgccttcaacgtcaaatatgacgaggccttcggcggcggcagcgaagtccccccgcagaatctgctcggcgcggcccagctggagtaccgcacgccggatgtcgtcatccgcgtgaatccggaccggcaggacctcgtgcagacgcgcgtgctcggcggtgcaaagtacctgctcatcaatgtcgatgagggtatggagctcaacggcgtcagcgtccgcgtcccggaagaacagaaggactgaaatgatttcaggagcaggcaaaagcctgctcccggttttttctattgctcccagacatccggagcatcgcgccgcagctcgatcaggttcgtatcgccgcgccgttccgcgcacatactggtctccagatagatctcctccgcgcgctccagcgccagccggagacggagcgcgatgctggccgcgctgctgccctgctccagccccatcagggcatcgtccaccgctccgcagaggatggcatacattttttgatagtccgccatggttttgctctcccaaaaagtctatggatagcctaatagtagcatgcatagcctatattgtccagtgtttttcgttatgctaaaggaaaaacttggaaggcaggcatcaccatgaacactgtcaccgctgtccgcgaccgcattctgcagctgtgcgcagagcgcggcatttccatcaaccgtctcgcctcgctcagcgcgctgccgccctcaagcctgaagaacattctctacggcaagagccagaacccgaaaattctgacgatcaagctgctctgcgacggtctcggcatcacactcggtgaattcttctccacgccggaattcgatgcgctggagcaggagctgcaataacgtctgcttgtcgaaaaagtctcttcggactttcccccaaagccgcccttgtttcgggcggccgtctgtggtatgataattgggataagtaccgcaacagaaaggacaacgcctttatgaaaaacggatttctgaaggtctgcacgctctcccccgcactgcgcgtggcagactgcgcctataatacgcaggaaacgatcgccgccatgcagcaggccgcgcaggacggcgcggcgcttgccgttttcccggagcttgggctcaccggctatacctgctcggacctgtttctgcagcagccgctgctggatgccgccgagcagggcctgcgggacattctccgcgcaagcgaaacgctcgagctcgtcgccgtcgtcggcttgccggtccgcgtggacggcgcactctataactgcgccgccgtggtctgccatggggcgctgctcggccttgtgcctaagacccatctgccgaactacgcagagttctatgagctgcgtcacttcacccccgcacctgccgaaacgcgcagcgtcacactgtgcggcgcgtccgtccccttcggcacggacctgctgttccgctgccgcgaaatgccggacttctgcctcggtgtggagatctgcgaggacctctgggccccgctgccgccgagcacccgccatgcgctggccggggcaacggtgcttgccaatctctcggcaagtgacgaaaccgtcggcaaggcggaataccgccgccagctcgtcggccagcaatccgcacgcttgctgagcgcctatctctatgcggatgccgggcacggcgaatccacgacggatatggtctttgccgcgcatgatctcatctgtgaaaacggcgcgctgctggccgaggcaaagcccttcggcaccggccgcgccgaggccgtgctggacctcgggcgcatgcagtgcgagcgccgccgcagtacgacattctgcccgaatgccgcaggccataccaccgttccgttctccatgctgctgcacgagacggcactcacccgccccgtctcccccactccgttcgtccccagcgatgcggccgcccgcgccgagcgctgcgagctgatcctcgagatccaggcagacggccttgcaaagcggctggagcatgcgcacgccagaacggccgtgctcggcatctccggcggtctggacagctgccttgctctgctcgttgccgtgcgcgccatgaagcgcctgcagcgtcccatgcatgacattcttgccgtcaccatgccctgcttcggcacgacgaagcggacgcgctccaacgcagaaattctgtgtcaggagctgggcgtacagttcacggaaatctccattacgaacacggtccgcagccactttgccgacatcggccagagtgagtccgtgctcgacgtcacatttgaaaacgggcaggcgcgcgtgcgcacactggagctgatggaccttgccaaccgcacgggcggccttgtcgtcggcacgggcgacctgagcgagctggcgctcggctgggcaacgtacaacggcgaccatatgagcatgtacggcgtgaacgcgggcgttccgaagacgctcgtgcgccacatcgtgcgctatgaggcggacacggcccaaagcctcgccctgcgccgcgtgctgctcgacattcttgacacgcccgtcagcccggagcttctccccgcgacggaaaccggcgagatcgcgcagcagacagagtcccttgtcggtccctatgagctgcacgacttctacctctactatgtgctgcgtttcggcttcgggccggaaaaaatttaccggctggcgcagaccgcatttgccgggaaataccccgcagagacgctgctgcactggctgaaaaacttctaccgccgcttcttcatccaacagttcaagcgcagctgcctgcccgacggcccgaaggtcggctcggtcacgctctccccgcgcggagactggcgcatgccgagcgatgcctgcgccgcagtctggcaggccgagctggaccgtctggaggcccgttaaagccatttacaggagggatgcgttatggatcgttccaccgcgccgctgctggaaaacgcgcatgcgtttcttgtcatgcggaatctctacgccgctgcagggcggcagctcaccttgaagtttgaggttctgaacagtgaattcaacgtgctgtacgcacgcaatcccatccaccatattgaaagccgcgtcaaatcccccgagagcatcgcggcaaagctcctgaagaagggcctgcccctgacgctggagtccgccatgcagaatgtcaacgatattgcgggcgtgcgcgtcgtgtgcagctacatcgacgacgtctaccgcgtggcggagatggtcgagcgccagcaggatctggagatcgtcaagcggcaggactatatcaaaacgccgaactacaatggctaccgctccctgcatctggacctgcgcgtgccggtttacctttcggaccggacagagcaggtgctggcggaggttcagatccgtaccatcgccatggacttctgggccagtctggagcacgatatccgctacaaggctgaccgcagccgcctgcccgcggggatcaatgaagaaatgcttgcctgtgccgggaagatagccgaaatcgaccggcagatgcaggacatgtatcagcgcatcaaggccgctgaggctgcaccggacgcagccccggccgagacaataacaaatcaataacaggagacgatcatcatggcaaaaaccacaaaatacgccggcacgcagacggaaaagaacctgcaggccgccttcgcaggcgaatcgcaggcccgcagcaaatacaccttctttgcctccgtagcaaagaagcagggctacgagcagatcgcggcgctgttcctgaagacggcggacaacgagaaggagcacgccaagctgtggttcaaggagctggcaggcatcggtagcacggccgagaacctcgcagcggccgcagagggcgagaactacgagtggacggacatgtatgcaggctttgccaaaacggccgaggcagagggcttcccggagctggcagcccgcttccgcatggtcggcgaggtcgagcgtcatcacgaggagcgctatcgcgccctgcttcataatgtggaaaccggcgctgtcttcgccaagagcgaggtcaagatctgggagtgccgaaactgtggccacatcgttgtcggcacggccgctccggaggtctgccccgtgtgcaatcatccgcagagctattttgagctctgcgccgagaactattaaggcagaaaaatcgctccgcaggaggccatcacagctgcctgcggagcgttcttttacttttcaaaacgatgacgttttttctgcttcttagccggagccaggtcgagcttggcgacgcgcttatcgaagatgacgcggaagaagcgcatcacggtcgggcaggccagcaggagcgtgacgaggatgagggccgagctggcattgagcgccgggaggtcgaagaacgccgggatgacgagcagactgaacagcatcgccgccgtcatggcagccagcacagcgaggcgcaggcgcgtgaacgggacggagacatgatacagcgtaacgaggccgacggcggacatgacccagacgcagatcgtgttgagctgctcattgctcaggccgaacgtcgaggtaaagaacccggccagcagcacgatcgtcaggttcgtcaggccgcccggcatggcccgccgaatgacgttgcgcatgaatttgccctccacgcgcgcgtaattcggctccagcgcgaggaaaaacgacgggatgccgatggtaaacgtgctgatgagcgacagctggataggcagcagcggatagggcatgtcgatgaacagcagcaggagcgtcagcgcgaacgagaaaatattcttcacgaggaacagcgaggccgcgcgctggatgttattgatgacgcggcggccctccgccacgatggctggcatcgcactgaactgggaattgagcagcacgatctgtgcaacctgcgaggcagcctgactgccggaggccatggcgattccgcagttggcatccttcagcgccagcacgtcattgacgccgtcgcccgtcatggcgaccgtatggccctgcttttggaaggcgcggacaagatagcgcttctgctccggcgtgacgcggccgaagacggtgtaatacttgacagcctcctcgaagtcctgctccgtggagagggtcattgcatcgacataacgatcggcattctcgatgccggcacgggctgcgacctgcgcgaccgtgatcgggttatcgcccgagataacacggacagacacgccctgactggcaaaatagcggaacgtctcctgcgcgtcggggcgcagcaggtttgacaggaagacaagtgcaatgggcgcgacgtgagcgctctgcagcgggccgtcgtcgaacgccgtgtcataggctgcgagcagcagcacacggcagccgcgctcggaccacggctccgcctcacttcggatggaatcatagcggtcgcccatgatgaattccggcgcgccgaccacatagcggccattttcaccgaaatcggcgcccgaccactttgtggaggacgagaaggccatgcgcttgacggcgcgccaagtcgtctcgcccgcgaactgttggcccatggcgcgggccgtctcgttatccggctcttcgccgtggtagaacgctgcgagaattttctcgatatcgtcgtagctgaagcgctcggagttcagcggatagacgtccgtgacctccatggtcggctccgtgatcgtgccggtcttatccacgcagagcacatccacatgggccagcgtctcgatgcagttcatatcctgcacgagcacgcgcttgcgcgagagcttcaggcagctggccgcgatggcgacgctcgtcagcaggtaaaggccctccgggatcatgccgatcagggcagagaccgtggattccacggagtcgcgcagcggcaggccctggaacacggacaggaaatgacgcaggaacaggatgatgccgagcgggatgagcgcgatgccgacgaccgtgatgagctttgtcagggagagcatcatctcggactttgtagagcggacattgcgccgcgcctcggccgccagctttgccgcatagctctccgagccgacatgcgtcagctgcacgcgggcgcggccggagatcacaaagctgccggacttcagcgtgtcgcccggatttttcagaatggcatcggcctcgccagtcagcagagactcattgacctgcagctgtccgtcacgcacgacggcatccgcgcagatctggtcgcccgccgcaaattccacgatgtcatcgcggacaagctgatccgtccgcacggagacgcgctggccggagcggatggccttcgccgttcccgccgcgacgagcgtcagcttatcgacggcgcgcttagcgcggatctcctgaaagctgccgacgactgtgttagccacagcgacgagcagaaacatcagattcttgaacgagccgacaaggcacaggcacagcgccagcaccaggaagatcaggttgaagaaggtcaggacattctccttgatgatctgcccctcggacttcgtattggacggcggcataatgttgctcaggccgttgctctgccggagcttggtctcctgcggagaaaggccctctgccgggtctgcctgcagcatcgggatctggcgatagacgcgcagatgcggctgcttggatttttgtttcataacagtccctcaaatcagcattttctccggtcattatagcacagctcccgtgaaaaagcacccagtccgacagaaattcacaaaaaaatcacattccgcgttcccattcgttttccgaagaaaaaatgaaagttttgcttgcattctgcacggttttgtggtaaactaatcaagtctgtgaatgggcggtcctctgcggtgatgtcaacacttgcacgaacgcctaataaatgaggaggacaaacattatggatctgatgaaggctctgaccagccagtacatgaaggaagaactgccgcagatgaatgtcggcgacaccgttcgcgttcatgtgaaaatcaaggaaggcgctcgtgagagagtgcaggtgttcgagggaacgatcattgcccgcaagcatggcggcattgaggagtccatcaccgtccgccgcctgagctacggcgtcggctgcgagaaggttttccccgttcattctccgagcatcgtgaaggtcgagaccgttcgccgcggcaaggtccgccgtgcgaagctctactacctccgcaaccgtctcggcaaggccgccaaggtcaaggagaaggtctgagtttatccgcaaaaacctctcccgggtctccgggagaggttttttgtatctttcggccggtatatggacttgcagctcgggaatacagtggcagggggtggttttttatgctgtccgtatggctcatcatcagcagcatgctgtattccctgcggctgtcaaacggcggctcgtttccaaagccgctgacggcgcgcgaggaacgggaatatcttgagcgcgccgcgcagggcgatctggaggcgcgcaatgtgctcatcgagcggaatctccgcctcgtagcgcacatcatgaagaaatactacacgcagacctccgatcaggaggacctgatctccatcggcaccattggactcatcaagggcatctcgactttcgacccgaaaaagggcgcgcgccttgcaacgtatgcggcaaggtgtgttgaaaatgcaatacatccgccggggcgtcatttccccttccgactcacaaaacgggaccgctgcgcaagcagcgatcccgttttttaagtttcagaaagcgcagccagcatggcatccagcagcgcagcctgctcctccggcgtcggcgccagctcaggcagcagttcctcaagcagagcggcatgcacctgcgccacgcggcgcgccagaagcgcctccggctggtccggccggagcatgcgaatgcgaagttccccttccatacgatccccccgcgggcatcctatgccggggcggcggggcttattccggcagcttcgcgacgagctcctcgagcgcctcgccgagcgcctcttcaaacgtcgggtgcgggcgcatggctgccagcagctggcgggccgtcatgccgttggcaatggcctgactgagctggccgatcatatcggtcgcatgctcgcacatgagctgcgcgccgagcagcacgccggtctgcgcgtgggcgacgaccttcataaagctgcggccggtgcctgcgatcatggtgcgggcgttggcaaaaagcgtgcacttgccgaccttgaccgggatatcgcgcgccttgccgtcggcctcggtcaggccgacggaggcgatctccgggcggcaatagacgcagccggggacgaggtccagccggacgctcggcgtgcggcctgcaagccgctccacgcaagccgttccctgcgccgccgcgacgtgggccagctgcaccggggacgaaacatcgccgatggcatagatgccgggaatgctcgtctgcccattttcatccgtatggatgcggcggccgtccgtctccggctggaggccgtctgcgaacaggcccttccagttcgggctgcggccgaaggccgagagcacggcctcgcccgtgacgaagtcctccttgccgcgggtggtaaagtggacggtcagaccgtccttgccctgctcaacgcgctggaccatggagttggcaaacacgcgcacgccctgcttcttgagcagctgtgcaaggttctgaccgagctcgcggtccatgccgggcagcaggcggtcaaggccctcgatcacggtaacctcgcagccgaggtcgctgtagaacgtggcaaattccacgccgatgacgccgccgcccatgatgacgatggagcggtagaggcggtccgttcccttaagcagctcgtccgaggtcatggcaagctccaggccgggaatgggcgggcgggccggaacggagccggtggcgatgaggatatgctccgccgtgacggtcccggcatcctgcccggtgatctcgacgcagccgggagctgtgatgcgggcgcggccgcgcagtagcgtgaccttcgcgctgcggaacaggccctcgatgccgctgctgagcgtctgcgaaatttcgtccttgtggcggtacagcgccggaaggtcgaggctcgcgccatctgcgcagacgcccgcgcagtggtgcgcatcgctccagacctgcgaggcgtgcagcagagccttcgtcggcacacagccgcggttcaggcaggtgccgccgcactcgcggtcctcaataacagccgtatgcaggccaagcttcgcggcgcgcagtgcggcggtatagccgccggggcccgcgccgatgacgatgagttgatagtctgccataggcactcctttcaaatttcctgctcgccgagcagggcgcacaggtcgtccgcgatctgacagcaggcggccacctcgcgcacgcggccgcacaggtccgccacgcggaagcggcagccgcgcagggcctccgccagcggcgcggcaaactccgcgtccatcgaatcggtgtagacggccgcatcgcggcagacgccctcctcgacctgcagctccagcgtgatctcgccccaggggtagcgcgctccgcaggagaacgggaacggctgcgctctgccgtagatccagtcataggaggcaaagcgcatgcggcgggcctcgatctccgaggcatcgagctgcgattccgtgatcgtggtgaccggcagaccgtagacatccgcaaacgcctgcgccatggcctgctgcatctgcgaaatgcgcagacccggatgcagctcggacaggttcacaacgcgcgacggcacggacgcgacgcccttgctctgcagcttgcgctgcgacggcgtcaggtatttgccgaggttggccatgtcgaccgagacgagcagcgtgccgttgtggaacgagcagccgttgtggtgatagaacgaattgccggagaatttccgcccggcggccagaatgtcgttgcgcccggagaaactcgcctcgatgccgagggagcggcaggcctcgacgatcacacgctgctgccggtgcagatcgtactccgccgtgggcaggctgaacgtgaaattcagatttcccatatcgtgatacacagcgccgccgccggagaggcggcgggagagcttcccgccgtcctgctccagaagcgccgtgcggcactcctgccaggcattctgattccggccgatgaccacggtatggcggttctgccacagatagaggatgcagatatccgccgggaccgtatcggtcaggtattgctccagcgcgaggttatgatacggatcggtgttgtccgtgcagaggtacagcagcttccggatcatgcgcgcgtccacctcaggatgggattgcgggcagcctgcacctcatccggacggccgatctgcgcatgatgcggcgcagcgtgcatatattccgggtccttgtggccaagctcatagagcttgcggaaaatttccgccgcctcgtcgagcgtttcccgactctcggtctccgtcggctcgagcatgagggcctcatgcacgatgagcgggaagtacattgtgggcggatgcatgccatagtcgatgagcgtcttggcgacatccagcgcggagacgccggtctccttcttgaattcgctcagatcgagaacgaattcatgcatgcagatgcggtcaaacgccgggcggaacgtgcccgccatgcggcgcatgagatagtttgcgttcagaacggcattctgtgccgcctcgggaacgccctcgcggccgagcgtgagcagatatgccagtgcacgcaccacgacgaggaagttgcccgcaaaggcgcgcacctggatgtggccctcgccgtccagcgtggcggaatgcggcagatagggcttcaggaagtccttgcagccgaccgcgcccgcgccggggccgccgccgccgtgcggcgtggagaacgtcttgtgcaggttcaggtggatgcagtcaaagcccatgtcgccggggcgcacgacgcccatgacggcgttcagattcgcgccgtcatagtagcacaggccgcccgcctcgtggacaagacgcgtgatctccagaatgttttcgtcaaaaatgccgacggtgttcgggttcgtcagcatcaggccggcggtgtcgtcgccgagcacggccttgagcgcctcgagatcgacgcagccgttcggcgcggacgggatattcacgacctgatagccgcacatggcagctgtagccgggttcgtgccatgcgcggaatccggaacgatgatcttcgtgcgcttcttgtcgccgcgggcatcgtgatactgcttgatgagcagcacgcccgtgaattcgccatgcgcaccggcagcgggctggaacgtcatgccgtccatgcccgtgatctcacacagatactgctgcgcaagctccagcacacgacggcagccctgcaccgtgtgggcgggggccagcggatggatgcccgtaaagccgggcagcgcggccatttcctcgttgatccggggattatacttcatggtgcaagagccgagcggatagaagccgcagttcacgccgtggacgtggtggttcagctccgtatagtggcggctgaggtcctgctcgctcagctccggcagaacgggagcctccgcgcggcgcagagactccggcagcggtgtctcctcgacgtcacacgccgggaggatgctgcagcggcggccgggaacgcttcgctcaaagatcagcttcatttgctcagcacctccttcacgatggcgatggtgcggtccagcgcttcgcgcggaaccttctccgtggcgcaccacaggatgccgccctccagcggaagaccgccgaggatatcggcctgctccagcgcagcaaggatctcgtcctgcttcggcagatccgtgacaaactcatggaagaattcgccggaatagcgcagcgtcacgccctcgatggccgcaaggccgcgggcaagatagtgcgccttggccatgctctggcgcgcagcctcggcaaggccctccggacccatggcggagagataaacgcccgccgtcagcgcgcacagcgcctcattcgagcagatgttgctgctggccttctcgcggcggatgtgctgctcgcgcgcctgcagcgacaggacaaagcagcgctcgccgtgcgaatcgaccgtctggccaacgatacggcccggcagcttgcgcatgtgcttcgacgtagcggccatgaagccgagatacgggccgccccagccgaggggcatgccaagcggctggccctcgccgactgcgatatccgcgccgcattccttcggcgtcttcaggatgccgagggcgatggggttgcagctgaggatatacagcgcgcccgctgcatggatgatctcgccgagcgcttcggcgtcctcaagctggccgaagaagttcggctgctggatgcacacgccggaggcgtccccggccgccagaagctctcgcagggcgtccggatcggtctttccgtccttgacggggatgacgcgcagctcgtcgcccgtgccgtagcagtaggtacggacggtgttgataacgtctggatgggccgcgccggagatcagcgtcacgcggcgcttgcggtcgcggcacatggctgctgcctcggcggcggctgtcgcgccgtcatagacggacgcattggagacatccatgcccgtcagctcgcagatcatggtctgatattcaaaaatggactggaggataccctggctcagctccgcctgatagggcgtgtaggccgtcaggaattcctcttttgccgggatatacttcacgatggaggggatgtagtggtcataggctccggcgccgcggagaatggtggaaaacaccttgttctcccctgccagctccgtcatggtccgccgcacctccagctcgctcatgccggacggcagatcgagcggccggtccagatacatggacgcgggcacatcgccgtagagctcgcggaagtcgtgcaggccgatggcccgcagcatctcctgccgctcttcgggggtgttgggaacatagctgcccatgtcagccctcctgcgcgcagaaggcctcgtaggcggcggcatccagcagctcttccgtatcggtcacctgctcgaccttgatgagccagttgccgtagggatcgctgttcagcagctcgggatggtccagcagctcctcgttgacctcgagcaccacgccggtgaccgggctgacgagatcgctgacggccttgacggactcgacatcgccgaaggcctcttctgccgtgacctcgtcaccgacgccgggcagattcacaaacacgacgtcgcccagcgcatcctgcgcgaagtcggaaatgccgacgaccgtgacgtcgccctcggtcttcacccactcatgggacttcgtgtactgcagctcaacaggataattcatggtagttcctcccagataaatttttcagtatttttcatgtcggttttccgccccgcggatgcggggcggactttgttgatctcagaagccgatctctccggcgaagcgatcgagcgcggcattgaactccgcgtcgttgaagcagtagtgcatcttcgtgaagcggctgcgcaggcggacgacatcctctgagatatccttgccgcgcaggatgcagtctgccatcagcgcggccagctcgtcgaactctgccgggccgaagccgaagcgcgtcatctcgctgacgcccatacgcagcgcgccgctggcggtgaagccctcttcctccggcgtggcctgatagttcacgatgatgttgttctcctcgagccgctcggcgacctcggggccggtgccgtagccaacggagacaatgacctgatgcgtttcggtgtagtcgatggcgggatcgccctgcacatcgaggccctgcgccttgagcgcgcgggcgaagtgctttgcattggcgatgatggcgctctgataggcatccttgaagtggttcatctcataggcggccatcagcatgccgagctgcgtgccgaggtggtggttcgagacactgcccgggaacgtgcggctctcaatggcctcccacaggccccacttgaggtcctcgcgctgataattcacgccgatgacgccgcgctgcgggccgaagaacgtcttgtgcgtcgagccggtaacgatctccgcgccgtccgcaaacgggttctggaagtggtcgccgatgaggccgagcacatgggccatatcgtacatgatcgtcgtggggatgttctgcgcatcgacaaaggcgcggatctctgcgaccggctcgcggtgcaggaccatgctcttgccgaagatgatgagctcggggcgatactcgtcgatgagcttcttcgtgccctcgacgtcgatcttgtagatgttgtcgcggcataccgggaagttcacgacggccgtgcgctccgtcttcggatcgacggcaacgtagtcgcgcagcgcgcccatgggctgggccgacaggtggccgcccttgatgatgtggttgttcatgacatagccgaggcgctgcggcgtgtgcttgcggtcgaggcggttcttccagtccatgagggcggagaacgtggccatattgctcatctggccgctgacgacgcgcgtttcgacctgcgcgcagccgaggtacaggcgcatctgctcgacgagcaggcgctcgacctcgtcgatgaacttcgtgccctgatagtagaagatatccttgtcatagaacgacaggaccttcttgtgctcggcatagcggcagctggggtcgctggcgctgagcatctgcacggcgtggctcggcgtattctcggacggaatgaggttgatgcactgtttctggcgccacaggtggttctcctcggccttcttcagcagctcgaaggccttgccgggcaggttctcgagagagccgacgggatccttctcctccgggcgatacagcagcggacgcgcgaacggcggcgcgctgacgctcatgtggttcgcgggaatgacggccttgagccgcttgccgcggatatcgacctccacggtgtcatccgtaaggatgtcgctgtcgatgtagcacaggccgatggcgcgcttggccgtctcgtcggtgatgacggtctgcaggccctcgccctcggcgacgtaatacggaaccatcgtgccgctcgtcacccagccgacctgcttctcaccacggtagacgggcataccggcgcgcatgacgccgcggtcgagcagcgtgatgggctggatgcggcgcggcagcacagacagatcgctgaagtcgcggttcatgatgcgcttgaaggcggcaaactgctgctcgagcggcttgcggccgataaaatcgcccttctggggcgcaaagctgacggcaaacttggccagcggcacggcgaagatcggcatctcgtttccggcgggatcaaggcccatctcatggccgtacagcggcagagcagcctcgaggcggagcgtgtcgcgcgcgccgagaccggcgggctttgcgccgagctccacaaggcggttccacagccaggcagcgtcctcgctgcggcagtagacctcaaagccgagcggctcgcccgtgtagcccgtcttggccacgcggaccaggcggccctcgagcgtgacggtgccgagcgcgttcttcatcggctcggtgagctgcacgccgccggagagcgtcatgaggatgtctttgcacttcgggccctgcacggcaatggccgcccagtccttcgtgatctccgtcatggtacagttatagttcttcattgcctcgcgcaggtgcgcaaggtccttttccgtgttcgccgcatttacgacaagcaggaaccgttcctcttcaaagcggtagagataggcgtcgtcgacggcggagccgttctcggtggggatgatgcagtactgcgccatgttgaggtccagactctcgacgttgctgctgagcacatgctgcagaaaggcaacgcggtccgggccctcgacgagcacgcggcccatatgggagacgtcaaagagactgcaggcatggcgggtatacaggtgctccgccacaatgccgctggggtactggatgggcatctcccatccgccgaaatccaccatagaggcgcctgccgctacatggacgtcatagagctgggtgcgcttgagttcgctcattactgggttcctcctttatgatttcgccgcgttctgcggccgccggatatgaaaaaagacacaaagccccatggcttcgtgcctcagcttgtcaaaaagtcccttcggggcttttcgccaagctgcattcagaattgcaaaacaaaattttgtagtaatattttgcaattctgccgctgcggcgggtgatcaaacgcgaaaggacaccctgacggtttcctttcacacttttcttccctccgaagcttttggcttggcaggttttttgacagtctgagacacacggccccttggcttcgtgcctccgtccattacctgagagattccccgccgtttccggcaggttgcaccttcggcgtgcggctgccgccgcactcttcggagtgtcgtcatcgcccgacccttttgcctgagagcttctgcattccccttcggcgccgcgcagcgcgcggtctctcccggaccaatcatccgacacttattcagttccggtgttatcccggcgcggtccttcccgcgccctacttacaataccattttctacacggttttgtcaacaattattccaaaatttttccggattttgtttgcattgtacaaagatgtctgccgcagccgggcataaattccagccgggcggcatttactttcctgcctccttatgctatcatgaaggagagcacatcacatagcagggtggtgctgccattgcacgaacaaggcattgcgatctactcccgaaaatcccgcttcaccggcaagggtgaaagcgtgggcaaccagatcgagctatgccgccagtatctccgcgcgcacgagccggacgcgccggagccggaaatttttgaagatgacggcttctccggcggggacctgaaccgccccgccttccggcggatgatgcgcgcggccgaggccgggcgcttccgtatgctcatcgtctaccggctcgaccggatcagccgcagtatcggggacttcaccgccctcattgagcggcttgcacagctgaacgtggcgttcgtttccattcgggagcagttcgacacgtccacgcccatgggccgggccatgatgtacatcgcgtccgtcttctcacagctcgagcgcgagaccatcgccgagcgcatccgtgacaacctccgtgagctggccaagaccggccgctggctcggcggcatcacgccgaccggctttgcctcggagaccgtgcaggccgtcactgtcgacgggcgaacaaagcgtgcctgccgcctgcggcttcttccggaggaggcggagaccgtcaaggccatgtacagcctgttcgcacgcctcggctctttgacagccgttgtaaagggactgcaggagcgcggacttgccacaaaaaacggcaacgcgttcacgcgccacgccgtgcgcgatatcctgcacaacccggtctatgcgcgggcggatgcggatatgcttgcctggctccgggcggcaggcacggagctctccgctgcgcaggaggagtttgacgggcggcacggcgtccttgcctatcaccgcacggatcagtcccgcggccgcaccgccgtcgccctgccgccggaggcctggattgtcgcggttgggcagcaccccggcctcatccccggcgcacagtgggccgccgtgcaggagcggctccggcggacggactgccgcacgccgcgtacggagcacgaggcgcccgccctgttagccggtctgctgcagtgccgctgcggcagaccgatgtatgccaaataccgccgcgcggcagacggcgagcgcttttcctatgtctgccgtgcgaaatcgaccggcggacgggaacaatgcagctgcccgaacgtccctggcactgcggcggacgccgccgtgcgcgccatgctctgcgccctgccggaggaccatgccgcgctggcggccgcactccgggggctgcggcgcagcctgcctgaatcctcccctgcgccgccggaccgtatcccccttgtgctccgcgattgcctggacaccatccgccggacgcagcgcgtccttgaggccctgacggagcagctccgctgggacggcgaaacgctgtgcgtgacgctccgccgggtggattgcaaatgctatactaacctaacggaagaaacggcggttgaggtggcggaacgggtgtcttttgaggcaaaatggcgtctgctggcgcaagtggaagtccgctgctacattctgatttcctatgtatcgggtgcagtaaaagtagccccactgcaaattcttcagtttccggtggtgctgccacacaagtttcaggacgcagaaaagttcaattggcagttcccggacttctcggaaatcaccgaaacagcggacaagctgcgctggcttcgttaccagaaaggactgcggcagagagacgttgcagactacgccg

SEQ ID NO: 11195 - DNA, 495 bp, Unknown
  gut microbiota DNA sequence
gcacttgccgcagcctacgcagcgttccgcctccacggcggcgtagcagccgcggcgcaccttgacggcccccagtggacaggtattttcgcacacaccgcaggcgacgcaccgcgtcttatctatggcagccagtttctttgacagcatagctttcctcccttaatcctgcaaggatttgtaatagagcatacagtggcagaacccctcgaagcccggatctgcaatttgattcttgaactcctgacacatacacttggttgcctctgtgcgctccctgcggcagggacagtatcctcccctccggtgcgcttgagtccttcccggatggtgctgacaatctcctgatcgggattgagcttgattttcatgttcgccagctctttcttgattgtggctttatcataccgcaggacaaagtctttttctgtgacgaggttacattgataaaaaaatccggtgctttttgagcaccggattttaagaaggtgaatt

SEQ ID NO: 11196 - DNA, 4280 bp, Unknown
  gut microbiota DNA sequence
attatgagttggttgaaaaggattttgtcagttatgagtgagggaaacacctatgccagacaacaggaatcgcaagcgaccgatacaggtcaaattcttcgtagatgaaaaagaactcagcttgataaaggcgaggatggcacagcttgggatagagaatatgagcgcttaccttcgtcaagtggcaatcgacggatatgaggaaaaaccgaatttgcctgaacgccgtgagccgaaaaatccctgactcactttccgaagatagattgatattcagctccgcaggggcgtagccgattttgaaaaaatcgttaaagggtttgggatgtttcccaacaagtttttgcaaaaggcagcaacgctgaaatttgcataaagcacgatgtatgtccacacgtgcattgcttgccaagggcatctatgtagaagcgcatgacaagtccagcggcaagagaaagcagaagattcatatctccacgacctcataggcttcatccctgtggatgtactgctaaaagcggaacaggtatgaccgaaatcatacctgttccaagaaattcacatattactgttttacgaccaacgagcctcgggtccgctttttttgctcaatattcccgaatgacggccttgaccttgccgaggatctgcgcctcgcggccgtcgatggggtcgtaggcgggattctccggcatgagccagacctcgccgccgcgccgccgcaggcgcttgactgtcgccgagtcgccgagcagcgccacgacgatctcgccgttttccgccgtctgctgcggccgcacgacgaccttgtcgccgtcaaaaatgccggcctcgatcatggaatcgccgcgcacacgcagcgcaaagcacccggcctcggcctcccacggcacatagccctcgatattttccacggcgaggatcggctggccggccgtcacgacgccgatgagcggcacgccctgcggcgcggcctcggccccgagcgaaatggcgcggttcttgccgccatccatttcaatggcgccgctgcggctcagctccgacaggtgatagtgcacggaggccgtggagcgcagaccgaccccggccatgatctcgcgcgtcgtcggcggatagccgtgcgaagcgatatagtccttcagaaaagcgtagatctcctcccgcttgctgctgctgcgccccatgtcggtccctcccggcttcagatgcctacagtatagcacagccggtaagaaaatgcaaacgtttgtttcgaatcagcggcacagaagaccgggatccgagaaatccggcaggtattccgtcgttgcgctggaaaaatcctgccaatagcccgtcaggccgcacagctccatccagctcagcgccccgtcatattcctcccgggtgatgccgcggtcgagcggcgcgggcagattgcccatcggcacatactggctcatgagcgaaacggaaacgtcccgcgccgggaacagcgccgcgatggtgtcgagcgcggccagcgtgttcgagagataccccggcagcacaaggtgccgcacgagcattcccttcctcatctgcccgtcttcgttcagctccgtcccgccgacctgccggtacatctcgcgcagggccgccgccgcgacggctgggtagtcccgcgcgccggacagccgtgccgccagctccgggtcggcgtatttgtagtccggcagatagatgtcgatcaggccctccagctcccgcagcgtctcaacggattcatagccgccgcagttgtagatgacgggtacgggaagcctcggcgtcagcgccgggaggatggacggcagaaaatgcgtcggcgtgacaaggtcgatggactgcgcgccctcgtcgatgaggcgcaggaacgtttcgcgcagggcctccggcgtcagcgcttcgcccgcgcccccggcggagatgacgccattctggcaatagcggcagcgcagcgtgcagccgctgaaaaacaccgcgcccgtgccgtaattggcacagatcggcggctcctcaccgtaatggagcatggcgcgcgccgcgcgcagctgccccggcatccggcagaagccaagctcgcccgcctcgcggtcaacgccgcaccgccgcgggcagagcgtacaggatcgataagaaagcatgggacctccctgcgctgcggtgttgccgccgcgcgtgatttgtgctagaatagggttaaaaatatggatcgctgagtatagggctcgatataggaaccggccgtcgatggcgcgttgtaggggaggggcatgcccctcccggcggtaaaccgccgattggcacaggctatcgttaaaacggtaccggccccagatttgtcattgcgaggaggccgcaggccgacgtggcgccctgagcgcgaagcgcgaggaagtgcccttggggtgcaatctcgggaaggcagttgcagctcgtacaagctgtcgttaaaatggtgtgcaccgattgcgtccgtagcggcgctcactgcgcagccgttggcggctttgccgccttacggatgcggcgtgccccttgcgggttgtgagcgccttgcaggttggcaatctttgcggcacgcattctgcggcgcgaggctatcagatttgtcattgcgagggcgctacgcgcccgtggcaatctcgcagcataatggcagataactggaaggccccggcgaatacgtaaccggctgcgtgagatagccacgtcgcttcgctcctcgcaatgacaatcggggcgtttaccattgtaacgttagcttgtacgaaccggtagcgcaaagccgggaggggcatgcccctcccctacagagcgccgtcggtactcgcccggcccattccgcgaaccgaaacaggggaatcatatgctgaaaaagaacgaaatttaccgtaccgccgtctccggcttcacgagcgagggcctcggcgtctgccgggtggacggctgcgccgtcttcgtgccgaacgccgcgccggacgaggaatacgacctgcgcatcacgcacgtcggcaggcacgcggcctatggccgcatcgagcgtatcctcacggcctcgccagaccgctgcacccggctctgtccggatgccaagcgctgcggcggctgcgatttctggcacctgcgctatccggcggagtgccgcatcaaggcgcagcgcgtgacggacgccctgaaccgcatcggcgggcagaacctgccgctcgtcgccctgacgcccgcgccgatgtgcgagggctaccgcaacaaggcccagttccccgtcgccatggggaaaaacggcatcgaggcgggcttttttgaaaagggaacgcacaacgtcgtccccgtggagcactgccgcatccagcccgcctgcgccgagcaggcgcgcagcgccgtcctgcgctacgcccgccgctggagcgttccggcctatgatgagaccgcccgcaccggccttctgcggcatatctatgtccgccatgccgaggctacggagcaggtgcttgtctgccttgtcgtcaacggcgagcgcctcccgcaggaggacgcccttgtcgatacgctgcgcagggccgtgcccggcctgcgctccgtcgttctcaatacgaacacgcgcagcggcaacgccgtcctcggcgagaccatgcgcacgctctggggcgacgatgccatcgaggatatcctgtgcggcctgcgcttccgcatctcgccgcgctcgttctatcaggtcaaccgcacgcaggcagagcggctctacggcaaagcgctggcagcagccggcctgaccgggacagagacggtcctcgacctctattgcggcacgggcaccatcacgctctgccttgcgcggcaggcgaagcgagccatcggcgtcgagcttgtcgaggccgccatccgcgatgcgcaggaaaacgcccgccgcaacggcatcgggaacgcggaattcttctgcgcggatgccgggcaggccgcccagcgcctctgcgccgccggggagacgccggatgtcattgtcgtcgatccgccgcgcaagggcctttccgccgatgtcatcgaggccatggtccgcatggccccgcagcgcattgtctatgtctcctgcgacccggccaccctcgcgcgcgatgtccgcagcctcacgcagcagggctacgccctcacgcacgccgaggccgtcgacctcttcccccgctgcgcccatgtggaaacagtgtgcaggctggagcggctcaagtgaaatctaatatgtaggggaggggcatgcccctcccggctgcgcacttgcagcc

SEQ ID NO: 11197 - DNA, 4274 bp, Unknown
  gut microbiota DNA sequence
caccacggcaccaccctgacgtgtcattgcgaggagcgaagcgacgtgggaatctcgcaggacccgggtggataacaggtaagttccgacaaaatcgtgactgccttcccgagattgccacggccccttcggggcctcgcaatgacaaatctggaggccttgcgccgctgaatttgtgccgcaaccattgccagcctgcatggcgctcactgagcgccgctacatttttctctcgcgcggcggccttgtacaacgagcgccgctgcagacgcaatcggtgcataccattttaacggcagcctgtttcttgcgcaggtgcagcgccgggcctggctgtccccgcccccgcaacgtgcgcatgtttcaaaaaacgcggcgggcgggatgggccgcccgccgcgctgcgggtcttacatcaggggctcgaggccgaggaccgggtggttcttctcggtcaggaagtccatgagggcttcgcagtcctcgcagatcgtctcgtcggcgatcatatcggtgaagttgtcgatgccgtacagctccttggcggtgcggttcaggcgctcggcgacgtcgtccttcagctccttcggcatccagacgatacgctcgatgccgccctcggcggcgatgaacttcttcgaggagatgaagtgacggccgtggcccatatagcccggcgtctgcacgccgccgccggtgcaggaggccagctcgccgaacgtcatgccgacgggggtcatgcccttatactcacggttgacgacgatgaagccgttcgagaccggctcgatgccgcagatgcattcgaagcagccgcaggaggtcatcgggtcctcgaggatggagtagagcgtgacgttctcgaccgcgccgtgcgtggcctcctggatcatcttgttgacggactcatagcggccggtgcgctcgtcgaggcagccctccttgaagatcggctggcacgggccctgcgggttcagctcgttcgtcgccttggcatcgagccaggaaacggcgccgcacaggccgagacgctccggggtgacgacgcagcagtgcgccggggcgaagctctggcagaggatgcaggtgtagaagcggtcgacggactcatccgtcatggacagcaggcggtcgtcgcgctcgttgtagcgcggcatggcgacctcgtcgcggaacttctcggcagcggcttcctcggtgtagaacgtgacctggcacttatcgacgacggcgtcgaattcgtccatgatcatatgatacagcacctcgccgaagtgcttcaggcgcagacccttggcgaaggcgtcgttcgaaacgcgcacgcggacctgattacgctggccggtgtgcatgacgccctccatgtagttgaaccaggcgtggatcttgcgctcgatgacggactcgaaatcggcctgcatcttcgcgcccgcgacctcgatgaacgtgcacagagcgtagttcttctcgccgccgtccatatcgtcgccgaggatggtgatcttgtggtcctcgatctcggacggatcgcgcatgagcacgagctcggccgtggcgttcttgccagaccagtattcggtgtgcatgtcggccttgcggatgatctcgccctcaaaggcggccgcgaaggcgacggggatgggcagctccttcgtcttgatcttgatgttgcgcagctcgagggagtgcttgacggtcaggctgtgatccagcacggattccagcgcgccggggacctgattctcgccgaggtcgatgtcgacgacgaccgggaagcccaaggcgatggcgcctgcgcccgcggagacgacgacattgtcgatcgcgccgaacgtattgacgaacgcggggacgcgctccttcgtgtacttcagcaggccgggcaggtcgccgggctggacgttgccgaagatcagggccgcgcggatggcgacggtgacggcgtggatgacggcggtgacgtcatggccgagcggcacgacgcgcagctcgaggcccatcttcacgccgccctcggcgcactggtcgatgacgccgccgatgaggaaggtcagaatgcccttcgcctgataatccttgacgacggagacgacgtcagcggcattgtcggccttgccgagcacgacggccacgccggggatgtcgcccgtgacgagcgggacgcccagcgagcggatgacgggatcgggcacaaagccgatgcccgtctcgttggcatagggctccgcgccgtccagatacttcaggccctcgatgatctccgcgccgacggcagtggcaaggccggcgttcagtgcctgaccgaggtcctcctgatcggtgatgagactcttgagcacgcccacgcaggcgggcaggtcgccgagcttggccaccttcacgcccgttgcggcgtagatggtggggaagaagtaggccgtgtcggggaaggcaatggccttgtctgcgccgaatttggcgattgcgtcgttgacggcgccctcagtcagaccggcgacggcatgcgagccgccatagatgagatcggttaatacactcatttcggtttcctcctgatgaaaaatatcaaatttgcgggtgcaaatcagatgttatgattggatgggtttctgtataatttaaatccatatgttctggatttgtcgtttatgaatcaacttttaccactacgtcttcctgcgcgccccatgggtcccggatcgtcagtttggactccgcggcgacggtatcccggagaaagggggaattggaatcgccgctcagggcataggtaaccgcagcatcgctctgcacggtgcagtcgcgatccgtgaaattcagagaaagctccccggccgcactgcctgaaagagccagtgcacgcctttccggcccgctccgagcgaccttcagccggtagttcatcccgctgcccgtgaccgtcagcgaatccggtgtaacgagggcctcatcgatcccgtcgccggaaagcagaatgctctcctgtccccggagcacggaaaaccggctctcgccgctttcgtgcgtatagtgcagcgcctcggtgtacggaatttccagcgtcatcgtcgtatcgtcaaagccattcacagatacgctggatgccgccatgtcgcccatccatgctccgttgcggaatgtcaggctctgcccggcggcattttccacgcggcaggcgctgttgacagccagctcgatctgcatcgcgggctgctcctgatgattttcacatgccgtggaaaagatgataagtgaacataccaggaacgttgccagcaggatcaggactattcttttcatggctgcacctccacctctatatcatcctgcgcgccccatgggttccggatcgtcaggcgcactgacagccggcacaggttgacgataaaacggtattgacctccgacttgtcattccgaggagcgaagcgacgtgggaatctcatgcaggcaataacgaattcgccgggggccttcccatgctccggcttgtaccgcgagattgcaccccaagggcacttcttcgcgctgcgcgctcagggcgccacggcccctgcggggcctcgcaacgacaaacttggggggctgcttcgtttgaaggaggtcaatgacaaccttgggggcatccccgatctagcgcgcaaatgacgggacgccgtcgcggatgcggatcgtgcaggtctcccctgcggagaattccatggtatccagcggctcctgctggtcccggtcccggagcacgacggtaaacggggcgtcctgcgcggcgaaatatccctttttgccgtcccgctcatagcggacgcggctctcgccgctgcccgttacctccagataggttctcgtgccggtcgaaatacccacttcatactgcatattttcgccggtcgcctcgacggtggagcgggtgtattccacgttctgaaggccggggccctccacggcgcggaaatcgtcgccgtcgaaggagaggcagatcgagcgagcttccgcctgctccggttcaaaccggacggaaaacgactcgctgaagcggacctgcacggaagtcgaccccggcacaaagtccactgtgaaatggccgtccagcaccggcatcgtaccgctccatactttgtctgcaaaatgaagctcctgcccctccgcattgactatggtgaggctgtcctcgctcacaaagctgaaccgcgtctcttttggtttggattcgcttcggcaggccgtgcacaagagaaggcagagaaacaggatcagggttaccggtatcattttctt

SEQ ID NO: 11198 - DNA, 1566 bp, Unknown
  gut microbiota DNA sequence
catggcgttttaacggtggcctgcacgggctgcaagtgcgcagctgggcccggctgtcccctcccctgcaacgtgccaacgaaccccctacaaaaaaccggggcgggatgatcttcatcccgccccggtcgttttttcaggattcctgttcgtctgggacgcgcgcctgcttcagggaacggcccgcgctgcggaaaaacacccctgcggcatggacgagcagcttgcgcgtatcctcgtccagccccttggccgagcgcagcagcgccagcgcgcgggaaaagcgattctccttcaattcatgcagcgtctcggcgttcgtttcgcacagcatgtggtagaccgtgtcgatcgtccgctcgcgctgctccggctccagcccggccagccactgcttgagcgtccggtcgaggaagcggctgccgttcgtgacggtctcgagcgtaacgaagcggtcgcgcagcacctcccaggtatagagattgtgctggccgaagccgtcgcccgtgctgtggatgatggtataggcctcctcgtgctcgagcagcatgccgacgatggacgactgcggcacgaacgtctgcacccgcgcgcagatacgctggtagcccggcagggcgatcacctcggcatcgaagccggggccgtcgttgttatacaccgctgcgatgcgctcctgcagggctgcggggcagaacgctgcggcatagaccgcgaggttgccgcccttggagtggccgccgagcaggaactcccccggaaagcgcagcatggccgaggcagcataacgcgccgcgaggcgctgggccggaacggggcaggtgaaggccatgttgaaatcctccttccagccgacgagcgtgccgtccgtcccgcggaaggcgacaaaatgccgcccgtcgccgagggcgacggtgatggccgcaaactgcgtctggctctcgaggtcgatttggtttacataatccatgatccgcatctcgcagaagcgctgactcgccgcaagggcggggatgaaccgcccgtcctccggcaggagcagcggcggctgcgcggcgaggagctgccgcatgagcgcgccgaccgtcgctccctccggcggaacaagcccgtcgagcggcagataggaaagccgggacagcacaacggcgtccacgtcgcacagcggcacaagcccgagcgtcagatcgccgcgccagtcaagatagtcaaacacattcgccatgcagagcacctcctgcgcccatgataccatatttcgggagaaaagaaaagcgcgaggcggggcgaatagaaacggaaagtttccggttgtgcgttgtagggtcggggcatgccccgaccggcgctgcaccggcgaacggaacaggctaacattaaaatgataatagcccccgaattgtcattgtgaggagcgaagcgacgtgacaatctcgggaaggcagttgcgatttcgccgggagtaccctgttatccggctgggtactgcgagattgcaccccaagggcacttcctcgcgcttcgcgctcagggcgccacgtcggcctacggcctcctcgcaatgac

SEQ ID NO: 11199 - DNA, 1920 bp, Unknown
  gut microbiota DNA sequence
cgatggcctgtacggtccggcggtaccgcgccgggcccggctgtccgctcccctgcaacgtcccgtcgatggccttcccacggaattaccgttgcactttccgctgccctatgataagataagagaaacgaaagggggaaggccgatgctccgcgagatcgttcgctttgccgtgcccggctgcgcgctggcagccgccatctggatgctggcgcggtattttgccgtgctgcgcccgcgcgccgggacgacggaatggatcggccgcctgacgccgccgccgtggcagccggtctcgggctgccccctgcacgggatggacgccccggcggccctgctgctgggcctcgccgtgacgggtctgcgcctgctggagcattggctgcgcttccatgccctgcccgtaacgccgggggcgctgctgccggtcgtgtttgccgggctggctgcgggctgcgcccatttgctgctgcgccgcctgctgggcgggatgctgcccgccctgtccggcgcgctgctcttcggcctgctgcaggatggctccccggccgtgacggcagcgctgctgggctatgtgctctggcgcacggcaaagcggcacggcgggggctggatcgtgctgtccgtggtgtgctttgccgccgggctgctgaaggagcgggcgctgcttctgctgctgccgctgtacctgatcggctatgtctgcacgcggctctcccgccgcacgggcctcggccggtcgcttgcgctgacgctcccgctgagtctgcttggcgcgctgggcgtggccgtgctcggctggtggatggcggggcgcggcacgccgcttgaggcgctgcgttctttccgcttctatgaggcgctttggcccgcgctgtgcggaaatgtccgcgccgccgtgacgctgccgggacgattttcgccgtcggagctggcgctcggcgcgcttgccgttctgacgctgccggagctgctgcacgggctttgccgcgggcgcgaccttcgctgcgcgatgatcctgctgctgctcgtctccgctgcggcgctgtgggccctctccggcctgttcctgctgccgctgccgctggccatggctctcgcgtgggtctggcagaggctgtgcgaccgcggcgcggccgtctcagcagcggtcccggccgccgtgctggcgctgtgcgccgtctcttccatcctttttatgttctgatacaggaggttatcttatgaaaattgcaattgcctgtgaccacggcgcgctggcgctgaaggaggccgtaaaggcccatctgaccgcgcgcggcatggagtgcgtggatttcggcacgtttacggcggatagctgcgactatccagactttgcccgcccggcggccgaggccgtcgcctccggcgcatgtgagcgcggcatcgtgatgtgcacgacgggcatcggcgtttccatcacggcgaacaaggtgcacggcatccgctgcgccctgctgtccgacccggtgtccgcccgcctgacgcgcgagcacaacgacgcgaacatgatggccctcggcgccggcttcgtcggcgagctgctggcgctggagatcgtcgacacgttccttgacaccccgttctcgaacggagagcgccataagcgccgcatcgaaaagctgatggccgtggagcagggctgagacggcttcccatgactccgtgatgctgtaggggcggggacagccaggcccgtccgcgaagcggcaatcggacggccaattcggtgcaatgcaccgttcccggcgccatgctcccctgatatgtcattgcgaggaggccgcaggccgacgtggcaatctcgggaagacagttacgattttgccggggctttcctgtgatccggccgggtactgcgagattgccacggccccttcggggcctcgcaatgacacg

SEQ ID NO: 11200 - DNA, 5255 bp, Unknown
  gut microbiota DNA sequence
caaaaattttacattgtttcatgccgaggcagcgcatgacagcaaactcttttgtcctgccgcgagttgccagaaaacttgcgaaaaagccgatgccgccgcatacaatgatcaaaaccggcagcaacagatgcagcatggaaaggttcgcctgaatctcctctatatttttctgataggtctcatcgtggattaaaacaccaaaagtaagaccatccatttgattgctgagatccgggcgaacaaaccactcgtaaatatacgatttgctttcttccagcttttgattgtttcggatatcgaaagaacagctgtccgtcagaaaagcaacggaaacgccttcactccatgacatgaaatagggacaatatatttcattgctcgggccgtttgtaacagtccctatgattcgcaatcgtgcagattcgcccatatcggcggcaacggtaatgtattcgccatcggtgaccaagtcagatgaaatcaggcatacttgttcttgcccgcgcagaactccttcctcccagtcttcaaaaaattggacatagaccccttctgcttgagaaagagcgggatcggaatcgatcgagagaatcctgctgagtgttgcgccttccggtttctccaatgacattttcgcttttgcccgcacgttttttacataatcgtccaaatagcattcccgcaaccgtcgtttcccctccaacatctctacaaaagccgaaagcatttgcaggttgccggaatcagtaccttttgcatttgttacggtgcaggaaatcgtggtgttctcaattgtgctgcttaaagcgttctcctgacggatagttaaattctgtaagatcattgcagaaagagcccctgcggcggcaaccgcaataaggagcagacttgatgtccatcggcggagcatggcagtcagtgttacactttcaagagcgtgaccgtttttttgagacatagacaattatgctcctttcaaggcaagccttattttgctttcatcagcttgcggttcgcaaagatcgccgtgctgatcatagtagaaaccatgagaaatacaaatgcagtaacagcagaaaccgccattgcctccggtcggagcgtaagagcgctcgaaagcagattccgtgtaacaacatcaaatagcgcaattgcagcacatgtgccaaacaagactgcaagggtttccaaaggaataagtgccatgatgatttcccggaatactgccttggatgacctgcccaagaggcgaacaccacggatcgtcaagttcattctgcggaaattcagaaacaaaaacagtgcggaagtaagcaggaatactccgatgccgaccatcatcaggcgcatggcattggtttcaagtgcatccagtgattcctgcatagaagaaaagtcctgatcgaaatagagaaattgtccagcgaggttctgctgctccatgtacttttcaaattcttttgcagagccatttttcaggacaaaagtgttcagtaaggaatttgcccgtgtttcataattctgcgcattaggaacagatgctttgggaaccaaaatcgtgtccgcattaagctgatatgcgccaaatgcgaatcgagcgccagtataaatgccaataacggtataatttttgcatacaccgatcgcatcatcgagagacatatagtatcgttgacgataagggcccggatcttccgccgcaagcatagaattcgccgtcgcaccgttgttgtattccccaaatccagaatcatagtagtcaagctgaatcatatctcccagccggaggccgttttgttcagcataggctgcactgatgacacacacatcatcaccgtttgtgtactcttcgcctgtaaaaaagcgcccggataacaaagcctcatcaccggtattaaaagaatacatactctctgctcgatcggtcagtatcacggccgcagactcatagttaagctgacaaagcggtacaatatcttcccgccaagtcgaagctgcatcgctgtttagataatctgtcaccgaccctgtatattcacagacccaaggaagttgtcctgccgcaaggaaatggtagtccagcccattataactaccaagttcaagactgctgggctcaccatagaaattgctgttgatctcagggaacggaacaatgtagcgattctcattttttacctgatcatacccatcggcggaccgaacgacacgatgatcttggtattggccgaacacaagataggttttacctttttcaaatggtactgccccattcgattcgcgtacatcgctgtagatatgtaccgaatcaggtctggggaacgtattatatgcgtctgacaagcagacgatttcctcaacgctgaatgttgcatcatacagaaacataccttccgttggctgctcccggatgccgctgcagcgcagtgcaaatacagcaagagaatagcattctccatcgaatgccgtattatattcagatgggtcgatgctgctggaagagagggatctactgcccgctatatgagcagaaagcaggcagcggcggtcaaccgtggtgatttggggagcttcctgcgctgctttgtctgcaaatacacgattctgcaatgcggtggcaagctcctctggtgacaggttgcttagatcaggctctatcgggattgcaatcgttgtgtaaccatttgatatctcatttttctgtgtcttggcgctttcccatgcggaataaccggtgcaggagagcagaacagagaaactgagcagcaataccagcaatgtggtaaagagcggcctccttgttgcctgcttgaggaaaatgttcataattcgttttgcctccttgggatatagtcgttcggcacatatcgtatgatcgtccgtttcgtacattttactcttgaatgtatgacgattcaatcggtcacgcacgaaacgacagttttgatgcagttttggtcgtgcttcctatggcacattctggggtggtgcttgcaaaaaaacacaaaatatgctataatgattctacttatataaagtgtaagggtgctattatgcgtgtgattttttgcgatgatgattcgattattcttgagcaactgcatttatatgtatcggagtattttgagcagctgggcggaatgataccggaatttgcctgctattccagcggagatgctctgttaaatgccaaagttcgcgcggatatcgcatttttagatgttgaaatgcccggcgttagcgggatccatgttggtgcaaagctgaaagaattgaatccaaatataaagatattcatcgtgacctcttatccggattatttggacgaagccatgagatttcaggtgtttcggtatttgtcaaaaccgattgataaaaatcggctgtttcgcaatctgaaagatgcagtttaccagtacaatatggaaagccgcgagttccccattgtaacgaatgaaggagtattcgttcgtcgtgcggaagagatcatttgcgttgaagcgacacagagaaaagttttagttcatacgatagatggagttctgcaaagcacacagaatatggagtattggcggcaaactttgaccttgccatgcttttatatgacgcaccggagctatatcgtcaatctgcactttgtcaattctattcacaaagatacgatcctgctgaaatatcggggcagggagatgaccgcttacttaacaaggagaaggtatactgcattcaaggacacctatttgtggtatatggaaagcgtgaaatgatggcggaatatatttgctacggcgtgttatatattgcagaagcgaccattgcgtggctgtattttgatgctctgttttgtagaaaatcatccggtcttagaattggcatcacatgtgcggttgcctatcttcttttgtttggtattacatggtttaacagcgttgttttgaatggcgcagcatttttcctcgctaatttactgctgctatggatgaattacgaatgcaaactgagatctgccatattgcattctgcttttctgacctcgatcatggctattacagaaattatcgcagcatggatcatcagcttgtttgggttccgttttggcgcctatgcagatagtttggccatcatgatcgtcatggctgtgatcagcaaaatgctttatttttcgataacagtcattgctgcaaaactctgggctccgaaccgacaggctcaggaagagcctgcgtttatgggattgctttgcatattaccgatcttttctgtcattgtctcagcagtagtggtatatatcggggtacgcgcagagatgacaaagccggtagaacttctcatgataatcattgtgttgaccttgctgatcgtcaatctgatttttatggtcatatacaaccatttgcagcgaatgcacgctgaacagctggctatgaatttgagtattcaaaaagaagaagcagatgctgcatattatcaggatctgcaaaagcagtccgaaaaccagcgcattctcatacacgatatcaaaagacatctaaatactattcacggcttggcaaacgatttcaacgctccggggatatccgagtatattacaaaactcgtggatgatgtactgcctgatcagcaggtaaaactatgttctgaccccatacttaatttcatgctgcagcaatttcgggataaatgtaaaagcccccaaataacctttcaatgtgatatccgggataattgtctttcgtttatggatgccccaagtattacgaccttttacggtaacctgctgacgaatgcgttcgaggcggcgagcttctctgcagaacggacgatagagctatccgtaaagaaaaatgaggaccaacaggttgtgatcgtttcagttgtcaattcctgcgacacaccacctgtgccggatcatgagggcttgtttcgaacgaaaaagcgcaatcccggaattcatggtgtggggctgaagagcattggacgtatagtagcccgatatcacggcgttgcaacgatgcgttttgaccccgaaagtaagaaattctatcatatcgttcaatttcccatgcaagaagaacggaaaaatcgtagctgaacacatctaatgatttttccgcccattcggtatgtaacatgcaaaaggagcaaatggcatctttggtctatgccatttgctcctttttataggcctaattaaaaggctggtattccttatgcaaagaaagatgttatgaaaagaagcagggcaaattccg

SEQ ID NO: 11201 - DNA, 3311 bp, Unknown
  gut microbiota DNA sequence
aaatagaagaaaaactggtggatattatgatctggaggaatcacaatggcggatacgatccggggcgtatgcccgcaatgcggaaaaaagctggagatcccggcggagctggaggaattttcctgcctgtactgcggggcgcgcatgcgcaccgaggccctgcaggcaaggcccgtggaggagcgggccgttgaggagctgctcgcgcagctgcccggctgcatcacgcgctatccggacctgcacctgcgcatcggcaaaaaggactttttcccgacgttcgcgcagtatgagcaggacaacactcccctgctgctgcagctggacgcctgctgcgccgggtatcccggcggggccgaggcgctggccgggcatgcggcggccgtgatgctggacggccttgccgcccatatggagaaggacccgcgctggggcaagcgcacgcgggacaatgtgtttttcgacacgaaggtcgcgctggccattttcttcacgccgctgctgcgcaagctgcagctggagctggccgagccgctgcgcacgcagctgcagacgcagtggctcgcgcgctggccgaagcagctgtggaggcccggcgactatgatacgctcgcgggcgggttcaagaagttccgcttctgcttcatcacgacggcgacgtgcgccgccgagggcaagcccgacgactgcgcggagctgacggccttccgcgcgttccgcgacggctggctgcggcagaggccggacggccccgagcgcatcgcggagtattatgccgtcgcaccgtccatcgtggcgggcgtggaatactgcgacgacgctccggcgcgctatgccgagatccggagccgctggctcggcccgtgctatgcggcgctgcagcgcggcgaaatgcagaagtgctatgacacataccgggacatggtgcagacgctgcaggaacggtatggggtgcagtgatcggatgatatggtaggggaggggacagccgggcccggcgcatcggcggcgatcaggacaggctgtcgataaaacggtgaaagccaaaggtttgtcattgcgaggaggccaaaggccgacgtggcgccctgagcgcgcagcgcgaggaagtgcccttggggtgcaatctcgcagggtctggctgcatcgtggggaagctgtcggcgaaagcgtaactgccttcccgagattgccacgtcgcttcgctcctcgcaatgacacatctggcgggggcggcggtgcaccagtgcccttatgcggttgaattactccgtacaaggcgctcacaacccgcaaggggcacgccgcatccgtaaggcggcaaagccgccaacagctgcgcagtgagcgccgctacagacgcaatcggttggtacgtttttgtcggtagcttgtattgtgcgctggtgcagcgccgggaggggcatgcccttccacgaacaatataataggatgatatgctgtttttggcagtctgtgccgcggcggatgggagctttcccgtccgccgcgggatttttttgcttttttttcgaaattttttaacggattcacatttcgcgtgaatttttaacgggtgcggagctacgggtgaaagagtactttttcaggaattggaggttgaagacgaatggtggaaaagcaccggaattttgtgcaggcctatctgcagtgcttcgacgccgccgaggccgcgcggcgcgcgcagtgcggggcagacgcactggcccgtcccgccgtccgccgcgagctggccgcccagcgcagccggggcgtgcccggccgggaggacgccctgcgcaggctggcgcagatcgccttcgggcgcgcgaacgactgcgtccgccttgtgctcgaggacgacccgcccatcggcgagctggacctgacgctgctttccgaggtgaagcgcagcgaaaagggggccatcgaggtgcggctggccgaccgcatccgcgccctcgaggagctgctgcaggccggggcggcggacgacggcgcggccgcggcgttcttcgcggcggtggaggagccatgatgcgattttcggccaagcagcgccgcgtgctgacgtggtggcggcccgacagcccggacgctgcgtttgaggccatcatctgcgacggagcggtgcgctcgggcaagacgctgtgcatggggctgagcttcttcctgtgggcgagcgcctgctatagcggcgcgcggttcggcctgtgcggcaagaccatcgcctcgctgcggcgcaacgtcgttacggagctgctgccgaagctgcaggccatcggcttttccgtccgggagcggcggacggagaacctgctgcaggtgagctaccgcgggcacacgaacgagttctacctcttcggcgggcgggacgagggctccgccgccctcattcagggcatcacgtttgcgggcgtgctgctcgacgaggtggcgctcatgccgcgcagctttgtggagcaggcctgtgcgcgctgctccgtaacgggaagccgcctgtggttcaactgcaaccccgaggggccgtaccactggttctacacggagtggatcggccacgcggcggagcggaactgcctgtacctccactttacgatggaggacaaccccgcgctgtcgcccgatatccgcagccgttatgcgcggctgtactccggcgtgttctaccgccgcttcgtgctgggccagtgggtggcggctgagggacgggtgtatgacttcttcgacgcggcaaaggccccgccgccgcccgaggggccgttcaaccagtggtacatctcgtgcgactacggcacggtcaacccggcatccttcgggctgtgggggcggaaggacgccgtgtggtaccgcgtgaaggagttctacttcgactcgcggcgcgagcagcgccagatgacggacgcggagtatgagcgggcgctgcgggagcttgcgggcgggcggcccatcgcggccgtcattgtcgatccgtcggctgcgagcttccttgagacgctgcggcgaaacggctggaacgtccgccgggcggacaacgacgtgctcagcggcatccgccgcacgtcggacctgctcaaatgcggcaggctcgtgctgtgcgacacctgcacggactgcctgcgcgagatcgagcagtatgtctgggacccgaaggccgggcgcgacgccgtgcgcaaggagcacgaccatgccatggacgacatgcgctatttcgtctcgacggtgctggctccgcagcgcccggccctggccgcatgtacggctatccggagggcgtaggtgttggcgcattgtaggggcggggcacaaac

SEQ ID NO: 11202 - DNA, 905 bp, Unknown
  gut microbiota DNA sequence
agctggcctataacagcttttatcccctgctgttgccgaaggggcaggaagagcgggcctacaccgtctcagccatgctctatcccattttgaaggttctgatgatgccgctggcggcggtgctgtacgataagctgggcgtgggacggctgctgctgatacaggccgcgctttcggtgctggcggccttcctggaaagtcgcattcgcgtgcaggaaagccgccgggatcaggagccgctgctgtctctgaaaacatggtggcgggatgtccgggaagcagccgcctatctgcggcaggagcacggcctgcacgggctctatgcgtacatgtccgttaccaacggcatggcctcgggctattctcccttgctcatcgcctttttccgcacggcgccgggcttcactaccgccatgtattcctttttctccgttgcggaatttgccgggcgcaccatcggcggagccatccgctaccgctactctctcccggagaaaaaacgctttggctttctgttcggtgtgtatcagacctatgagttgatggacacctgcctgctgtggctgccatatcccctgatgctggtgaatcgggcgatctgcggctttctgggcattcaaagcgccaccatccgtcaggcggcagtccagcgctatatccccgaccggctgcgcgcccggctcaatgcctatgagtccatgctctgcacagcggcgggagcggcgctctctctggccatcggcgcactgggagaggtgctggattaccgcctctgcatgaccgtctgcggtctgatcaccatggcggtgtgctggctgacggtatttctgcggcggcgtcaggtgcgccaggtgctggcggaccgtcccggtgtggaccagatccggtagataccggtccggttt

SEQ ID NO: 11203 - DNA, 1913 bp, Unknown
  gut microbiota DNA sequence
tgttcaagatccaggcggcatcggattcgaagcgcttcggcctgcggccgtggtggctgatcctgacgctggcgatcatggcgtgtctggccgggctgctgctcgtgttccgcccaatggacggcgcgcgggcgctgctggtcctgctcggcatcgcgatgctggcagagggcatcctgaacctctgcgtcgcgtgcagcatgatcaagatcatccggcaccagcagcctgatgttctggatgcggaattttatgagaaaagaggttaaaccatgcgattttccaaagcggtcgtgcgcggccgcgtcgcgatcctgatcctcacggtgcttctgatgatcccggctgtgttcggcatgctggagacccggatcaactacgacatgctcaattatctgccggacgacatggacaccgtcatcgggcaaaacgcgctgctggaggacttcggcaagggcgcattctccttcatcgtcgtggagaatatgccggaaaaggacgttgccgccctgcaggaaaagctcgaatccgtcgagcatgtggagacggtcctgtggtacaactccctgatggacacgtccatcccgatgcagcttctgcccgacaagctctatgacgccttcaacaccggcgacgcgacgatgatggccgtgttcttcgacaccgcgacctccgcggacgagacaatggacgccatccgtgagatccgctccattgcgggcaagcagtgcttcgtctccggcatgtccgccctcgtgacggatctgaaggacctgtgcgagcaggaggagccgatctacgttgccattgccgtcgtgctggcgtgcgtggccatgatggtcttccttgacagctggctcatcccgttcgtgttcctcgccagcatcggcgctgccattctgctgaacctcggcagcaactggttcatgggcgagatttcctacatcaccaaggcactgtccgccgtgctgcagctggccgtgacgatggactattccatcttcctgtggcacagctacaatgagcagcgcgcgatctaccccgacaaatgcgaggccatggctcacgccatcagcgccacgctgacgtccgtcgtcggcagctccatcacgacgatcgcgggcttcctggccctgtgcttcatgtcgttcacgctgggccgcgacctcggcatcgttatggcaaagggcgtcctgctcggcgtgctgtcctgcgtgaccgttctgccgtcgctcattctgctgctcgacaagcccctgcagaagacgcgccatcgctctatccttccgaagatggatggcttggccaagggcgtgacgaaggtgttcccggtgttcctggcgctgttcgtggtgctggctccggtgttctacttcgcctatgacaagacgaacgacgaagtgtactacgacatgggccagtgcctgccggaggacatggagtatgttatcgcaaacagcaagctctccgaggagttcgacatcgcctcaacgcacatgctgctcgtggacgcgtccctgccgtcgaagcaggtgcgcagcatgatctccgatatggagcaggtggacggcgtgaaatacgtcctcggtctcgaatccgtcgtcggcgccggcgtgccggaggagatcctgccggattccgtccgctctattctcaagagcgaaaaatgggagctgctgctcatcaactccgagtacaaggtcgcgagcgacgaagtgaatgcccagatcgattcgctcaatgccattctgaagaaatatgacccgaccggtatgctcatcggcgaggccccgtgcatgaaggacatgatcgaaacgaccgaccacgacttcaaggtcgtcaacgcggtgtcgatccttgcgatcttcctcatcatcctgctcgtggagcgcagcatctcgctgccgttcctg

SEQ ID NO: 11204 - DNA, 4677 bp, Unknown
  gut microbiota DNA sequence
ggccattttcatcaacctcggcatgccgcatttcctcggccagtcgctgccgttcatcgccccgatttgcatcagcacgatccagctaggcgcgactgtggactacgccatcctgatgacgacccgctataaggccgagcgccttgcgggcaaggagaagcggcctgccgttatcaccgcgctttcgacgtcgatcccctcgatcatcgtcagcggcatgggcctgttcgccgcaacgttcggcgtggccatctattccgacatcgacatcatcagctcgatgtgcatgctcatggcgcgcggcgccatcgtcagtatgctctgcgtcatcctcatcctgccggcactgctgcttctgtgcgaccggctcgtgtgcgccacgacgcttggcatgcgccattgcaatcattccagaaaacacgcggagaagcaggatgcttctgcccgctgagaatcgaagacaggaggaacgaagatcatgacaaagaccggatataaaattctctccggctgcctgtgcgctgcgctgatctgcacgatcaccggcgcgtcggtccatgcggagaatggggcgctgcacgccccgcaggatacgaaggcggcctccgctgcggcggaggagcgcgcctcgaaggaagagaccgtttatgtcatcgccggagccgacggcaagcagcagagcgtgatcgtcagcgactggctcaaaaatccgaacaaggaaacgagtttgcaggacgtctcggacctgacggacatcgagaacgtcaagggcgacgagacgtggaccgcgaacggcacgagcctgacgtgggatgcgcagggcaatgacatctactatcagggcaagagcgaaacggagctgcccgtgaccatgaacatcagctaccagctcgacggcaaggacattgccccggccgagctggcgggcaagagcggcaaggtgaccatccgcttcgactatgagaaccactgcacgacgaccgcgaccgtggacggcaaggaggagacgctctatgtcccgtttgccgcgctgaccggtatgctgctggacaacgagcgcttcacgaacatcgaggtcacgaacggccgcgtcgtgaatgacggctcgcacaccgttgtcgtcggcatcgccttcccgggactgcaggacgacctgaacatcgagcgcgatacgctggagctgccggactatgtcgaggtcagcgccgacgtgacggacttcgcactcgacacgaccctgacgctcgcaacgaactccgtcttcagcgcgctgcaggacagcgactttgagacggtcgacgacctgaaggcatccttcgccaagctgaccgacgccatgcagcagctcctcgacggctcttccgagctgtatgagggccttgagaccctgcttgagaagtcccagacgctcgtggacggcgtcggcacgctgaacaacggcgctgccgccctgaagaccggcgcgggcagcctgaacgcaggcgctgccgagctggcaaacggcatgcagaccctgaacggcggcctttccaccctgtccggccagagcgcagccctgaatgcgggcgcgcagcaggtgttccagtctctgctggccgctgccacgacgcagatcaacgcagcgggcctcagcatcccgcagctgacgatcggcaactatgccgaggtactcaacggcgcgctggcttctctcgatcagactgccgtttatgagcaggcttatcagacggctcttgccaaggtaacggctgccgtcaatgcacaggaagcgaccatccgcgcggctgttacggctgccgtgcagcagaatgtgaccgagcaggtcacggctgcggtccgtgagcaggtcacggcgaaggtccttgcggccatgggcctgaccccggagacatatgcggccggtattgccgacggcacgatctcggaggagcagcaggcacagatcgaggctgcgatcaacgcccagatggcctccgacgatgtgcaggcgctcatctcccagcaggtcgccgcgcagatggcaagcgccgatatcgcggccctcatcgaccagcagactgcggcgcagatccagacgctcatcgaccagaacatgaattctcccgaggtgcaggatcagatcacggctgctctggagcaggcaagctccggtgcagccagcatcagcgccctgaaatcccagcttgacggctattatcagttctatgtcggcctgcaggcctacaccggcggcgtggacagcgcggccgcgggtgctgcgaagctgcagagcggcgcagccagcctgcagaacggcgcttccagcctctatgccggtgcaagccagctggcagacggaacggccacgctgagcagcggcgcatccgccctcatcgacggcgtgacggcgctgcgcgacggcgcgatgcagctgtccgacggtctgaagcagctcaatgaggagggcttccagaagctcgtcgacgccatggacggcgatgtggagccgctgctggagcgcgcccgcgcgctggccggtatctccggcgactaccagacctattccggcctggacgccgcaatggacggcagcgtgaagttcatctaccgcaccgaggccattggctgagtcaaacagacgaccccctttcgcacgaccgcccggcgggagcaaagctcccaccgggcggtgttttgtgttgtagggtcggggcatgcttgtgccgttacattattcactattcaccaaaccgcccccgcctgcaccagcggacttaggaatgcctgccctgcggataatccatgctggcagttttccccaaaaacgacaaatgtttcccacgagggcattttgcattgacgagcttagaataaacaggtataatggagacatcacaaaaatgagaggagcagacacaatgaaaaaacgtttgttcagcctgattcttgcctttgcacttctgctgtccgccgtcccgacggtttttgcagcgacgcatcacgaggtcgtgatcgacggcgttgtctactgggtctatccggaggaaggctatgcggaaatccacagcacggtgaggggaagcctgccgcaagtgctggagatcccgcagtatgtgaacggataccctgttacgagtctctacacctttggcctggtcgatcttgaaggcgttgtcggcgttatcctgccggacaccatgacctttatcgacgatatttccattgccggattcgatctggtattcgtcagcttgcccaacaatgaggtcaacatcgagaaaaatttcgtgggggcccatgccctcgactactactatctgccccaaaacttctctctttcgccggagtgcagcgcctatggctccaagctgtttgccagtcacacctgtgtcggctatgaaaagcacagagcctttgcccgcgacctgattccgatggacgcccatccggatagccagtatgtgccggccaacagcggcgtgttccgcgtggacggcaacgagctgacggcgatctaccttgtcagcctgcgcgatccgtccttcaatggcaatcttttcgtgatggactctgcggtcaacggaatgccgatcaccaaggtggaaggcacctgcaaaaattacaacacctcactcgttctcggcgactatgtccgcgtggtggaggatggcgcgttcaccgaggagtggggccaaatcatcaacgacctttacacgcccgcatgccttgagcgtcttcctgcaaatcttcctgttaaatccggcattaccaccgtctacggcacgaccggtacttatgccgagcagtacgcaaaggagcacgggttgaaattcctcgacatggcaaagacgcccttcgtcgacgttccggaaaacgaatggtacttcccatatgtccatgatgtctactggctcggcctgatgaacggcacgagcgaaaccaccttcgagccgctggccaccacgagccgcgcaatggtcgtgcaggtgctctacaacatgagcgaccgcccgagagtctatgtgcagaaggccttcgacgatgtcgtagagggccagtggtactacgacgccgtcaactgggccaaggcagttggcgtctgcaacggcacgagcgagacggaattctccccgaatgaccccgtgacccgtgagcagctggcggccttcctgtaccgctacgctgtgctctgcggctatacctgcattgcgagcggcgacctttcgggctttagcgaccgcaaccgaatttccgattacgcgcgcgagccgatccagtgggccgtcggtgccggtatcatcaacggtacctccccgaccacccttgagccccgcagcaacgccacccgcgccgaaatcgcaaccatgctctgccgcctcgtagacttcctcacaaacaactgatcaatcagcccctgcaaggccaaccgccccgcaggggctgatcctttaccacgcaggcacgatcgacagaatccgtagggcggactgcccccagcccgccggtgcaggcagtatcgttagacgccgtaggggcgctcatcgagcgcccgtgtgcaggcagtatcatttaatgcgtaggggccgatgccccgaccggcgcaatgctgccggtttgcacagaccatagttaaaatggaacgcaccggttgcgtctgcagtggcgctcagcgagcgccttgcgggctggcagcttttg

SEQ ID NO: 11205 - DNA, 759 bp, Unknown
  gut microbiota DNA sequence
ggtttgtcattgcgaggccccaaaggggccgtggcaatctcgcagtacccgattgaattgcaggaaagctaccggtgaaatcgtaggtgcctccccgagattgccacgtcggcctgcggcctcctcgcaatgacaaatccgggaacctgtgcggtcgacggagtgcgtgggaatttgcagatgtgcatggcgctcagggaacgccgctacagacgcaatcggtttgtgcgttttatcggcggtctgtaccgatcgttcgctcgtcgccggtatttctgtcggccggtcagggaagctgctccatgactggcgcgacgaattcgcgggcgaggctgcctgcgccggtatgctgcaggaaaacgacattcagctcgtgccgtccggtgagcgggggacaggtgaagctgccgatctccgggctgccgcgcaccacggcctcatagagaaagctgatgccgcagttcgccgctgtcagcgcgcggatgacgggaaggctgctgatgcagatcgtccgggaaaatgccgccgtgctgtagcttacctgcatcagctcgcgctcgaggatgctgcgcgtgccggagccgggctcccgcagcaggagcgtctcggtcagcagctcctctggcgagacgcgccgcccggcaaagcggtgcccggccgcgcagatgccgatatacggctcctcccgcagcaggaagctgtcatggcggcgcttgtcgaaaatgccctccacgaccacaaaatccagctgccccgcct

SEQ ID NO: 11206 - DNA, 10960 bp, Unknown
  gut microbiota DNA sequence
gtgcgaagggcgtgcccttcgtgcgctgcagcgagccgcagcccctttcaaacgagagcccagtgaaacgggtctcgtttgagagcttgccaaaaccacgttttgggcaagctcatcccgccggggaaaccggcgggatcgatatcagggttcctgcgtggggtccgccgcatcggccggctccgtgggttcggctgggtcggccgatacatccgtcggtgtggacggctctgccgcgccgtcataggagtggtcggcatcggccagcgtgcgcgccgtggcggcgttgtggaacacgcagtccacgcccggcgagatggaggcgatcgcaccgcggctgacgcagacctcgtagctcttgaacacaatggggcagaacggcacggtgtcgagcaggcgcgcgcagaggtcggcatagctgccggaattgcccagcgcctgcgtgcagaggccggccagggaagcgtccgccacggccccgtagctgagcgcgccgcccgtgcggaagaattccgacaggtcgaaattcgccgtcaggcgaacctcgccgagataggcgtcgtaattacccgcctgcagagcggccacataggcctcgcggcccagcgagcggaccttgagaaagaagccgttttcctgcatggaggaggacagatattccgcagcgcgcacgcgcgccgggtcatccgagcacacaagcagcacgggacagtccgtctcggacgtcggcacgccaacattgtggatggcggcctgaaaggccgtggccgaataggcatactgcgcagcaagctgcgcgtcatagaggtcggaggcaggcgagcagggcagcgtcgccgcctgcgcaaagccgttatagacggcgctcgtcatcgcctcgcggtcgacgccgtaggtgaaggcgcggcgcagcgcgacattcgtgaaccagccgctgtagaggttgaagccgacatagtgcaggatgggcgccggcgcttcccacgcctcataatcacagcggtagccgacggctgccggggaattcgggtcgcagtacacaaggtccgtgctgccgaattcgaaattgtcgcggatgtcgttcggcgttttggccgcctgcagctcgatggtctcggccgtcacggccggggcctgtgtctgccaccagcggctgctgcgccggagcacctcgccgtcgagataatacggtcccgtgccgagcggcgtgctgctctgtaccgtcgccgcagagacgatgggcacatcgagcatcagggaaaaattctcatacgccgtgtcgagcgtgaccgtcagagtgcggtcgtcatccgccgtgacggacagcatatgcgccagcctgccggaataaagcgcgctctgctgcgccgcgcgcagcgaggcggcggcgtcctgcgccgtcagaggcgttccatcggaaaagctcacgccggaaacaagggtatatcgataggtctttccgtcctccgaggccgtgaagctctcgcagagcaccggctcggcgcggaaatgcgacgaaacgacgaacaggctttcatacagcagcgaaaacgccgcgcggttcaccgtcgccgtgcaggtataggggttgaagccgtgctccggcaggtaggacaggccgaacgtcttcggcgcggcggccgtctccgtcggggctgccgcagtctcctccgtcggctgctgcgtggcctgcgtgggctgaccggccgcagagcaggcgcacagcagcagagcaagcagaaggcagagggcaagcagtcgcttcatatcagccctcctcccgcagccggatgatggccgccagcgagccgcgggcattgcccacgcggcggtgcgaccagaatcgctgcggctggcaggccgtgcagtcggcgctgatgtcgatgcacgtcaccccggcgcggcgcagccaaatagcattgagccgcttcaggtcgacatagaatttcgctccggcgggccggatggcctgcccggcctcgctgccgagggcggcgcgcatggcatccggcacatcggcatccgtctcaaagcagcacgggccgatgcaaggaccgatggccgcgcggatgttctccggtcggcagccgaactcccgctgcatggcctcgaccgcgcgggccgcaatgcccgccgccgtgccgcgccagcccgcatgggccgcgccgatggcgcgtgctatggggtcaaacagcagcacgggcgtgcagtcggcggagaaaattgtcagtgcaacgcccggctcgtccgtcacaaggccgtcgacgccgtgctctgcctcccgctgcaggccgcggccgcagtccgcgcggccgacccgctcgacgagggcggaatgcacctgcttcgtgaacacggtctcctccggcgcaaagccaacggccctgccgagacgggcataattctccagcacattttccggccggtcgccccggtgcgtgccgaggttcaggctggcgagcgcgccctcgctcacgccgccgaagcgggtggaaaagcagtgggccgcaccgtccagcacatcgctcgtcaggtattccagctctccttctcgatggacgcggaagctcatgacttggcctcgtccttgtcgcggcagcaatacttgtatttcttgccgctgccgcacgggcacggatcgttcgcgccgatcttgatcttcttcacgggctgctgcttgacggtcttatcggcagcgccgccggtcgccgtgatctttgcgacctgcttgcggcggatatcctcctccgtgcgcagacggaacagatacaggcggcggacggtctcctcgcggatggcgttgatcatgccgtcgaacatcgcaaagccctcgcgcttatatgccacgaccggatcggtctggccgtaggcgcgcaggcggatgccctgcttcaggtcctccatggcgtcgatgttgtccatccagtactcgtcgacgacgcgcagcaggataatgcgctcgatctcgcgcatgcgctccgcgccaaactcctgctcgcgcgcggcataggtctggcggaagagcggatagagctgctccttcgcctcgtcgcggctcagaccgggctgcggggcgaatgcgcccttcggataatagacgccctcgaattttgcgttgatctgcgccagcttctccgggtcgtcgcagtggtcggcaccggcgaaggcatcctcgacctccgtgtcgatgacatagtggatcatgccctcgatcgtcgaggagagatcctcgccgtcgagcaccttctggcgctgctcgtagatgacctgacgctgggtattcatgacatcgtcgtattccagcacgttcttgcgcatctggaagttgcggctctcgacgttcttctgcgcgttttcaatggcgttggagagcatcttggcatcgatgggcgtgtcctcgtcgataccgagcgagttcatcatattcatgatgcgctcagagccgaacaggcgcatgatgtcatcctcgagcgacagatagaagcgcgtttcgccggggtcgccctgacggccggcacggccgcggagctgattgtcgatccggcgggactcgtggcgctccgtgccgacgatgaacaggccgccggcctcgcgcacgcgcgcggcctcctcggcgatctcggccttgtgctgcgccagcagctgcttgtagctctcgcgcacggcaaggatctcgggattttccgtctcggcataggaattggcctctgccaccagctcgtccggcaggccctgcttgcgcaggtcggacagtgccatgtattcggcattgccgcctagcatgatatccgtgccgcggcctgccatgttcgtggagatcgtcacggcgccgaacttaccggcctgcgccacgatctcggcctcgcgctcatggtgcttggcgttcagcacggtgtgcggcacgccctcgcgcttgaggagcttcgagagatactcggacttttcaatggagatggtgccgaccagcacgggctggcccttggcgtggcagtccttgatctgctggatgacggcgcggaacttgcccgcctccgtcttatagacgacgtcgttgtgatcgacgcggataacgggcctgttcgtcggaatttcgacgatgtcgagcttgtagatggcggagaattcctcctcctcggtcatggccgtgccggtcatgccggagagcttggcgtacaggcggaagaaattctggaacgtgatggtcgcaagcgtcttgttctcgctggcgacggacacgccctccttggcctcgatggcctgatgcaggccctcgttatagcggcggccgtacatcaggcggccggtgaattcatcgacgatgatgacctggccgtccttgacgacatagtcgatatcgcgcttcatgacgccgcgggccttcatggcctgattgatgtggtgcacgagcgtcgtgttctccacatcggacagattctccacgccgaaatacttttcggccttggcgatgccgctggccgtgagcgagacggtgcgggacttctcctcgacgtagtaatcgcagtcgaggtcgtcctgaatttccttctcgtccgtcgtggcaaacaccttgcggcgcaggccggagacgaagaaatcggccatttcatagagctttgtcgattcctcgcccttgccggagatgatgagcggcgtacgggcctcatcgatgaggatggagtcgacctcgtcgacgatgacgaagttatggccgcgctggaccatgtccttcttataaagggccatgttgtcgcgcagatagtcaaagccgagctcattgttcgtgcagtaggtgatatcggcagcataggcggcgcggcgctcgtccggcttgagatcgtggacaatcaggccgaccgtgaggccgaggaagcgatagaccttccccatccattccgagtcgcgcttggccagatagtcgttgaccgtgacgatgtgcacgccctttcccgtcagggcattgagataggcaggcaggatggcgaccagcgttttgccttcgccggtcttcatctccgcgatgcggccctgatgcagcacgatgccgccgatgagctgcacgcggtacggccgcatgccgagcacgcggtccgccgcctcgcggcagacggcaaatgcctcgggcaggaggtcgtcgaggtcctcgccgccctgatagcgcttgcggaactcgtccgtcttttcacgcagctgctcgtccgtcagcgccttcatctcgtcctccatggactcgatgcgcgtgacgagcggcataagcttctttacttcacgctccgagcgggtgccgaagattttttgaatgattcccataggatgcaagacctttccgtcggattttcatccgaaattatatcacaatcccccacataagaaaagtaaaatgcggggaaagaaacagaaaattcacattccggcggccggttttaccgattcaaccgccggttgcttgataaaaccgctgttccatgctaaaacaggctcacgacctgcacaccggctcgtcgaaggtgatgacggtataatatttccggtcctcctgctgcacgcgcgcgtcaatgcgatgcttgagctctgcctgcttcccgacgagggaatacgggatgacaaggtcgaagatcaggttcgtgtgctgcgcgccgcgcaccatgcggaagtcgtgcagcgtcagctccgggtcaatggcgcggatcgtttcctgcacaaaggtgcgcatgtggttgagctcagcgtcgtccgtcacgatgggatcatagtggatgacaaggtgcacccgcagctcccgcagggcgtcgcgctcgatatcgtcgaggacgtcgtggcacagcagcgggtcctcgcggctgtccatctcggcatgcacgctggcaaagcactggccgggaccgtaatcgtgcaccatgaggtcatggatgccgaggatcttctcatgcgacaggatgagccgggagatggactgcaccagctcctcgctcgcgggctcgccgagcagcgggctgatggtatccttcgccgcggaccagccggaccagaggatgaacagcgccacgagcaggccgatccagccgtccacctgccagtgtagcacatggccgagcacgcagccgatgagcacggccgccgtagtgatcacatcattacggctgtcctgcgccgtggcgcgcagggcggtcgagccgatgcgtcggctcagtccgccgcagaacagcgccatccacagcttcacaagaatggaagcgccgaggacggcaaagctcagagccgaaaacgccaccggctcgggatgtaggattttttcgaaggatgagcgcgccagctccgcgccgacgagcaggatcagcacggagacgaacaggccggaaaggtattccatgcgcgcatggccgaacggatgctcctcatccgcaggccgctccgccaggcggaagcccagcagcgtcacgagcgaggaagcggcgtccgagagattgttcaggccgtccgccgtaatggacaccgcgccggacagcgtgcccgccagcagcttgcccgccgacagcagcacattgcacacgatgccgacgatcccggccagctttccgtagcgggcgcgcacggcgggatcctccgtgttccggtagtccttgacaaacaggcgcagcagcaattgcgtcaaatccatcgctctcctttcaggccatgccgttatctgtttattatacggaactttgtggaaaaagtatatctttttttgcaggaaccttgcaattcttcggatctatgatacgatatgattttaaggaagagggaggagcggagaaatggagaaacaggatgtattcacgcaggcgcttctgcgcgccatggacgccgccgagcaggaggtgggcgtccgccagccgcggctgcgccgggccgtggagcagtacggcggcatttccgccgtgcaggagctctgccgccgcgggcaggtctcggatggcttcgaccggctggccgagcttggaaagctcgcgctgtccgccgaggcgctggccgtttcggcaaaattcaacgcctgctttacggacgatgaggtcaatcactgctttgcgcagctctgcgctgccaattactttggaaaggcccgcttttaacgacagatcgaaaaaaccgatggatcggcggaaaatacccggcatccgccgcaaggagctccctcagggtttcccaaaaacagggacgctctggcgggattatcaagagcggatggtgagagatttttcgtcgagtcgaggtttggaaagcgcagatgtactttgtgtacctcaagctttccagaccgatggatcggcggaaaatacccggcatccgccgcagaggatcccgtcagagtttcccaaaaaggaaaggagttttatgaagcaaattttacgatatctgaagccatatctcgggaagctgctcgccgcgacggtgcttattgcgctgtcgacgctgtgcgatctgctgctgccgacgtggatgtccgccattctgaacggcggcatcgccgcgcgcgatttcccggccatcgccgtgcgctgcctgcagatgctggccattgcggccgtcagcctcgccagcattctcggcgggacgcggctgtcgaccgaggtcgtcgcctgcttctgcgccgacctgcgcgcggacgtgttccgcaaggtcaacacgctctcatttgaagagttcggctcactcggcacggccgcgctcgtcacgcgcgccacgcacgatgtcgacaccgtgtcgtgggtcgcctccatgctctccggcacggtcgcaacgatcccgatgctgttcctcggcggcgtggtgctggccatgcgtaaggatgtcgtgctctcgctcgtgctgctggcctttgttccgctgctgacgctcatcgtcgtgctgctgggcaagcgcgtgctgccgctgtggggcaagtccgacgactacatcgacgtgcagaacgccctgctgcgcgagcgcctgcgcggcatccgcgtcatccgcgcgttcaacacggaaaagcgcgagcacggccgcattgcggacgccacgcatatcatggcggagaacatcatccgtgccaacgtgtccatgggcctgctcacgccgcttgccacgctgtttctgaacatctccgccctgctcatcatctatctcggcggctggcgaatggttcacggggtcagcggcgtcagcgcgggcgacattttcgccatcatccagtatgtcacgatggtcatgaacggtgtcatcatggcctcgttcgccatcatcatgtacccgcgcgcgcaggtcgccgccgggcgcatccatcaggtcctcggcgcggagggcatgggcgatcccatggccggtgaaagtgccgagctgcacggcgagatcgagctgcaggacgtcagcttttcctacggcggctctgcggatgccatcagccacgtctccctgcacattctgccggggcagcgcatctccgtcatcggcggcaccggcagcggcaagagcacgctgatgcacctgctgctcggcttccgcgcgccgacgcaggggcgcatcctctttgacgggcgcgatgccgccgggctcagcaagcacaccctgcgccgcggcatcagcagcgtcctgcagggcgcggccatctactccggcaccatcggtgagaacatccgcatgggcgaccccgatgcggatgatgccgccgtcacggaggccgcgcgcatcgcccagctttcggacttcatcgcctcgtgcgagggcggcctgtcctacgagatccggcaggcgggcaaaaacctctccggcggccagaagcagcgccttgccatcgcgcgtgccatcatcaaggacgcgcccatctacatctttgatgacagcttctccgcactggacttcctgacggagaaaaacctgcgcacagctctgaaccggcgcattgccgggcgcacacagatcgtcgtgacgcagcgcatcacctccgccatgagcgcagactgcatcttcgtcatggacggcggctgcctcgtcgacagcggcacgcacgacgagctgctggcgtgctgccgcatctaccgtgagatctatgcctcgcagacgggaggtgacctccagtgaaacagccgaaaaaggaacatatcatccgccgcctgctctgggaggcccgcccgatctggaagtggctcctgctcgccgcgctgctgtgcatcggcgtgatcgtctgcggcgtgctcggcccgaagctgctcggcggcctcatcgaccggctgtatgcctggtgggacggctccgaccgcagcgacttgctggccggtctcctgcgccccatgggctggctcgcgctggtctaccttggctacagcctgttcagctatgtcaagatgcagctgctcaaccgggtcgtcagccgctacttcacctgtgagctgcgcatccgcatctcggataaaattcgccgcctgcccgtgagctatgtggatcagacgcccgtcggcgacattctctcgcgcatgatggacgacgtgtccaccatgggaaactacgttcaccagatcatcgacacgctcatgaccggctttttcatgatcctggccatcgccgtcatgatgctgctggaggactggcggctggctgccatcgtccttgtgctcaccccggcctccatcctgctgtcgacgctcctgtcctcccgcagtgaaaagcacttctacagcatgttcacggagtccggcaacctcaacgccgtgacggaggaggcctttacgaactttgccacgacaaaagcctataacctcgaggattacacggagcagcgccatgccgagctgaacgagcgccgccgcaaggccgagacacgggccaatttcacctcgtccatcgtccggccgctcatcgccttcacgaatgcgctggcctacatcgccatctgcctgttcggcggctggctcatcgtccgcaatgagagcgtgtccgtcggcatcgtcgtgacgatcctgctgtatgccaagcagttctccggcccgctggagcaaatcgcaggcggccttggcgacctgcagcacgccaaggcggccgcccgccgcgtgttcaagctgctcgacctgccggaggagccgcaggcggacggcgcgctccccgcccccgcgaagggcgacgtccgctttgagcatgtctcgttctcctatgacccggccgtgccgctcattgaagacctgaaccttgccgtccgccccggccagaacgtcgccatcgtcggcccgaccggcgcaggcaagacgacgatcgtcaatctgctcatgcgcttctatgacctgaatgccgggcacatcctgctcgacggcaccgactgcgcctcgctgtcgcgcgaggaggtccgcagccagttcgccatggtgctgcaggacacctggctgttccgcggaacgattgcggaaaacgtctcctacggcacgccgggggccacgcgcgagcagatcgtcgaggcctgcgaccgcgcgtactgcgaccacttcatccgcacgctgccgcagggctatgacaccgttgtcggcgacgacatgacgaacctctccggcggtcagaagcagctactgaccattgcccgcgccatgctggcaaaccgccgcctgctgattctggacgaagcgacctccaacgtcgacacgcgcacggaaattttgctgcagaaggccatggaccgcctgatgaagggccgtacctgctttgttatcgcccatcgcctgtccaccatcgtcgactccgacctcatccttgtgctcgaccacggccatatcgtcgagcagggcacgcacacggagctgctggcccgccgcggcttctattaccagctctatacgagccagtatgccatttgagttcaaacgcaaaaaaaggatccccgagaccgcccggcctcggggatttttgcaagcctgaagcggcgctccctgagcgccttgtacgggaacattcaatggcaggaggg

SEQ ID NO: 11207 - DNA, 1085 bp, Unknown
  gut microbiota DNA sequence
gatcgtgcgcaggtcgcgcgcaacgggctgctgctgcagcaggagcttcatacacaggctctcgatctcgcgctccttgtggtcgatctcgcgctccagcgcggccgccttttcggcgctttgcttgtccgtttcatttttcagcgtgtgcatggaagcggagatcgcgtcctcgcacagcgcgcccatttcaatcagtttccggttgagcagctccagctgctcgtcaaagcggatgcgcatcagccaaacctccccgtgatgtaatcttcggtgcgacggtcctgcggcatggagaagatctgctccgtcgggccgaattcgaccatatcgcccagcaggaaaaacgccgttttgtccgagatgcgggcggcctgctgcatattgtgcgtgaccataacaatagtataatcctttttcagctccatggcaagctcttcgatgcgcgaagtggagatcgggtcgagagcgctcgtcggctcgtccatcagcaggacctccggctccacggcaagcgcacgcgcgatgcacaggcgctgctgctggccgccggacatgccgagggcgctctttttcaggcggtccttgacctcgtcccagatggcggcaccgcgcagcgatttttcgacgatctcgtcgagcttcacgcgggagcggatgccgtgggtgcgcgggccataggccacgttgtcataaatgctcatggggaagggattcggcttctggaagaccatgccgacgcgcttgcgcagcaggttcacgtccattttgcgggagaaaatatcctcgccgtccagcgtgacggtgccctcgatgcggcagccctccacgaggtcgttcatgcggttgagagacttgagcagcgtcgacttgccgcagccggacgggccgatgaaggccgtgatctcattggcgggcaggcggaggttgatgtccttcagcgcctgaaagctgccgtaccagagattgaggtgctcgattacgatcttatcctgttccatatgggaactccttcctgttgcgctcactgcgtgcgccgggcaattcgctttgccgcggcgccggacagcgcgttgatgccgatg

SEQ ID NO: 11208 - DNA, 179 bp, Unknown
  gut microbiota DNA sequence
actgcatattattgaaaattacgggatattttctgtaaaaatattgacaaaaaagttaaggggtgatatgctggatttaccggaagggaatacttgtcaaacgttcaattggaacggaagggaaggagaaaatacccatgaaaaacccgagatattggaaattactggctttcacgatt

SEQ ID NO: 11209 - DNA, 3467 bp, Unknown
  gut microbiota DNA sequence
gggcacttcctcgcgctgcgcgctcagggcgccacgtcggcctgcggcctcctcgcaatgacaaacctggggcattgcacggtcggcggaggcgcgcagaaatatgcaactgccataggcgctcaacccccgtaaaggggacgccgcatccgtaaggcggcaaagccgccaacggctgcgcagtgaccgccgctacagacacaattggttcctgccattgtatcgatacccggcacgaatcgccggtgcagcgccgggagcggcatgccgctcccctacaacgcacgactggaggcaggcgttcttattcgccctcggtcaccccgtaataggcctcataggcctcgcggagctcgccggtcgtgacgtccggcccgatgacgagccatgcggacgtcgcgtccgggtcatattccgccgggaggaactccagcgacagcatgatgcgggacgttgtgttgaattcgcgaagcaggcccgtcacggtccactgcgtgccgtcggcctccatcgtgccggtcagcatgccctgcgtgcaggtgtaggtgtcgttgagcttgttggtcacgacgctgccctccaccgtgcaggcgtagtccctgccgccgatgtacagcgtgaccgtgcacgtcgcttctccatcctccacgcggctctcatagttcacggttccgacgggcaggaagccgtcctgctcctcgcccgtggccgccgtgtccgggaagaccgtctgcagcgtttccggcgacgagagggcccagagcgtttcatcgcgcatgttgtcggggtccggctcgctccaccatgcgcaggcagacagcaggaccagagcaaagactgtgagcagggatacgagttttttcatggtacgtcatcctttctgaacagttttggcatccttgtatgtaggggcggggacagccgggcccggcgacgcacttgcagcgcgtacaagccatcgttaaaatggaaccggctcccaagcttgtcattgcgaggccccgaaggggccgtggcaatctcgcagtaccatgccggatcacagggaagctccggcgaaatcgcaactgcctgcccgagattgcaccccaagggcacttcctcgcgctgcgcgctcagggcgccacgtcggccttcggcctcctcgcaatgacaaatcggaagccatcgccattgtatcatacccggcacgaatcggggacgtgtcacggggcgtcgaggacgccgccccctacaacgcacgaccggcggcttcccgtaattttgcctgcccggttttgcgggaaagccccctcctcagtcctcgtccgggagcttgttgtgcttctgctgcctcatccagatatccatcacgagcttatgcggcagcagcttcacgagccgcacctgccagcgcacgggcaggccgtggatggagacgtccttcttcgtgcggtacaggtcgtgcagggccgtcttcatcacgtccttcgcctcgtacagccggttgtaatatgtcacggcgtcgttgctcgtctgcagcgcgtggtcaaagaattccgtcttgacccagccggggctgacggccatcacgcggatgccgcgcggccgcagctcacgcgccagcgagcgcgtatagctcagcacaaaggccttcgtcgaggcgtagacattcagatacggcacgggctggaacgcggacagggagtccaggttcagcagcttcgcgccgcgcttcatgtaaggcagcgtcagctccgtcatggccacaagggccttgcagttcaggtcgatcatcttcagggagtctgccagcgggatctggtcgtagcggccgaatttgccgaagcccgcgacgtttgccagcaggccgacgtccggccgggcgttttccagcaggtcgcggtagagctccagcgcctgcgggtctgtcagatcgaggctgatgggccgcacggggaaggggacctgctccttcagagcctccagacggtcggcgcggcgggcgatgacccacagctcatcaaaggcctcccactgggccagctgcagcgcaagctcccggcccatgccggagcttgctccggtcagaattgcgatccgtttcatagaatcaaccctttcagttcgtttcttatcttctacataccacaaaaccccgcctctgtcaagaaaaaccggggaaaatcggagaaaattcggaggaaattgccatgcaggttatcgatctcggcgcgtggacgccgtatctggagcaggagctgcgcgccccgtatttcgcggcgctgctgcagcgggtcggggcggcgcgggccgccggaacggtctatccgccggaggagcgcacgttcttcgccctgaccgccacgccgccggagcgcgtgcgggccgtcatcctcgggcaggacccctatcacgagccggggcaggccatgggccttgcgttctccgtcccgcagggtgagcgcctgccgccgtcgctgcgcaatattttcatggagctgcatacggacctcggcctgccgcagccgtccggcggcgacctgacgccgtgggcggagcggggcgtcctgctgctcaacacggtcctgaccgtcggccgcggcgcggcgaacagccacgcggcgtggggctggcagcgcttcacggatgccgtgcttgccgccatggccgccctgccgcagccggtggccttcgtcctctggggcgcgcaggcgcagaaaaagcggccgctgctgcagagcgccgccccgcgccttgtcctgtgcgccccgcacccaagcccgctatcgtcctaccgcggcttcttcggcagccgcccgttctcgcagatcaatgcctttttgcaggagaacggagaacagccggtcgattggcggctgccttgacatataatatgatatgcaggaaaacggatcattgaaaatggacagtggatagttacgcgcgaagcagccagtcgcacgctgtaggggccgggctgtcccctcccggcgcaacgctgccgatacgaacgggctaccgttaaaacggtatgcacttccgaattgtcattgcgaggaggccgcaggccgacgtggcaatctcgggaaggcccttgcagtccgtacaggctgccgataataacgtaaaaaccgattgcgtctgtagcggcggtcactgcgcagccgttggcggctctgccgccttacggatgcggcgtgccctttacgggtagtgaccgccatgggcagttgcaaatttccgtgcactcccgccgaccgcacacgccaatgtaggggagcggcatgccgctcccggcgcaacgctgccgatacgaatggactaccgttaaaacggtatgcacttccgaattgtcattgcgaggaggccgcaggccgacgtggcaatctcgggaaggcacttgcagtccgtacaggctgccgataataacgtaaaaaccgattgcgtctgtagcggcggtcactgcgcagccgttggcggctctg

SEQ ID NO: 11210 - DNA, 2385 bp, Unknown
  gut microbiota DNA sequence
tcccgcggttctattctgccctcctgcggcatatagattctgcgggagggattaccatgcagacaaaattccgcctgagcgtgcgttggctgtgctttgccgtgctgctggcggccgttgtggtgcgcctggcggcgcagccggggctgcgggcacatctggcctccgtcgccgcgccgacgcaggccgccgaggatgctccggagcccgcgcaggacggcagctggccgacgctgtgctatgagccgccgtcgcacgacgcgccggacctgcctgccgtgacgatcgataaccgctccggcctgccgctggagccggacgcgctgccggaggcggctctcgcgctcgatcgcgcgcaggaggggccgctcgtcctcatcatccatacccacgccacggaggcctataccggcagcccggatttccattccacggacccggaaaagagcgtcgtccgcgtcggacaggccattgccgacgcactgaacgcccgcggcatcccggccgtgcacgagacgtcactcatcgacctcgggaattataacgacgcctacccgcgcatggccgggctggcggaggactggctggcgcgctacccgtccatccagatggtgctggacgttcaccgcgactcgctcgagacggacgacggcgcacagctggccctgcgtgcggacgtggacggggaggcctgtgcgaagcttctgcttgtcatgggctcgaacggttccgggctggagcatccgggctggcggcagaatctggccaacgccgcccacctgcaggccctgtgcgagcagcgcgcgcccggcctcatgcgcgatttgctgctgcgcgcctcgcgctataaccagcatctcacgccgcggtccatgctgctggaggtcggcacggccggaaattcgctcgaggaggccctgcgcagcgcggatattttctcgcaggtgcttgccgactgtctgctcggtaaggcgtgaccgcaaggatttatccgaaatttaacagttctttgatagaggaaacggcgcatttccggtataaaagaggggcggtcagatgaccgtaatacgattcaggagtgaaagaacatgaagaagatccttgccatcctctgcgccgtcctgatgctcgcgtccctcgccgctgcagccagcgcagaagaagctccccagaccacgaccatcaccacgacggtcccctcgacctacgtcctcacgatccccgcgaccgtggagatcccctacggcgagaagaacgccaccatcggcagcgtgaaggtcaccggccgtattacgaacgaccagtatgtcaaggtcactgctgagaccacgacgaacttctgcctcgtgaacgacagcgactcctccgcgcgcatcagctatcgcccggaggacatcttcgcctccgccgtcaacggttccgcgcccattttccgcggcagagacttctcggccaaggaagtcaacggcaacggcggcagctgcctcgttgtcgcccgcatcagcgactatgcctgggagcatgctgctgccggtacttactccgacaccatcaccttcacggcctctctggaaacggccaacgccgcgggctgagtccgcgctgaacgggaaggagagcgtaacggatgaaaaagaacgcaaagcttgccgcgctggcgattctggtgcttgccgccgtggccgcgctgtccgtcggcatcacgctggcggtcgtgaacgcgcggatgcctgccgcctgcacctgcggcgggcagtgccgttcggccgggacggaaacggcggctgccggggatgcgccgtccgcgcagcagacagagccgtccgaagcggattccatctccattcccggcttcgatttcctgagcctgcaggcgggcacgcaggagcagagcatgccgctctataaccccgagaacaatgcctgctatttccgcatctccctgctgctggacggcgaggcgctctggcgctccgacctgcttgcaccggggcagaccgccccgcagcagatgctgagccgggctctcgcggccggggagtacagcgcggtcctcaagtatgagtgctttgccgatgaggcggagaccgtgccgctcaacggctccgagatcgccctcaccctgcgcgtgcagtaaaaaattgcagaaaaaaagcaaagaccgcaatggtctttgcttttttacgatatttttataaaattacacgaagatgtgatcctgcggcgtgcagctcccggatttgtcattgcaaggaggccgcaggccgacgtggcaatctcgtgcaggcactgctgccttgtaccaactgccgttaaaacggaaacagccgaaaaatggggtgtagcggcggtcagtgaccgccttgcagacttgtaggtttggtg

SEQ ID NO: 11211 - DNA, 1314 bp, Unknown
  gut microbiota DNA sequence
ctgcagacacaattgcgcaccctctatcggctaatctcgctgaattcagtggtgtttttcgaacaaaatgcagtgattttccccacttgatttctctttcacctgtgctataatgttagcggtaaaactctgcggcggcgcattttcgggaagaaaacaccgtgccccgcaacgatagcggcatgcggcccttccactgcccgcactgccgaaaatacaaaaaaggagtgttttcacaatggctctcgttaccagtaccgagatgttcaagaaggcctatgccggcggctacgccatcggcgccttcaacgtcaacaacatggagatcgtgcagggcatcaccgaggcctgcggcgagctgaaggcccccgtcatcctgcaggtttccaagggcgcgcgcgcctatgctaaccacacctatctggtgaagctggtcgaggctgccgtcatcgagaacccggatatccccatcgtcctgcatctggatcacggccccgacttcgagacctgcaagagctgcatcgacggcggcttcacctccgtcatgatcgacggctcctcccacagcttcgaggacaacatcgccctgacccgcaaggtcgtcgagtatgcccatgaccacggcgtcgtcgtcgaaggcgagctcggcaccctggccggcatcgaggacgaggtcagccacgcagtcggctcctacacccgtccggaagaggtcgaggaattcgtcaccaagaccggcgtcgactctctggccatcgccatcggcaccagccacggcgcttataagttcaagccggagcagtgcacccgcaatgccgacggcattctcgtgccgcctcccctccgcttcgacatcctcgaagaggtctcccgccgtctgccgggcttcccgatcgtcctgcacggctcttcctccgtgccccaggagtatgtgaagatgatcaacgagaacggcggcaacatgcccaacgccatcggcgtgccggaagaggagctgcgccatgccgctcagctgtccgtctgcaagatcaacatcgattccgacctgcgtctggccatgaccggcacgatccgcgcctacttcaacgagcatccggatcacttcgacccgcgccagtacctcaagcccgcccgcgccaacatcaaggccctcgtcgagcataagctcaaggacgtcctcggctgcgccggtaaggcctgatcgaacccaaaaaatctccgggactgcaaatcgcagccccggatttttggctctatgttcaatagttggggtagaggcaaaaaacaaataattgtaagtcgtgtcggagattg

SEQ ID NO: 11212 - DNA, 8267 bp, Unknown
  gut microbiota DNA sequence
tctatttcaccgcttaccatacaaagcgcatgcttccgttcggaggctttattcatcctgtccagatagtaatcgcggaagagtgccatcaatttcttatttttccagcatgcaggttcttcttcgccgcatgcattaattcgccacctgattatactctttttcttcttctcataatcagagccatctttgcacaggtagcagccctttaagtcatcgatcactgtgccactctcaacataggtacgcacggctctcaaaaatggatgagagtactttgactcttcccaatcatgcagccagtgtaggtactgctcgtgtgcttcttgcaacttctgcggcgctttatcgtcaggggcaatatacatcagcctatcacaaagcggatgcgctgtaaaccccgtacttgtccgcccatcagattcctccgtcaccgggatcagaattttgggttccttcttatcgactttgcgcgcggctaggaactttccctgtgcattcaatgtgatctcaatgtttgcgcttgtcagaatgtggccgatcggcgcaagcggctcatgcccgtcccggtacacgccgatcagggcggtattggcatcatacgtctcgatagctcgctgcagcagtcccattatgttccctcctcaaattcctgcaggccggagaaattgttcagtttctccccgaagggcttgatattcattggaccgatcgttttatactgcgggcactgctccggcggcaggaacgtgatcacgccgtgcttcatcaccggattccagaagcggacggtcattttcccgctggtctcctcggaataggcctcatcggcataagtgatgccatggtacatcaggccaaaggcaagctccggcgtttcatcataagcgcccgtcccctcgccgaagacgcacggctccacatagccctgacattcccgcgttcccaagaagatgtcccggcgtcctcctttgcggatcatcttctttgcgatctcatggtgcttgttctcattgcggtccgccgccagctccggccggttctcgttccattcaaaatgggcgcggacctgatagcagcagtctttcagataagtatagtagctgagatcatttcctcccgaatacttgatcgggcggattccctttgtctccatctggataggatgcatcacgcgcacggcatcgatgacccagatgatcgtcggcttccaatagacagactgcaggatgcccttgagcgcctcataggtcggcacctgatagctgcacttttctccgccgacacgcaggatggggtccgagaacagggcatagtcccccgttacctgaaactccacgatgttgtcgtaccttgtgtttttcaagctgcttacacctccataaatccctgttttttctggtcgcgaatgagtccgaccgtatcatcataaaagccgtccgccagaacccagacacagccgccgcaggcgggaaacagcgcgttttcctgttccagccgttttttctgatgggaatacaggctcaccgtgaagccgtttgcctctttcagcagcgcggcacgatatgccgggtccactctgcaccgttcggagcacagttctgtgatgagctgctttcccctgccatacgggacgatcacatccgtcgtgttctcgtcaaatacggagaattcctgccctgcggttttcagtgcctgccacaggacgaagccctcgacatcggtacagtcctcatcggcatatttttcattggtccccatcaggtcaaagagtgtcgttcccagctggtcaaccggatagtcctgcgcttcctccgccatgtcgcgatacaaagctcgatagtaatagcggatcgcgtcagaggaaaacaggtcgcctgcaaagcgctccggttccgtgcggaacgcctccagcaattcaagcgttgcggtcttgccccgttggatatcccgcagatgccccagcgtttcatcggcgcagttcacggcatacaccgggcgcggcgcactcgatgcgccgccgcgattgcaccgtccggccgcctgcacgatgctgtccataccagccgtcaggcgcagaacggcatcgaaggagatgtctacacccgcctcgatcacctgcgtggcaacgcaaaggaccctttcgcgctgcgcaagcgctttctgcagggacaccagcaccacccgacggtgctgcatacacattccggccgacaggtggaagctgcgatagtccggcgagcgcgtctcttccagcagataggccgcctcgtttttcttgttgcacacgacaagcaggctttcggtctcctccattttctcacggatcagctccgggagctcctccagacgacggtccggcaagccgtgcagctccgtccggcggaaggctgcccagagttctgcatcccacggcacgatctcctgcggctgtaccggcagcgggtgggcagcgtccttcagctctggctgcgttgctgagcacagcacgatcgttgcgccgcactgctcgctcagaaaccggatcgcaaggttaaacagggtcagcatcttgacgggcacggtctgcacctcatcaataacgatcacactgctgcagagagcctgaaagcgacggatcgccgtcgttcttccatcgaacagtgtgttcagcagttggaccagtgtcgtgatgatgatcggcgcattccagctttgcaccagaagctcccgctcgtccagctcgccctgcgcaggctctgtctgcacaacgttggaatgatgctccaggatcaggctgtcgtcgccgacatactgatggatgacggctgcattctgttccaggatcgacagcagcggagaagtgaagatcaaccggcttttccggaaatacattgcatgcgccagcgcataccgcagggagctgagcgtcttgccgccgcccgtcgggacattcagccgatagatccccggcttgttttcggcgaacacacggcactgatctgagatcgcatgccgggctttttccaccggcgtgccgcatgggaatccctgcagcttttcttccagatattccaatcgatctttccagattggagccatatcctccggccaaactcgcggatgtgcatcgatctggaaggccgccgtgtcgcagcggtctccctcgatcactgcggacaggagcagccttgcgagcaggcctgtttcaaaagcgtactcgcgatcgttatcataggtcctgtccatgcgaccaatgacttcgttgatctcctccgaagccgctgcaaaaagtgtttcgatctcctcagtcggtatttcctgccggaaggcagcgaccgcttcctcataggagatgtcctgcttttcggcgcgatattgcaggccgatgcgccgcatttggtccacgcagtcgaataatccgtggtgcgcaccgactgcaaaggcaagcagctctgcacaggaaatggtttggatgtccccgcgatggtattgctccatcaggtaacggcagccctgaaacgtgtggatcacgctgccgcgcttcgtgctgtctccctcgtccagatactgctggaaagcctctgtgtatttacctaaatcgtggagcagccctgccagatagcccgcatgctccaggccgacctgccgcaggcactgcacggcccgctgcgccgttcccaccaaatgctcccgcaccgtctgcgtgacgatcgctccgtccggcatctcgcgcttgtgcgcatagaattccatgctcctcacctgcctttcgcttatctgctctcatcatacatcatccgctgtccaataaattggactctgcccaaaaaattcaacatttttctctcttttttcaaatatccgcaaagcccactattctttccttcattatatctcatatttcggcataattcaacaatcatatgacgtttttctgaacattaattcgacagtttgacgaacccccaccattctctgccgctgtttcgcgtaattttcccccggcggcacgcggggcttgacgggagcggctcaaaatgataaaatatctttgtttcagaatgcagatatgccgctgtggtggaataggcagacacaagggacttaaaatccctcgccctaaaaagcgtaccggttcgaccccggtcagcggcaccaaaaaaggcacgccggtcggataccgaggtatcagcggcgcgccttttctatttgattggagaaatatgagatggacattcgggaatacagggaatacaaggccgaggatgtcctgcgcctctacgccagcgtcggctggacggcctacacggacgacccggcagcgctggagcgcggcttccgccattcgctgctggttctggccgcgtgggaggacggcgagctggccgggctgatccgcgcagtcggcgacggcgcgacgatcgtgttcattcaggatattctggtcgcgccggagcggcagcgccgcgggatcggcacagccctgctgcgcgccgtgcttgagcgattcaacggcgtgcggcagatcgagctgacgacggacgacacgccggagacggccgcattttaccgctcgctcggctttgccgactttgccgacctcggctgccggggcttcatgctggattagaatataaggcaacaccgcacaattcagcaagagcatttagcgcgagattttttgtcgaggcaaggtttgaaacgtgcagatgtactctgtgtacccgcaaggggcatgccgcatccgtagggcggcaaagccgccaacggctgcgcaatacctcaaacttttcgaaccgacggatcggcgaaaaatatccggcaaaggccgaagctgcaattgtgcggcgctgccataaattgacccgccgcagggaaccctgcagcgggcttttgttatttacgcgttatggggactcagttcgcgtaggcacgccagaggaacgtcacggcgtgagcacgctggcagagcgtatccggctcaaagtgcgtctcatccatgcccttgacaatgccgttctctacgccccaggcaactgcctgcgcatagtaggcattggccgggacatcggcaaacgtcgtgccgcttgcctgcggcatgcccttcgcgcgccacaggaacgtcagcgcctgcgcgcggctgcaggccgtatccggctcaaagtgcgtctcatccatgcccttgacgatgccgttctcgacaccccagaggactgcgtcatagtagtaggcagaggcatcgacatcaacgaacggattggtcgtcgtcttcggctgcggcataccgtttgcacgccacaggaacgtcagcgcctgcgcacgggtgcagaccgtctccggctcgaagtgcatctcatccatgcccttgacgacgccgttttccacgccccagagaaccgcgtcatagaagtagtccttctcggccacgtcgacgaacggattgcggatgcgccagcccgcgtagaccgtcgtgtcggcctcgagcgtcaggcttgtgataggctgcgtcagcgcggcgtcgagataccagccggtgaagtcatagccctcgcgctccgtcacataggcgctcaggtccagggcagtaccgacgggcagctccacgcgctccacaacggaaccgccgttggagacaaagctcaggacggcattatgcaccgtctcgatggtgaattccacccttgtctccgcactgacacagttgccgcggacggcgacggcgcgcacgacggcggactgctccagcgtgaacgggccggtgtagagcgtgccgttcagaggatcggagccgtcaagcgtgtagtagatcgcagcgtcggcagaggccgccgtgatggtcacggtctgcgcctcggcgtagctgccgccgtccggcgtgatgaccggtgcctcgggcgcctgcgggtcaagctcgagcgccggagcgttcttctgccggacctcgccgtccaggatccagctgtccaccgtcaggctgccgtccgcacgcagcttgatgctgtagcgggtgacgccgtcctgcagggcggaacgcagctcgtggtcctcgcactggttttcgttgagcaggtcgcggaacgtctcgctgcgcagctccgcgccggtcatggcggccgtgttgcgcacaacgccggtcgagcccatggtcacgttcgtgccgatgtcctttgcaggcgtcacgacgctgttgccgctgcgctgctcctgctcgctgttgaagtagccgtaattcacggtgccgatggccgtgttgcggcccgcgatgccgccgatgtcgcccgtggcgttcttcgacgtgagcttcatgtcggaatagttgttgcccgcaacacccgcctgcataccggcgatgccgccgatggtcgcagcgttcacgcctgcatcggcatagatgctgcccatggcgtagctgttggccaggatcgagaagccgtccagaccgacgatgccgcctgccagcgcactgccgctgacggagaccgtcgtcaggtcgacatgggcgctgcagttcaggatcacgctgtcatagctctgacccacgataccgccgaccgtgctccagtccttggaggacgcggagaccgtgccggagacggcgcagttcgtgatgagcgcgcctgcgccggtctcggacttatccataacaccggcgacgatgcccgcatagatgcggacgctgtccgtgcgcttgatattgatctgtgcattttcgatggcgacgttgcggatgatcgcgccgtcggcataggcgaacagaccggctgcgacatagtccgcaggcgtctcctccgtgccgatgcgcaggccgagaatcttgtggttctgtccgtcgaaaataccgctgaaacagtgcgctccggcattgcctgccgggacccatttgcggcccgcgagatcgatatccgccgtcaggacgatgtattccccggcaaaatgctcttcctcattcacggctgccgcaaaggcacgcagctgatcggccgttgcgatgcggtacggatcggccttcgtgccgctgccgccgtcgaagatcgcggtgggatcggcaggatcataggtcgaggtatcgccgagcagggcgcggttcagggcgaccttcagcgcggacttcagggtgctgtcgtccgccgtgtcgctgtcggcgcgttcgactgtctggctgctgaccacggcggcgaggatctcctcggcatggtcggcgtcgaagtccttcggggtgacgatctcggcggagacgatcttgccgtccttcacgacgatgcggacaatgacatgctccgcctcatcgcggccgtagtacacgccgtcctgataggcatattcgggcgtcgggtccggcttttccacggggacataggtgatgcccgccgcgccgccgcgcgggaccgccttgccgtcgacgaccgtccagcgcaggagcgggaccgtcagctcggccgggacgaccgggaatgcggcaaagttctcattcagggccgcggccagagcggcaggctccagcgtcatggccgtgacattgtagataaacgcaccgtcaagcagatcgccgtcctcgttgtagccggacggaacgaccgtgccgaaggcgaccggcggatcgaggcgctgatcctcgatggtcagggccgcatcctctgcatagtagctgtcatagctctcgctgatggccgtggccatgccgccgagcgcgccgacaaacttcgtccacgtcttggacgtcagcgtgcagtcgctgtagcagttcacaagcgtaccggcctggcagcctgcgatgccgccgaggtagctcacgccgctgtcgtccacggtgcggtccgtggccgcggtcagcgtgccggtcgaataggagtttgcgatgatgccgaaggcgttcatggccgtaatgccgcccgcctcggcgtttgccgtcttgcagtaggcgtcgagcgtgacatccgcgccgcagttgtagatttcgctgcgctggctgtagccgatgaggccgcccgcaaagctgctgtttgcaaagctgccgttttcggtgcggacctgcaccgtgcccgccgcataacagcggtcgatgagcgcaaggtcgctgcagcctgccagcagaccggctgacaccgtctgctcgcccgtgacatagatgctgccctccacgcggaggtcctcgacggaagcaccgtccatcagggccgcaaacaggccatagtatgttctggtcgtgtcggaaaccggcgcatccgccgtgccgatgctcatgccggaaatggtgtggccacggccgtcaaagtggccgcggaagg

SEQ ID NO: 11213 - DNA, 1372 bp, Unknown
  gut microbiota DNA sequence
tcctttcttcgtttcggatggtttccatccatagcgttatcctccgtttcgatttgaatttttgaatgatccaaatcggacggagggctgcggcagcctacgctgccacgcaaaaggcacagatatagcaaaacgcacctgcaaagcggcagaagccgcaaagcaagtgcgtttaattcattattataatggccgtgcagttcagcatcaaggaatgagtagaaatcaagttgaataattgatgcaagcgatggatcaagcgcccgatgcttttgccatgctttcaggataatcctcattgtccggtcacagcagcgaaagcatctatcaaatcggcatcatgtttttgctatacaccgcaaggtgacaaccattttacggatttccgtagccatatccttgaagacataagacttcaagtcaccaaaatgggctctaaactgcaagcgaatcttttggtatatggcactgtcggtcattttccttgtgcaaataggtgatgcaacggatcagtgaatcaacttaccgtctttcatctttagtagcacatcggctacctctgctactgcgggatcgtgggtgacaatgataacacagcgatttccctcatgggccagcccttgcagaataccaacaatgtttcggctgttttcactgtccaaattgccggtaggttcgtctgccagaataagctcactgcctgaggttagcgcgcgggcgatagccactcgctgctgctctcctccggagagcatattgggaaaccgcttgaactgatcctccttcaacccaacttgcagaagtttttctgctgcgagctcatccgcttttttctttggcattttgcggacatacaggggataggcggcgttctccaacacggtcaggtgttgaaacaagttgaaattctggtaaatcacggacacatggttcagccggtaagaatcacggttcattttcgccgtggattctccgtctaattcgatcgtgccggaggtcggcacatccagtcctgcaagcaacgatagaaatgtagtcttcccgctgccggaaggccctacaatggcataaacatgcccctgttgaaaagtgcaactgacaccattcacagcccttactgtctggactgcatttctatattcgtatgtaacttgtttggaagtcaggatattcatattcaatcctccaccttcatgagattcataacatttatgcttgtgatccgaagtgctgcaaccgcggaaccgagtaaaaatatacctgtcatcagcgcagcatgaagcaatgcacttgtctgtatttcgccttccagaagaatgccaccagctataccgaagaatgcacctgtaaaagcgagaatagaaagttctcc

SEQ ID NO: 11214 - DNA, 23903 bp, Unknown
  gut microbiota DNA sequence
cccgagcgtcgcgatcagtgcccaaacgattggatgatccatattccacctcccgtttccattgtatgcagcagaggcggatttgcgtgaaagcgcaaaagaaccgctgaggtttccctcagcggcgcgctgccgaaaagcccattgggctttccggcaaagggctcgcagtccgctgcgcgcacggatcgtccgccgagagcaggcgatccgcacactggcggactgggcggtattttctccgacgtacaggccgccaatgatctcacttccttcgccgcctgcgggcggcgaactctgcgaggcatgatcggacaaactgagccgctgaggtttccctcagcggcgcgctgccaaaagcccattgggctttccggcaaagggctcgcagtccgctgcgcgcacggatcgtccgccgggagcaggcgatccgcacactggcggactgggcggtattttctccgacgtacatgccgccggagaaaatgatctcacttccttcgccgcctgcgggcggcgaactctgcgaggcatgatcggacaaactgagccgctgaggtttccctcagcggctcaagatgcaatatgcaggaattagttctcagcagtctcgatgacgacgccggaaccgacggtacgaccaccttcacggatagcgaagcggaggcccttctcgatagcgatcggggtgatcagctcgacatccatgtcgatgttgtcgccaggcatgcacatctcaacaccctcggggaggctgatgatgccggtgacgtcggtggtacggaaatagaactgcggacgatagttgttgaagaacggggtatgacggccgccttcttccttggacaggacatagacctggccgcggaacttggtgtgcggatggatggagcccggcttgcagaggacctggccacgctcgatgctcttcttgtcaacgccgcggagcagagcgccgatgttgtcgccggcttctgcgtagtccagcagcttgtggaacatttcgatatcggtgacgacggtggacttcttctcttccatcaggccaacgatctcgaccggctcgttcttcttgacgataccacgctcgacacgaccggtggcgacggtgccgcggccggagatggtgaagacgtcctcgaccggcatcaggaagggcatgtcagccttgcggtccggggtcgggatatagtcgtcaacagcgtccatgagctccttgatggaggcataggcggggtcgttggggtcgttgctctcgcaagtcagagcctgcagagcggagcccttgatgatggggacatcgtcgcccgggaactcgtagtaagacagggtctcgcggacttccatctcgacgagctcgagcagctcctcgtcatcgacctgatcgcacttgttcaggtaaacaacgatagcgggaacgccgacctgacgggccagcagcaggtgctccttcgtctgggccatggggccgtcggaagcagcgataaccaggatagcgccgtccatctgagcagcgccggtgatcatgttcttgatatagtcggcgtggcccgggcagtcgacgtgagcatagtgacgcttctcggtctcgtactcaacgtgagcggtgttgattgtgataccacgagccttctcttccggagccttatcgatggaatcataggcctcgaactgagctctgccctggagggacagccacttggtgatggcagcggtcagcgtggtcttgccgtggtcaacatggccgatggtgccgatgttaacatgaggcttagttctttcaaatttctgctttgccattgaaaaatcctcctgtttgattcgtaaatggtaaaaactttatattcgcttacttacactatacaccaaaaggtgtgcaatagcaagcattttttacttggagctgcgtttttctacgatttcctgctgaatagacttcggcagttcgacgtagtggctcggctccatggaatactgtccacggccctgcgtgcggctgcggagatcggttgcatagccgaacatctgcgacagaggcacgttggcatccacctgcgtggagccgtttctcgggatcatgccgaggatgttgccgcggcgggcagagatatcgccgataacatcgcccatatactcttccggcacgataacgctgaccttcatgatcggctcgaggatgaccggctgcgccttgcggcaggcctccttgaaggccatggaaccagcgatcttaaaggccatctcagaggagtcgacctcatggtaggagccgtcatacagcgtgaccttaacgtccacgacgggatagcctgccagaacaccggcctgcatcgcgccctggataccggcgtcgaccgcgggaatgtattccttcgggatggcgccgccgacaatggcattgatgaactcatagcccttgccggactcgttcggctcgagcttgatcttgacgtgaccatactggcccttaccgccggactgacgggcatacttcatatcgacgtctgccttgcccttcacggtttccttgtaagcgacctgcggtgcgccgacattggcctcgaccttgaactcgcgcagcaggcgatcgacgatgatctccagatgcagctcgcccataccggcaatgatggtctgacccgtctcttcgtcggtgtaggtcttaaacgtcgggtcctcctcggccagcttcatcagggcgatgcccatcttctcctgaccggccttggtcttcggctcgatggccacgcggataacgggctcggggaattccatggactcgaggatgatcggatgcttctcatcgcagaacgtgtcgccggtcgtggtgttcttcacaccgaccgcggcggcgatatcgccggcatagaccgtgtcgatatcctcgcggtgattggcgtgcatctgcaggatgcggcccagacgctcgcgggtgcccttcgtggagttcagaacggtcgagcccttgtcgaggctgccggaataaacgcggaagaagcacagcttgccgacatacgggtcggtcgcgatcttgaaggccagagcggagaacggtgcgttgtcgtccgccgggcggaagtcctcttcgtcagtcttcgggttcacaccggcgatgcccttcttgtcgaggggagacggcatgaagtcgacgatggcgtcgagcaattcctgaacgcccttgttcttataggaggtgccgcaggtcacgggcaccatctgcacggcgatggtcgccttgcggatggcagcgcggatcatgtcctcgggcacttcctcgccgctgaggtagagctccatgatggcgtcatcctgatcggagacggcatcgagcagcttctcgtggtattcctgcgcaagctcggtcaggtcctcggggatcttctcctcgcggacatccttgcccagctcatcgtagaagacaaaggccttcatgcggatcaggtcgaccacgccgcggaaatcggactccgcaccaatggggagctgaatggggacggcgttacacttcagccgttcatgcatcatgttgagaacattgtagaaattcgcacccatgatgtccatcttattgatatacaccatgcgcgggacatgatacttgtcggcctgacgccagacggtctccgtctggggctccacgccgccctttgcgcacagcaccgtcacagcaccgtcgagcacgcgcagggaacgctcgacctcaaccgtgaagtcaacgtggcccggggtgtcgatgatgttgatgcggcagtgacgccagaagcaggtcgttgcagcggatgtgatggtgatgccgcgctcctgctcctgctccatccagtccatggtagccgtgccctcgtgggtctcaccgatcttgtaggtgcggccggtgtagaacaggatacgctcggtcgtggtggttttgccggcgtcgatgtgcgccatgataccaatatttcttgtattctcaagcgagtattttctcggcattgggtaactcctttgatttgtttaccagcggaaatgggagaatgccttgttcgcttctgccatcttgtgggtatcttcgcgcttcttcacagaggcgccggtgttgttgcaggcgtccatgatctcgccggcgaggcgctctttcatggtcttctcgctgcgcttgcgggaataagcagtcagccagcgcaggccgagcgtctgacggcgctccgggcgaacctccagaggaacctgataggttgcgccgcccacgcggcgggacttgatttccagggaaggcatgatgttttccatagcctgctggaaagcgtccagaccgttcttgccggtcttggtctcgacgatctggaatgcgtcatagacgacgcgctgggcaacgcccttcttgccgtcgagcatgacgctgttgacgagcttagtcaccagagtggaattatagacaggatccggaaggacctctctcttgggaacattacctcttctgggcacttcgcttccctccttcataaaaaaatgatttcataggtacttcaatagcccttgctactgttggtgccgtgccagagattcccaaaaacgtattttcaagaacatcatggcaaggcgggatgccttgcggcacgggggattacttcttcttggccttcggacgcttctgaccgtacttggaacgggcctgcatacggccattcacaccctgggtatcgagcgtaccgcggatgatgtggtaacgcacgccggggaggtccttgacacggccgccgcggatcagaacgacggagtgctcctgcaggttgtggccgacgccggggatataagcggacacttcgtagccgttcgtcaggcggacacgcgcgatcttacgcagagcggagttcggcttcttcggggtggtggttctgactgcggtgcagacgcctctcttctggggagaagacaggtcggtggcacggttcttcagggtgttgaggcccttctgcagtgcaggtgcggtggacttgtaggtcgcctgctctctgccctttctgaccagctgattaaaagtaggcatgatgttctcctttcttgcaaaaatctgctgctttgcagcgtttatcttatcccggaatatctggaaatattccgcagataacgagatcagatgaccccggcagcggtagccgccacggaaatgccgcaggcctgcccgagctgacgggcggacgcagccgtctcgaccgggataccggcgagcgtgcatgcctcgcggatggggtcagtcagcgcgggatccgcatcgtccgcaaggaagaccttgcgcactctgccgtcggcaagtgcccggcggagctgcttgactccgacgatccgcgctgcatagttgagttcttcgagcaccgttttacacctccggattgctcggtttgcatgctcacgcaatcatgaattatagcagaatgaagcgaaatagtcaatcttttttgcacgttttgccggaattttttctgaagtccggagaaaattcacttttcttccgtctgttccgcgggctcttccaccatttcgcccaaaaactcgcgtaattccgcggcaattttgcacaccggcacatggaggcacgccggaaaatcgcagtccgcagcaccgtcgtccgtgtcggccatcacaacgcgcgacgcatcgagcgcgcggcagtagccggaaaagcactgttccatccgatttttctcctttcccgcgcagccgttttcgattcccgcttgtaaaaaccgggtggctgcattataataaaaccagatctgaggatctgataaaaagcatcgacagacaggaggcgcgccatgctggcactctggatcctgctggggctgtgtgcattcgttgcgctgctcctgctgcttccgctgcatatctatcttgcctttacgccggaggcggggttttcgttttacgcccgctatgcgttcctgaccatccgcccggacggcgagccgaacgaaaagctcatggagcagatcttcacgctgctcggcctgcgcgacgtcagcagcacggccaacgcgcgcagcgccgtctcggccaagggcgtttccgccacgctgtgtgagctcggcgccgtgctgcgcaccctgctcgggcgcgtattctggctgctgcatcgcggcacgttccgccgtttttccctgcatatcgccgtcggcgcgggcgatcccgccgatgcggcgctggactacggcatggtgtgcgcggcgctgtatcccgtgctcgggctgctgcagtccgctatccgtttccgcaggccggacgtcgccgtgacctgcacggaggagccgcagacgaacgtcgaattttccgcaaaattctcgcttcgcgccattctcatcgtgcgggccttcttccatctgctggcggagaacgtccgcaataccttataaataaggaggagcgtcatgaaagagcttctgaaagtattggaattcaccgccgaccgcacgcaggcccttgcggattcgcagtccgttgcgggcgaaccgctgcacgtcggcgacgtcacgctcattcccgtcagcagcatctcctgcggctttgcaggcggcgggagtgatctgcccgcacgcacgcgcaatgacgccgccgcggcaggcagcggcgcaagactggcaaagacgccggtcgccttcctggccgtgtgcgggcaggaggtgcaggtgctgacgctcgagcagcccgcaaaggaagaaaaatcgctgctggcgcagcttgccccgctggccgaaaaggtccggcaggccgccgcggaaaagaaggcggccaaggccgaagaaccgcttccggcaaaggccgggaagaagaaaaaataaagcagcagcgcaggaacgcgaattcccgccctgaccgaatattctgctgccagcgcaaagttgccggtgccttcccgagattgccacggccccttacggggcctcgcaatgacaaatttgatagtctttgggtagtattgtgggcggcagatgccgcccatgtttttctgttttttagaggttgaggcccttttgtaaattcacaacgaagtcctgcacattcgtcacgatgccgcgggcggacaggctgccgcggtcggccagcttgttcaccacaaattccgacacgtcgacgcagtagaaatacacctgccgcaccgtgccgtccggcagcacacggaacgagggcgtcatgttgcccgtggcgatggtgtggagcatcgtcgccatgctgatgacggtcgttgcgctgcggatctggtcgcgcatggcgttctgcgccgcatagacgtcgccgtagaccggaggcagcgggccgtcgtcgcggatggagccgccgagcacatagggaacgccgcacttttcgcagctgtagatgatgccgtcgtggatgttttcgttttggatgaaatttgcgatgctgccgtgatagcgcacgcggttgatggtgtcgagatggtgataatggccgttcggcacggagcgctgcgtgtagatatcctgcccgagcgccgtcttaaggtaggccgcctccaggtcgtgcgtggccagcgcattgcccgccagaatggcgtgaacatagccgttttcgatcagcttggccatggccgcgcgggcgtcatggtcaaaggcgaaggccgggcccatgacccagacgatcttgccgtggtcacgctcgtggcgcagcaggtcatacagctcgtcatagtcgcgggagaaggccgtctcacgcgagcggttctggcggaaggcaaacgtctccttttccttctcctcctcgcggaagccgttcgggtgcacatagatgccgtccgtggcatcctcggtccggccggtgaacaccaggtcgcccttgcgcagcaggcggaactcgcggacgataatgcggccgttttcatacacggcaacgcagtccatgcggctttcctctgcaaggagccactggccgttcaccttgaaatactcggggaaaatgctcatggcgtggtaatgctccggcgcaacgccgtcaaacggggcgggcacgcagacggcatccggcgcgttccggaagcgctgctcggaaaaatcaggcggaaaataaggtctgagctggaacatggtcttgtcccccttggtattagtaatttgttgctcggatgagcatagtataccggattccgcggcaggtttcaagagggcaaatcgcgggcagttgcgaagtccggcttcctgtggtatactaatttgaaatgattcgacaaaaacagggaggtgctgcgcatggaggcgcaaaagggcggaaagcggcggctcgtgctcggcatttttgctcaggtggacgccgggaagaccacgctttccgaggcgctgctctacaagaccggcgcgctgcgcacgcttggccgcgtcgatcacggcgacgcccatctcgacacgcacgagctggagcgggcgcgcggtatcacgattttttccaagcaggcgcgctttgaaacggagcatctcgccgtcaccctgctcgacacgccgggccatgccgattttgcgccggaggccgagcgcgtcatgcccgtcatcgactgcgcgctgctgctcgtcagcggcacggacggcgtgcagggccacacgctgacgctctggcggctgctgcagcactacggcgtgcccgtcgtcctgttcttcaataaaatggacctgcccggcgcagaccgcgccgccctgctggccgatgcgcgcaccgcgctcagcgaccgctgtgccgcgctggacgacgccgagtccgtcgccctcagctccgaagccctgctggagcactttctgaacaccggcgcattggatgacgcccttgccgccggcgccgtggcaaagcgggagctgtttccctgcctgttcggctcggcgcggcagcttgacggcatcgacgagctgctgcaggcgctggagcgtcttgcgcccgtgcctgtctatcccgcggagctttcggcccgcgtctatcagatcgcccacgatccgcagggcaatcgcctgacgtttctgaaggtcacgggcggcacgctttccgtccgctccgccgtgcgctgccatcgcccggacggcgagccgctggaggcgaaggtcacacagctgcgcctgtattccggcgcggaatttgaagccgtgcagcaggtcccggccggagacgtctgcgccgcgctcggcctgagcggcctgctggccggggatacgctcggcgatgccgccccggaccgcggcgcggcgctggagcccgtgatgagctactgcatccgtctgcccgccgacctcgacccgcagctggcgctgccgaagctccgcctgctcgaggaggaggagccgcagctgcgcatggtctgggatgcccgcctgcgcgaaattcgcgtgcagctcatgggcgcggtgcagctggagatcctgcagagcctcatccgcatgcgcttcggctgggacgtcacgttcgacaccggccgcatctcctaccgcgagaccatcgccgcgcccgtcgaaggcgtcggccactttgagccgctgcggcactatgccgaggtccacctgatcctcgctcccctgccgcagggcagcggtctcgtattcgacaccgtctgcagcgaggacgtgctcgatcggaactggcagcgcctcatcctgacgcatctgcaggaaaagcagcacctcggcgtgctgaccggctcccccgtcacggacctgcgcatcacgctggccgccgggcgcgcccatctgaagcacacggagggcggcgacttccggcaggcgacctaccgcgccgtgcggcagggcctgatgaaggctgagagcatcctgcttgagccgtattacgccttccggctgaccgttccgcccgagcagatcggccgggccatttctgacatccgcgccaaaagcggcagctttgatcccccggtcgaaacgccgggcggcacgctgctgcagggccgcgcgcccgtctccgagcttcgcgactacgcgcgggatgtggccgcctatacccgcggccgcgggcggctgagctgcgaggtcgcaggctattttccctgccataacaccgaggccgtcgtggctgcgctggcctatgatccggcggccgaccttgaaaatacgccggattccgttttctgctcccacggcgcgggcatcaccatcccgtgggatcaggtcgaggagaacatgcaccttgaatctgtcctgcggccgaagcccgcagccgcgcccgccgctgcgccgcgcgtccgcacacagaacctcgatctggacgaaaaggagctgcagcgcatcatcgagcgggaattcggcccgcagaagacgccgctgtaccggccgcccgccgccaaggccgaggcagccgtcaccctgccgccccgccggaaagaatacctcatcgtagacggctacaacatgatctttgcgtgggacgggctgcgtgagcaggcgggatatgatctcagcggcgcacgcgagcgcctgctggaccttctgagcaattactgcggcttccacccctgcgaactcatcgtcgtgttcgacagctaccgcgtcaggggcggcaccggctcccgcagcagccacaataatctgcgcgtcgtctacacgcaggaggatgagagcgccgacctctatatcgaaacgctcgtcggcaagatcggcaaaaactacgccgtccgcgtagcgacgtccgacgcgctcatccagctctccgccctgcgcagcggcgtgctgcgcgtctccgccgcagagctggagcgcgagctcgagcggacaaacggcgagatcgccgccgttctgcgccgtctgcgcgaggaggcccgccacgcggccgggcaggaaagcccgctgcgcgccctcgatccaaaatcaaatcccgacaaggaggaaccgatatgaaacagatcacactcggcacgaccggcatcaccgttccgcaaaacgcctttggcgccctgcccatccagcgcgtgagcgcggatgaggccgtccgcctgctccgccgcgcccgcgagggcggcatgcgcttcttcgacacggcccgcgcctatacggacagcgaggaaaagctcggtcttgccttcggcgggcactgggacggcctgtatgtcgccacgaagaccgccgccaagacgcccgaggccctccgggccgatctggagacgtccctgcgcctgctgcagcgcgactacatcgatatctaccaattccacatggccggtcagtgctaccgtcccggtgacggcaccggcatgtacgaggccatgctcgaggcaaaggcgcagggcaagatccgccatatcggcatcacggcgcacaagatcggcgttgcagaggacatcatcgcctccggtctctatgaaacgctgcaatatcccttcagctatctctctacgccgcgcgaggccgcgctggccgagagctgccgcaaagcgaacatgggcctgatcgccatgaaagcgctggcaggcggcctcgtcacgaacgccggcgccgcctttgcctacatcgcgcagtatgacaacgtgcttcccatctggggcatccagcgcccggaggagctggagcagtggctcggcttcttccggactcccgcctcgctgacgccggagctgcgcagctttatcgagaaggagcgcggagagctgaccggcgaattctgccgcggctgcggctactgcctgccctgcccggccgggatccagatcaaccagtgcgcgcgcatctccctgatgatccgccgcgcgccgtccgagagctggctggcccccgccatgcaggccgaaatggagaagatcgagcactgcctcggctgtggccagtgcaagagccgctgtccctatgagctggacacgcccaatctgctcaagcgcaatctggcggactaccgccgcattctggcgggagaggtcagcacggactcctatctccgccccgcacagaaataaaccggcagccccgaaaatttggtggcggcatgccgaacatttcggccgttttcccgtcaaatcgttgtacatcggcgcggagacatcgaaaaattcacaaaaccgcaaaacttcccatatttactccgcatgccggatgtgctagaatgtaggaaaaatgtccaaaaggaggaatgcgccatcaaacgcaacgagaccgatccccgcgatcggcaatacgaaccggatccttccgagcaggcgcagaaacgccggaaaaaggcgaaaaaaccgaaccgtggtctgcgtgtggccgccgtgctgctgacgatcgtcctggcactggagggtctttactgctttgtggtcttcacggatatcccggcgatcaaatcgctccgtgaggcctatattgagaccgccatgaacacgctctcccaccagtggcttgccaaatggttcctgccttcctatatgatcgacgaggtcgtagcccgtcaggatcaggcccgcaaggatcaggagggcaagatcagtacctgggacaagatctccgcctcggatgccacagacaagaacggtgagaccgtcgccccgacggagccgacgtcccagacggacgaggagcgcttctatgagctgttctgggagctggaccgcatttcgtttgaggactacgtcagcgcccatcccgatgtgactgccaacggctgggacaacatctatatcaatgaagccggtctgaatgacgacggcaccgatatctacaccgccatgggcgagcgggtgctcgccgtcgacgcaaagaacaagatcctgctcgtccgcgtggagggcagcggctatcagggtgtgctcgccatcgccaaggacccttcgcagctgtataacgcgccttccgcctatatcggcagctggggccagcagctcgaggccatcgcctcagcgcacgacgccgtgctcggcatgacgggcagcggcttcatcgatccagacggcaacggctccggcggtgagctcgcgggctatgccatgtcgcagggtgagagctacggcgagcactatgtcgtcaccggctacaagcgcgtcgagctgcgcgagagcaacctgctctacgtcacggacgcctccgcaccggtcgcagccgacacgacggacgccgtggaattctggcccgccctcgttgtggacggcgaacccgccgtggagaactacgaggccttcaacggcatccagccgcgcgcctgcatcggtcagtccgaaaagaaggagatcctcatgctcgtcatcgagggccgcatgccgacccgctcctacggcacgacgatcgagacctgcaccgacattctcatgcgccacaaggcctatcaggccctgaatctggacggcggcacgagcgccgttctgtggtacgacggcgagtatgtgacgaagtgctccaacaccagcatcacgtcccgcatgctgccgaacgcctggctctacggcggcgatggcgcaggccaataatatttcgggtcccattctgctgcatgccccgcgcatgcagcagttttttcggcttttgtggaatttgtccggggaaaccgtgccgcatggcggcattttgtccggaagcctgtcgaaatccacgttgacattccgcaagaatatcggtataatacggttagaatccgcgagttgcgttttgctgcggacttcccgctgcccggcgggaaaatcgtcatttttttgcgcctgcccgcagacgcaagcaaacaatggaaaggatttttgcaatgatttacacgactgaagtacagcatatgtgcccggttgcaaagggtgcataccatggcccggcgcccattcctgaggaaggcaagtgggtccaggcgaaggagatcagcgacatttccggctttacgcatggtgtcggctggtgcgcgccgcagcagggcgcctgcaagctcaccctcaacgtgaagaacggcgtcatcgaggaagctctcgtcgagaccatcggctgctccggcatgacgcattccgccgccatggcttctgagatcctcatcggcaagaccatcctcgaagctctgaacaccgacctcgtctgcgacgccatcaacaccgccatgcgtgagctgttcctgcagatcgtctacggccgcacccagagcgcgttctccgagaacggcctgtccgtcggcgcttccatggaagacctcggcaagggcctgcgcagccaggtcggcacgatgttcgccacgaaggcgaagggcccgcgctatctggagatggccgagggctatgtcacccgcgtcgcgctcaacaagctcgacgagatcgtcggctacgaattcatcaacctcggcaagatgatggacttcatcaagaagggtgatgagcccgccacggcaatggagaaggccaagggtcactacggccagttcgacaacgccgcgaagtacatcgacccgcgtcaggaataagaggaggagcgcaccatggctttgtttgaaagttacgaaagaagaatcgacaagatcaacggcgttcttgcgcagtatggcatcggctccgtcgaggagtgccgcgagctgtgcaaggcgaagggcttcgatccgtatgagatcgtcaagggcatccagcccatctgcttcgagaacgcctgctgggcttacaccgtcggcgcagccatcgcgctgaagtccggtgtcaccaccgccgccgaagccgccaagaagatcggcgaaggcctgcagtccttctgcattgacggctccgtcgccgaagaccgcaaggtcggccttggccacggcaacctcggcgccatgctgctgagcgaggagtccaagtgcttcgcgttcctggccggtcacgagtcctttgccgccgccgaaggcgcaatcggcatcgtccgcaacgccaacaaggcgcgcaagaccccgctgcgcgtcatcctgaacggcctcggcaaggatgccgctcagatcatctcccgcatcaacggcttcacctatgtgcagacaaagttcgactactacaccggcgagctgaagatcgtcaacgagatccgctactccgagggtgagcgcgccgatgtccgctgctacggcgctgacgacgtccgcgagggcgttgccatcatgcatcacgagggtgtcgatgtctccatcaccggcaattccacgaacccgacccgcttccagcacccggtcgcaggcacctacaagaaggagtgcatcgagcagggcaagaagtacttctccgtcgcttccggcggcggcacgggccgtacgctgcatccggataacatggccgccggtcccgcttcctacggcatgaccgataccatgggccgcatgcattccgatgcacagtttgcaggctcctcctccgtcccggctcacgtcgagatgatgggcttcctgggcatgggcaacaaccccatggtcggcgctaccgtcgccgtcgcggttgctgtcgaagaggcactcaagaagtaatttgtttcttccccgctcccatgggtaatgtggcgaaccgccaccggtggttcgcttcgatcccttccgaaatgctgtcccagcatttctctcccatggtcggtgctaccgtcgccgtcgcggttgctgtcgaagaggcgctcaagaagtaatactgattcctgattaaaacatttcatcaggaatcccgtgtgctacgcacactcgcatcgtgctgacgcacgctgcgccgtctcatgcagaatctgacgcgccctcggcgctataaaaagcttttaaagctttttatcagattctagtataagatcgtcaaaacagcatttatcgtcgctcctgatccgtgcggtcaggagcgatttttttcgcaaagcgtaaaattcggcgcaggtccgcagcagtacttccgtcataaagtatgacaatgatatggtttttctgaatttctgcataacgcttgatttccgttcttttcactgatatactgggtgcagagatatccccatataacgacaaggaggtcccaacatgaaacgcacgctccgcatttttctgtttgccgccatccttgcggcatttctgatgggctgttcgcccctactgccggtctccccgagcggtgagacggccgttccctccgagccttccgtcccgcctgcaacgaccgcgccgacggaggagcccgcgccgacgttcgacgacagcgtgctcggcgaggcttacacgaacgaaggcacgttcaccgacgcctggggctccgactggagctattctctgcatgtgccccgcctgctgctggactcgcccgcggcagaggagctgaattcgaagatccatcgggacctgtccggcatcatcagcagcatggagacggctatcgagcagagcacacccgccgagctgtgcagcgttcgctgggagcgggtctggacggacagcatcgtttcgctggccgtcatcgtcgaatacgccgaggggacctcgcactactacatctaccacttcgactgtgccaacagcatcgagcttgattccgcgcatatgctgcggcgcctcggcatctccatggacgactataccgcagccgtccgccgtgcggccgcgcaggcattcgaccgccagtatgccgggatcgatcctgcgctcggcggcggggcagcctatctgctgcagctgcgcgccatgacggtcgcggccgccgggaacagcgatcccgtcccctttctgccgaatgaggacggctcgctgcgtatcttcccttccatcggctccatcgccggggcaggatggtatatgacgcccctgacggtctcgttcggctccgcagagaccgggaccggagcgcccatccagtccaattccagtgatgtctgggctgccattacgctcgacgggaccgggctgcaggtctccttcgaaagctccgggaaaaactatcctgtttccggctgctatgccgactacaccgccctgctggctgccaacatcgggccggacacctatgtgtttgccctcacggcaggcggcttcgtcgaggccgtgaatatgacggcctgttcccgctttgagacattctgcagtatgggtccgctctacggtctttccggcatcacatcactggaggcgggaaacggcacagcctatgccgtggacgcaggcggcgcaaaacatgacctcctgccgctggtgcagagcgtggagagcggtttttccgccatcctctccggcgcttgggaggcgaaccgggacggcgatgcattccgcctccgcttcggtgaaggcggaacctgcacattggaggaagcgcggcagggcagccgcgttacctcgaccggcgcgcttaccgtgctcggcatgggagacggcggcctcctctgcacctgctctctgacgcagccggatggcaatgagctcacggccatctggtcgatcgagccatccttcggctctttacagctctgtgccttctccggcgaggatgtgctggacatcggcgcggatgtgctccggtttgaaccggcgcaggaatgaacccaaaaatacgcgccgcggggctttcgctccgcggcgctgcattggttgcccaagtcaaaacctccggccaagccggaggttttgactgtcttattcctgcttcattgcctcccgctctgcaccgtagcggcacacgagcgacagcacgagaaacatcacgcccaacgcaagcatgcccccgtccgctacgatcatcccggccagccgctccggcataaacttcgcggagaacgccgcggacaacgcgacccgcagcaccatcgtggcaggcgaaatgcacaggatcaggatgccgagccgtttctgctccgccgccccgcgcagggtaaacggcgtctgcgcctccagcgcatgcgcaaaatgctgccgggcgaagtacgccagcaccgcagagccagcgcagccgatcagatcaccggcgcatatcaacagcgcacctgtctggctggcatacccggtaaacaggtccgggcgggtattccaccagagcagcgccgccagaatgaggaaggcactgcatccgcaggcgatgaggtcaaaaatccatgcgatcctgctgagaattcgtccggcatttgtcacttttgcgatcgtccgttccgtcttgtccatgacacgctccccaatctttattatttgtggtttacgctttggatctcctgcagcgcaaagcgctcattctgctgcacgtcggggtacttttcccggtctaccgggctgagaaacatggcaagcggccggatccacaggctgccgtcgccgtagagcttgcgatagatgacatagggctcgccggtctccgaatgctgcgcgacgccctccacaaggtagtagtctcccttaaaatggcggtatacccgcccgatttgaatgtcctgcatggtcttccctcccgttttacagttccacaaacaaaatgccgctctcccctgccggggcttcgcagacgatcctgccgcctgagaaacaggccgcgccgcccgttgccgcgtccggtgcagccggatcgacgcagaacggattcacatacagcaccgggcagccgcagcgcgaggcctgtgcggcatattcgagcttgacctgttcgttccactccgccgccgggtaatcgcaccagaccggccagagcacggcatccgcgccgagcgctgccaactcctccggcctgccaggcgtccagaggtcgccgcacagcgccgtggcgaagcgtatgccgccgtaggaaaacaggtggaagccatcgccctcgcggtaatgcccgtccgtacggcgcacgtccttccagccgacgctcacgcggcggaacacgtcgatgagccgcccgtccgcgccgaggaagacctgactgctgtaaagcccatctgccgcgcgctcgatcatgccgaacgacaccgccgcgccgttttcccgcgccgcggcctgcagatgccgcaccggctcgtccgtccatgcggccgccacggtgcagtcgcgcgcatagtcccagcgcaggcagtcaaagccctgcaggaccgattcgccgaatacgaccgtatctgctctcccgctgcaggcgcggagtacatcctccatgcaccgcacgttccatgccacatcgccgtttcttaccggctgcgaggccagcgccagtctcatgctcccacctcctgcctcccagcataccagaattcaggcgcttgtgcaagccctaaaaacaaaaaggagcaagccggccggcttgctccgaactggagcagggtacgggagtcgaacccgcctcagcggcttgggaagccgctgtactaccgatgtacgaaccctgcatggtaatagatattatagcagatgcagcccggaattgcaatcctcattttgaaatgttttcccgggaggatgaaaaaggatttgcaataccgggcaaaatctgttataatattccggaacatgagagaaacgaggttgagaatgtggcgcagaaaatttccaattccgtgttaaaacgcctgccggtctatctgtcctacctgaaatcgctgccggaagacgcgccggaaaacatctccgccacaacgctggcagccgcactgaacatgggcgaggtgcaggtccgcaaggacctcgcgctggtctcggacggcggccgccccaagatcggctatcagcgccttggtctggtcgaggatatcgagcagttcctcggatatgataatacgaacgacgccgtgctcatcggcgcgggtaagctcggccgcgcgcttctgggctacagcggcttttcggaatacggcctgaatatcgtcgcagcctttgactccgacgcctccgtcgccggaacggacgccagcggcaagcccgtccttccgctctccgcgctggaggacctgtgcagccgccggaagatcctcatcggcatcctgacagtcccggccgccgccgcgcagggcgtgtgcgacctgctgatccgcaacggcatcaaggccatctggaacttcgcgccgacgcacctcgatgtcccgccgcagatcctcgtccagaacgaaaacatggcgacctcgctcgccgttctctccaagcatctttccgcgcagatgaagggatactgatccctgcgcggtcagactatatcggccggtgtgttggaattggcagacgaggcggactcaaaatccgttgggctaataacccgtgcgggttcgacccccgccaccggcaccaccccttaaaggcttgcaaacccttgatataactgggtttgcgggctttttctattgcgttgtcagccttatgtatcgatccctctcacagcggaaaccggccatttcaggtcagttttcggctgcttttcggagggacatcggagggatgttcgaccattacagcgatgggtacacacccatgatcgcattggcggatgccactttcgaggtgaaatgcaagtgcgtatagatgttggaagtcgtcgcaatattgtgctgttcgttctgccggggctgctgttcctgtttgaccggctgatcatccggccgaaaaaatggacaggaatcagactgtcgaaaaacctgcccaggcggaaattacggagggaaggatcgtgtgaagggaaaccgtcagggtgtccttttgcgttccataacccgccgcagcggcaaaactgcaatgcggcaggcaaaacccgcgccacgaactccggattgacatccggcgcagaatcgtttattctgtttgcagagatgcggacttccggcgttttttcgacattttgggaaaaagctgtccgttttgcgtttctggtgaaatataggagtagaggggccattgaccggcctgaaaagaggtggtatccatggacatcctgtccggcgaagaggcaagcagccttcgtcagttctttctatgcacattcgttgacacatcctgcgattattttcaggaccggatcgcgcacatgaggcagttctccgacgggcttcgctacacgggttacctgtgggattgcatgctcgatcgggaaccggtctcctgtcactatctcatcagtcaactgcaggcgttgacaggaccgttctacgtcttttgggacatccattcctgcgacaggatttttattccgaattattggaaatatccgatcgacgctgttctgcgcgctgcgcctgacgaaattccggacacgctgcaaacgctgccggaggactgctatttctttgatgattccctgtcgtgggccatggcgaccacacacgaggagctgaagccgggcaaacgtctgtgctatctggcggcagcgcggaatgtattacgaagctaacgaaaccggaaaggtggtagagctgctttgtgtacgacaagccttgtgatcatgcgaaatgcacatgccggagcttttatacggagaatatgagagatgagtattgccgcgtgaacttcgattgcgcgaatgcccttctggagttgccgtttgtctctgttggaagcgaagaccttgcctttgagattttcgatggccatgacacaacaaatatgggaacttttatgagccttgaatcaccgtcttgcgaaaatcagccgtccaggattccgcttcgctcttgctttgtgattttgcggcatgccatttcgctatgcctgccctatgctcagtcggcagaagtctatttgactgacagccccagtacggagatggatttccaaaatatttctattccagccagcagagtctgcactcttctggagaaagcgtatgccaaagtaccagtctggtgcccttttgtgcccgatctgcatatttctgtgatggcggatgagcctgcgggcttgggctgaaaaagtaggcaggagaatactgaagtctttattcttggcaagcacacaacagaaaaggagatacatcatatgcgaaacaaccatgcagcgatattccgtcgttcccttctcctgatgttcgccgccgtcctcctttccgcttgtcttttcggaggatgcagcacggaggacgcagccattgtccggcagggcatgccgctcgcggagctgaaagaagctgccgataagattctgctcgacgccccgacctgctgcatcgtacagatcggcgatacgattgcggccgtcagcacaagcggaacaacggcagagcatttcgccctgtttgacagcggcaccggtgccatgcgtcgctgcagtggcctcgctctggcatcctccaacgcagagctgacccaattgatcggcacagaggcagaacacgcacccgaggcactatccgcaacagaattcgatctcggaaacggacgctatatccccgcctacctgacagagaatgcaaagctgattacactggaatgtgaaaacgaagtcatccgcgatatctgtgtaacgagcctgatcgatgaaaccgtgcagcggtacggagaatgtgaaagcgtccggctcattccggcatgatatcagctacgaagaattgctggaggctttccgtacggcagtgcagctgcgggaggcaggccgctcctcaatctgatgcagccggatgcgccgatgctgccctgctcccaaaaaatgaaatccactggaaaaggaagtgctgtttatgcgtcaatcaaggctttgccgtgtatttctcaccgtggctatgatcaccgtcattgcagttctagccctgagcggctgccgcgcgcaacctgcgccgctccaggatgcgcttgcagattatgaaaaggtcctcaaaaccgatggactggacggtctgcggctcagcgtgtattatatcgacccgtccatccttacgcgttccccgctgacggaggaacaactgctttcgttcgagtcggttcaaaaatttgaagtggacaatgcacagcttctgcagcacatcgagctgctgaaaacgataaatgcagaggaactgacgccggtttcgaacccttctgcattgaatgcacgtctgtgctgtatctttgaatcagattatgccgggcaggtcctgcagctgacgctcggaggcgaagccaacagcatttttgtaaacggggtcgaggccgaaaattgtgagctgcttcacgatctcctcgcggcatttgctccggaagaggtgctgcacgttttgaacggttattttgcggaatacatcgagcagtaggccccgcagcagtatatcttattaaatgtcaaggaactataggacacgatccggtcggatttccctgcgaaagcgacgctctggatcatgtttatgaccaaatcacgcggtatctgatctgacggagggaacgaccatgtcaaatttccgcaagcaattcaaacaaggtgacgactattgcgacatccgggcggactatcgcagcctgatctccatcgggaagagcgttgaggaaacggaggacctgctgctgcgggcctactgtccgaaggacggagacctgctgttcacgcccacgttttggctctccctcggcatctgcgaatgggagaccggccgactgacgctccggacgaaggaggaggcgctctactgcctttcgctatatcaggagacggtcgagcagcgtttggccgcagggccgaatgagcggctgtcggacatgctgcagtttttccgggaaacgcaggaaatgctgctttcgcccctgccggaggccaaaaagatcagtaagccgtatgcgcgcaagtgtccgtggcgcgaaggtagcctgctggcttatcagattttaagtccgaagatgaaagattctccatactaccagaagtatgtcatccttcgtgtggtcgatatctggcgggaaccagttgtacggcttgctccgacggagcgctatgatgaaaccatgtgcattggcctatacggttggtggggtgatcaaataccggatgcctctattgtgaaggacttggaattcgtgtcaatagatactggtggcgtgaccaaaatgtggtgtgcatttgattggggcttgtgccgcggagagaagccgcatattaccctgttggaagaagacccggcgtggaga

SEQ ID NO: 11215 - DNA, 348 bp, Unknown
  gut microbiota DNA sequence
aagaaatagtgagaaaccagaaactggaaattctacactagcttgtaagcgttcccgaaagggaatgcggttggtcaagcgaacaagagcgcaaggggaatgccttggcatcaggagccgatgaaggacgtgataagctgcgaaaagcttcggggagctgcaaataagctttgatccggagatgtccgaatggggaaacccacctgagcaaacctcaggtaacgcatggtgaatcaaatagccatgcgtggggaaccgcctgaactgaaacatctaagtagggcgaggaaaagtaatcaaccgagattccgaaagtagtggcgagcgaaatcggaagaggccaaaccg

SEQ ID NO: 11216 - DNA, 3817 bp, Unknown
  gut microbiota DNA sequence
tattttatcggcggcttgtacgtgccgcaggtgtgccgccgggaggggacagcccggcccctacaatttcactgccttacttcaaaatccttgcggcgctttcctcggcaaactggcgggtatagaggtcgtggtaatagccgcccttctgcagcagctccaggtgcctgccctgctcgacgatgcggccgtcgcgcacgacgaggatgaggtccgccttgcggatggtggacaggcggtgggcgatcaggaacgacgtgcggtcgcgcagcaggtggtcgatggcgttctggataagctgctccgtctgcgtgtcgatggaggacgtcgcctcgtcgagcacgaagatgcgcgggtcggccagcacggcgcgcgcaaaggagatcagctgcttttcacccgtggaaaggcggtcgccgccctcgccgacgtcgctgtcccagcccttttcgagcttggccgcgacctgatcggccgaaacggtccgcgccgctgcctcgacctcggcgtccgtggcatccagacggccgtagcggatgttctcgcggatcgtgccggagaacagatgcggattctgcagcacatagccgatgttcgagtgcagccacagctggctgcgctcacggtagtcccggccgtcgatgaggatctggccggacgtcggctcaaaaaagcggcaggcgaggttcacaagcgtgctcttgcccgcaccggtctccccgacgatggcgacggtcgttccggcggggattttcagcgagaagtgcgacagcacatcctcgccgccgtccgggtagcggaacgtgacgtcgcggaactcgatgtcgccgcgcagcggctcccagttttcgcgcttggggtggaaggcatcgccgtagcgggcgatgacctccggcgtgtcggcgatctgcggcttttcgtccagcaggcccgtcacgcgctcgatggaggcctgcagggagatgaattccgcgatattcgcggccgtcatctggatcggctcaaaaatgccgacggcgtaggtcgtgaaggccgagagcgtggcgatctgcagcacctgctcctgcaccatatagccgccgcgcagcagcacgatggccacggccgccgtggagcagaacagcacgagggggatatacacggcgttcagccgcgcagcacggatgccgcagtcgtgcatctcctttgtcagcgcgcggaacgaggccgtgttctgctcctcgatgccgagggtcttcgacgtcttcgcgccggtgatgccctcgttgaacgcgccggtgatgcgggagttcagcttgcggacgcggcggttccagtgcaggatgcggttctggaaatagcccgtgagcacggcgatgaccggcacgatgacgatgacgacaagggcgagcttccagttgagcagcagcatcgcggcgaacgtgccgagcacatagaacatggcccagaggatatccgtcaggttccacgcgaccatggaggcgatgcgcgaggtgtcgctcatgacgcggctgagcagatagcccaccggcgtgacgttatagaacgagaacgacagcgtctgcaggtgcgtgaagaggttcgcgcgcatgtcgcgcccggcgcacatctcgatcttcatggagttgcgcgcaaaggccacaacggacagggcttgcagcaggatgacgccgaaatagcacagcgtgtagggcagcaggcccgacagcgtcccggcctcgatataatttgagatggcatagcgctggaacagcggcagcacgacgtcgatggcggccgtgatcaggttgaaggcgaacatgcccgcaaaatcgcggcggtatggccgcatgacgggcatcaggcgcttccagatgccccattggaacgatttggtatagtcctgttcatcaaaggcaggcatcagactccctcctttccgagcaggcggcggtcgtcgctgctcatctggatgtcatagatatcgcggtaaatgccgggcttggcgatgagctcggcgtgcgtacccagctccgagacgcggccgccgtcgagcacgaggatgcagtcggcctgcatgagcgtcgttacgcggtgggagatgagcagcaccgtcgccttgccgagcgattcgtgcagggcggcgcggatctttgcgtccgtctcggcgtccacggccgagagcgagtcgtcaaacaccatgatgggcgccctctgcatcagcatgcgcgcaatggccacgcgctgcttctgcccgccggacagcgtcacgccgcgctcgcccacgagcgtctcatagccctccgggaattcgcagatggcctcgtccacgcaggcaatggccgcggcgctgcgcagctcctcctgcggcgcgccggggcgcgtggcggcgatgttctcgcggatggtctgcgagaacaggaacggctcctgcagcacaaggccgatctggctgcgcaggctctcgcgcgtaaagctgcggatgtccacgccgccgatggtgatgcggccctcctgcaggtcgtacagccggtcgagcagatgcacgagcgtactcttgcccgagccggtgccgccgaggatggcaaacgtgctcccctgcgggatcgtgaacgagacgtcctgcagcacgggcgtctcgccgtagccgaacgtcacatggtcaaagacgatgtcgcccgccgcgctgtgcggcgcggcctcgggcgcgtccttctcctccggcgcgcgcaggatatagcccacgcggtcgagcgacacgcccgccttgctcatgtccgaaagcacgcggccgagcgagcgcaccggccacgacagagcctcgttatagctgatgaaggcgagaaatttgccgagcgtcatattgccgtgcacgctctcgacgatgccgcagacgatgatgaccatgacctgcaggcacgtcagtagcgtgccggaggcccagtagaccgagagcaggtggccgaggcggatccacaggctggcaaatttctcgttcttttcgcagaagcggtccgtttcgaagcgctcgcggccgaaggcacgcacaacgcgcacgccggtcaggttctcctgcgcacaggtcgtcaggtcgccctcggcctcgtccgccgcctgaaagcggccggagatgcgccggtagaacacaccggacgacaggccgacgatcgggatgaacgccagcgccacgaacgacagccgcacgttcatccggaacatgatgacgagatataaaatgatgaggaagaccgtgcgcacgacctcgacgagctggttgcacacgaacgtgcggatgacgtcgacgtccgaggtgcagcgctggatgatctcgcccgtggagtgggccgtgtgccacgaaaagctcaggtgctggatgtggtcatacagcccgtcgcggatgcgcttgacgaacgactccgacccgcgcgaaagctgcgtgcgctggccgtagttgcagaagccgcgcagcagggccagcagcagcacggccgcggccgcgagccacagcgcgtggagcttctgcgcctgcagcagcggcagaagcggctgcagaaacgccgggagcgacggctcctctgcgccgaggatggagtccaccgtcagacggatgacctgcggcgtgagggcattgaataccatcccgaggcaggcgcacagcagggccacgacaaaatagtggatgctgccgcgcagaaagcgcacgatgagctgcaccttctcccgccacgggatcgattgcgtttccatagaagatctctccttttttctgattgccgggggatgttgatatgctgactgtagcggcttgaagtccatgggcttctctgcccgtcaaaat

SEQ ID NO: 11217 - DNA, 506 bp, Unknown
  gut microbiota DNA sequence
aggacggcttctccccgatgattatgccgggtggcacggtaagagaaaaaaaggctgccggtgatgccatcctcggcctttgcaagtccatgacaagcccagagccgatttccatcggtcagtaccgtggctttgacatggagctgtccttcgataccttcagccgagaatataagatcacgctgattcatcagctgcggcatacggtcacgctgggaacggacatcttcggaaacattcagcgactggataacaccctcggcgcttttgaggaacgaatggcagcgtgcaccgagcagttggagaatacgcgggttcagcttgaaaatgcaaaggcagaggtacagaagccattcccccaggaggaagaactgaaaaccaaatcggcacggctaaatgaactgaatgcgatgctcaatctcgacaaaagagagaacgagatcgtggacggtgagcgtggcgaggaggagccgcaaaaatcatccgcagacagagaacgctaaaaa

SEQ ID NO: 11218 - DNA, 559 bp, Unknown
  gut microbiota DNA sequence
gtaaggaggctgttgtcctctccctgttggagaagaaaacggagaactatattgccattcgaattcccggcaaggatgcagactccgttctgaacgccatgcagtcactcagggaaggattcggagaaaagttctcacaggtcttcaagaccattaccgtggacaacggctcggagttctctgcgttcagtcaggtcgagaactggggctgtgcagtctactttgcgcatccctacacctcgtgggaacgtccccaaaacgaacgtcacaacgggctgtttcgagccttcgttccgaagggcgtgtccattgaggctttctctgctgagtatatcttggctgcagctgatgaattgaacggacggcctcgcaagaagcttggctaccgcaccccggaggagctgtttgacgagttcctcgactctgtttacgcagccgaaggctgcggcagcatcgcccaggacggaagccagcggcttccatcctgaccgacgctctgattcactaagttctaccgtgcaggtgtccaacttacacttgcaatttgcgtaacttataa

SEQ ID NO: 11219 - DNA, 22436 bp, Unknown
  gut microbiota DNA sequence
tgcatggcgctcaccgcccgtaaagggcacgccgcatccgtaaggcggcaaagccgccaacggctgcgcagtgagcgccgctacaggctgcctctcggcattcgtccgtatttatgtcccctgaatttcgatgatcacatattccgaccggcagccggtcttgaacaggatggcccagtccgaaatgccggacgtgactaaaaagtccgtatccccgcgccgctcctgcccgtagacggcatcgtcgccgtgcaggtggaaccagcggatgagctgcacaagggggatgagctgtccgccgtgggtgtggccggagagcacgagatcgacgcctgaggccgcctcggcatcatagtcatgcggctgatggtccagcacgatggagtagcgcgccgtatccagcccccgtgtcagctcagccatggatgcgcggccgccgccgaggcccagctcctctgaggcatcctgccggccgatgagccaaaaggcatcgccgatcggcacgatctcgtcctccagcacatgcacgccgtttgccgtcagttcggcggcgaggtcgtcgcccgtgaagccgcgggtgcacttgctgtcatacaggcccttgtcatgattgccgaagacgtagtagaccggcatatccagctgcccgagcgccctgcaggcggcgagcatgtcgtccttctccgtatcctcgtcgacaaagtcgcccgcgatcacgagcaggtcgggcttctgcgccgcgatgcggtccagctcgcgggcaaagccgtctgcgtggaacgtggtgcccatgtgggaatcggcgatgagcgcgacgcggagcgtgccgacgggcttgtccgtatgaatgatgtagtttgtctgccagacgtggtgcgcctgcacccaaccggccgaaagataggcgactgtgagcagcagggccgtgagcccggcgtaataccgccgccacggcttgccgtgcagctgcttcagcagggcgaacagcgcgtcgctcagcagccagaacagcgccagatggagcaggcagatgatggcgttcatatagccccacgccagccagatcgcggcagaaggaagcagcacagccagcacggagatcacccagctccagccatgcctgccgcgggccagcgccagcgagaatcggaagcggtgcacgcgcgtgacaaggtaaaaaagcgcaaaaaatccagccagcaccagaccgatcaggatcagaagcctggggatcatgcgcccgcgcccccgttctgcacgagaatgtcctctgccgtcagcatggggtatcggcgcagcgccgtgccgtccagcggctcgcggtgcaggtcgacggctgtgatgcggcggttgccgtaggtcgtgtagtaatagatgccgcgcgcggcattccagcacgaggtgtagatcgtgcgctcaaattctcccggtgcgacctcacagcagccgcgcgtctgcgagaccgtctccatgatgtggaaaaactgcccgacgcagtcggcctcgctctcgccgcagacggagtggagcttcgtgaaggcggcgcggacaaagcgcgagccggaggacaggtcgcccggcagaccgagcgcgcccatgccgcggctgtaggcctgcagcggcacgtccggagcaaaggtattctccggctgtctcggtgacagatgcatatagttgttcagcgcgaagagctgctgcgggaacggtgggttattcgtcagcacgccgacgggattttcgtagatctgcagccccgcagcagtcggctccagcgtgagtgcaccggtcgcgtccgcgagcagccagtgcagctgggcggcggggaagtgcgggctgaacggcgttcccgtcaggttgacgtcctgcagcagctgccgggcctccgccagcgtggcgcactgccgcagcagccacgggatgaattcgaactgcgccacgttctgccgcccgtcctgcggcgcggcatagtgggcgttgccgacgaagttcagcccggcaataccgaggcctttttcgttcacggcatcgtaatacagcggatagccgtccgccacatgggccgtgccgaggatggcatagccctgctccgagccgccgccgtggcggaagcggagcgggaaccggcggggaagcatgacgatctcctcgccataggatgcctcataatccagcgagcggcccatatagagctcacgcggctgataggtgattgcagtgcacataatacctcctgataatatgataccgctgcagaacggcttgctctgcagcggtatcggtttaatcctctgcggccagcagaatgatgcattccgctgcctccttcaccggagcggagagcgtgaaggcgtagatcccgctgcagtccgccagaagctttggcagcgcttccgccggcaggcgatatgcggcgcggacgtcctccggccaaagcccggccgtctcgctccagctgacgcgctcctcctcggacagcagctcgctgctctccggcagaacgtcggcgtgtgcgcccttcagcacgacgagcagcgactccgcggcggttccgtcgtatgcggccgctgcgtcgtccgtatccgcagccttgcactcgggcgccccaacaccggatgttgcggcgtcgtggtaaaatgacgtgacattgccactgtatcccatcacgacgtcgccgggagcggcagtagcggcagtatcgttggacttctgctgcgcaaagcccttcagcggaccgagcagagtgaagacgaccagcgcggcagcggcaaggcctgtggcaagcccgccccagtaggcgcggcgtggctttttgaccggccgctgcggtgttttggcggcggctgccagaatggaggctgtcagcccggcgggcgggacggcggtgtctgcccgcagcagacggtccccgcgttcaaaggcctgcagccgcgcgcggcagcttgcacactgcgccagatgcgcctgcagccgctgctcttcctccggcgagttttcgccgtcgagatgtccgctcaaaagtggaagataatcgttacagttcacggccccgacctcctttctgcggattagacgaggcggcggccgctttgttcccgctctgggacagcttttttcgcagctggtcgcgggcgcgggcgagacgggacttgaccgttccctcccgcacgccaagcacagcggcgatgtccgtatagctcaggtcattttccacgcgcagcgacaggatcagccgctgctccggggccagcagggccatggcggcccgcagctcctcccgctcctcgcgcgcaagcagctcctcctccggcagcttggccgggtcgggtgcatcgagggtatattcctccccgtcggcgtccagcccggagatgggaacgaccaggtggcggcgcgcagcacgcagaaagtcgatgcagacgttggacgtcagccggaacagccaggtggacaggctggaatcggcctgaaagctgccaagcccgcgccacgcgcgcaggaaggcctcctgcgtcatgtcggcggcatcctccggattgccggtcatgcgcagcgcgagccggtagatggcgggctgatgcgtcgtgacgagctgctcaaacgccgccatatcgccgtcggctgccagccggatcatgtgcttttcgtcgatggggatcacctcagatcacgcttgatctcttttgccagacgttctatgtcggaaaaggcggaaatgttggagatttgttccttataaaatccgctgtgcggcacgccgcgcaggtaccatgcaaaatgcttgcgcgcctcgaggcaggcaatatgctcgcccttgtcctcgagcgccagtgcgaattgctgcagggccgtgtccacgcggtcggcgagcggcggcagctccgggggtgtcttgccgcgcagggcagcgcgcagccgctcgaaaagccacgggtcgccgaaggcggcgcgtcccgccatgaacagcgaagcgccgctgtgcgcccggcagcgcagcagctgctcggggtcggagatatcgccgtttgcgataacggggatggagacggcgcgcacgacctcgccgatggcgtcccagtctgcgcggccggaatagagcatggccttcgtgcggccgtggaccgtgatagcggctgcaccgttttcctccgccacgcgggccagcgcgacggcgctcgggcagctccggtcccagccaaggcgggtctttacggtcacggggacggaaacggcgtccgccacggcgcggatgatgcgcccggccagcgggatgtcgcgcatgagggcgctgccgtcgccgttgttggcgatcttcggcatggggcagcccatattgatgtccagaaagtcgcacccgctgatgccgacggcgatctgcgcggcctcggccatcatggccgggtcgttgccgaagatctgcgcgccgcacagcgagccctcgttccggcggagcaggccgcggctcttgcggtcctgatagacgagcgcgcgggaggaaaccatctccgttacggtcacgtccgcgccatgctgcgcgcagaccgtgcggaaggcgtagtccgttacgccggccatcggtgcgaggaaaagcggcgtatcgccggaaaacagctgcatgggtccatccctcctgacccatactgtaccataaagcgcgaaaaaaagcaactctgcccgttcgtctttttgagcgggcggagaagccccggggcagtaccgcatgattcggttaaggccaaaatacggtgctgccttagaagatcagcacgcaggagagccacgccagccccacagatgccgctcccatcgcggcgtacaggagagccgggatgcggcggcgcggtcgtgcggacggcggtgcggcggcaaggcggcgggcctcctccaggagggcctgctccgtcacaccgtgctgctcgagcgcctcctcgcgcagcagaaaaatagcctgctcaaacaggtcggactcctgcggccgcaccacgaggacctgccgcgtcgttcccttgaccattacgctccctcccttagccggacattgtccggtatctggagagattctacccgcccgaagtgggtcataaacggctgtcgataaaaaatttttataaaaaatttgaaaaaagtgtcaggaatccgtttctggtgaaatataggagtgaagggaggccgcagcagagcggaatagtctgcaggaaagaacaacttcgcaggaagaagcatttatgaattgaaagaaaggacagattatcatgaaaggaaaacgatttcttctgcttttgctcgttttcgcattatcagtctctttgcttggctgtggagaaatgtctgacgcagaggtgcagctgcgatacggcctgaggatgttcttcaatcggtttaatctcttccagccaaccagtttttacggtttttctggagataatctggatgatctggaatggggtgcggagcagctcagggccggcatggaggaaaacacggccctgcttcagaaatacccaaacgcctatgcgtcccttcagctgctggttcagatcccgactgtactgagatccctgtacgaggcagcagggacggaaaagcttacctttggcgacctcccccccgcgttgcaggcatgcctgtacgatgtggacatcctgctgtatccgtgcctgtttgcctggaccgaaagtgacggctcttccgtgatgggcctgtttgccctgatggagtcctcgggcagcgcgatcaatttcatggatcgcactgtcgtctcccgccagggaatcgagtggccggagccggtagactggacaccgccggatgtttgatcccggtacatagcaaaaagctgctgcagagcgctcgctctgcagcagctcagactgtcggaaaacctattcaggcaaaggttttggagggaggaaaagcctcgcagagtttgcgcccgcaggcgcaaagaagatgggaatcattttctccggcggcgtgtacgtcggagaaaataccgctcggctcgcaaacgtgcgaagggtgcgccgcaggcgtgcccttcgtgcgctgcagcgagccgcagccttttcaaacgagagcccagtgaaacgggtctcgtttgagagcttgtcaaaaacacttttttgacaagctcaactgccgcagagcgttcgctctgcggcaggaaattttatgcctgttcgccggattcggaggggtcgatgacggaatcgtcatggaagacccagtcctgcacgttcagaatgtcgtaggtcgagggagtgcggcggatgacgatcttcgaaagaccggcgttgatgatcatccggcggcacatcgggcaggggagcaggtcagggatcagctcgcccgtggcgacgtcgcgcccggccagatagatcgtgccgccgatgcactcgctgcgcgcggcggagatgatggcgttcatctcggcgtggacgctgcggcagagctcatagcgctcgccggcggggatgccgagccgttcgcggatgcagtagccgaggtcgatgcagttgctgcggccgcgcggtgcgccgttgtagcccgtggaaacgatctcgtcgttgcggacgatgagcgccccggagtgagagcggctgcaggtagaacgctccagcacggtctccgcgatgtcgaggtaatagctttccttatcgatgcgccccatggcagtggcctccaatgatcggaacattgccattattatacaccctgcaggaaaaaactgcaagcatttttccgaaaaacgcgccatttttggcgaaaaaacagctcaaaaatgggagttttgctccaccagatgaaaaataaccggtgaagaccgaggctgcaatggagtgatgctgctttagagcatacattttccgcggtgcagatactgcccattacggtcgtggagaattttgccctcccggacgacgcaggtgccgcgcaggtagacctctgcgatatggcccgcgatctgcgtgccctcatagggggcatagtcgacgtttgccgcctgatcggctgcggtgatgcagctcgtgccgcgcgggtcatatacgacgatgtccgcgtccgcgcccggctgcagcacgcccttgcgggggaagagaccgtagagcttcgcgggcgtttcggccagcacatcggccatgcgctcggccgtgatgcggcctgctgcgacgccgtaggtgaacagcagcgtgccgcgcgtctccacgccgggcatgccgccgggaattctggtgaagtcgccgcgcccggcgtccttctgcgcgagggtgaagctgcagtgatccgtcgaaacggtctggatctcgccgtcggccagcgccttccacaggcgctcgttgtcgagcttcttgcgcagcgggggcgcgcagacatagcgtgcgcctgcaaagtccggcaggctgtagcgtgagtcgtccagcagcaggtagtgcgggcaggtctccacaaagaccttctgcccgaggccgcgcgcggcctcgacctcacgcagggctgccgccgtggacaggtggacgatcatgacgggcacatcggccacgcgtgccagcttcagcagacggccgacggcctcggcctcggcctccgccgggcggcagagcgggtgagacgccggggaaagcgcgcccgcggccttcttttcggcgatgagcgcatcgatcatgccggcgttctcgcagtgcacgccgacgatgccgccgagacgcttcatctcgcgcagggcgtggaaaatggcctcgtcgccgatcatcattgcgggataggtcatgtacattttgaaggaggagatgccctcgtcaaacatctgcggcagctcggcgcggatgccgtcattccagtcgtcgatggtcatgtggaagccgtagtcgcagccggtcttcccgtccgccttctcatgccagcgggcaaggccggtgtggagcgtttcgcccttgttcgggcaggcaaagtcgatgacggtcgtcgtaccgccgcgcagggcggagcggccgccggtgtagaagtcgtccgctgtgacggtgttgcagacctcaaggtcgaagtgtgtgtgcgcgtcgagaaagccggggaacagcagcttgccgctgacgtcgatcacctcggcctccgggcaggaaagcgcctcgccgacggcctcgatgcgttcgccgtcgatgagcagatcggctttccggcagccggaagcgccgacgatcacgccgcctttcagcagctttttcatacgaatccactcctttttgttgattcggccaccccgcatcattcctcttcggccttcggcggatatttttcgctggtccatcggttcggaaagtttgacgtgcacaaagcacgcccgcactttccaaaccttgcctcgacaaaaaatctctcgccggatgctcttgaggaatgatgcggggcagcctgtgtatttgccggttgatactattctgtattttattctatcactgcggcggggaaaagggaatcccctttttctgcggaaaatgccgccgtggcgcgaatcgacgattgacagggaaagcgtccagaccgtataatggggctgtaccggttatccaaaaaggaaggagatatgttccatgctgcaaattgaacatctgacgaagacctacggtgaaaagaaggccgtggacgatctgagcctgcacatcctgcccggtgaaatttacggcttcatcggccacaacggcgcgggaaagacgacgacgctgaaatccgtcgccgggatcctgcgcttcgacgccggagagatccgcatcgccggcacctccatccgcacggacccgctggcctgcaagcgaaagcttgcctacatcccggacaatcccgatctctatgactatatgacgggtatccagtatctgaactttattgcgaacattttcggtgtcagcgcggcggaccggcaggtgcgcatccgcgagcttgcggagcgctttgagctgacgaacgatctggcccagcccatcgccgcctactcccacggcatgaagcagaagctggccatcatctcggcctggctccatgccccgcagctcgtcgtgatggacgagccgttcgtcggcctggacccgaaggccgcccatctgctcaagggcatgatgcgggagctgtgcgaccgcggcggcgcgatcttcttctcgacgcatgtgctcgaggtcgcggaaaagctgtgcgacaaggtcgccatcctgcgtgcgggcaagctcatccgctccggcacgatggacgaggtcaggggcgacgactccctcgaggaggtcttcctggagttggagggcgagacatgctgagcgctctcctgaaaaagcagctgcaggagatcttccgcagctacttctataacgccaagcagggcaaggcccgctcccgtgcctcgacactgggttattttgccttcttcgccgtgctgatggtcggcgtgctgggcggcatgttcacctatctggcgcattccctgtgcgcgccgttcgccgcagccgggatggaatggctgtatttcacgatcatggccatggtcgccatcgtgctcggtgcattcggcagcgtattcaacacctattcgagcctctatcttgccaaggataacgacctgctgctgtccatgccgatcccggtgcgcaccatcctgttgtcccgcctgctgagcgtctatctcatgggtctgctctattccggcgttgtgctgctgcctgccatgatcgtctattgggtcacggtctcggccgcgcccgccgcccttgcgggcggcctgctgctgtttgtccttgtcacgatcttcgtgctgacgctatcatgcgcgctgggctggctcgtggcgagggtcagcctgaagctgaagcaccgcagcatcacggtggtactgacgtcgctgctgttcctcagcgcttactatttcgtgtatttcaaggcgcagagcttcctctcagagcttgtgacgaacgccgcctactacggcgcgcagatccgcggcaaggcctatccgctctatctgatcggccgtgccggggccggcgacggccctgccatggcggtggtcaccgccgtggtgctcgttctgtttgtcctgctattctggctgctgtcgcgcagcttcctgcgcatcgccacggcaagcggcagcacggtgcgccgtgtctaccgcgaaaagaccgccgtgcagcgcggcgcgggcacggccctgcttgcgcgggagctgcggcacttcggcggcaatcccagctatatgctcaactgcggcctcggcatcctgctgctgccgctcggcggcacggccctgctatggaagcgcgatcttctggatgtgctgcagcctatggtcggcgggcaggggatcgcgctcatcctgtgcgcgctggtgtgcctgctggcatccatgaatctcatggctgcgccgtccgtttcgctcgagggccggacgctctggctcgtgcagtcactgccggtccggccatggcaggtcctgcgggccaagctgcagctgcagcttgtgctgacggccgtccccgcgctgatcgcggcggtctgcgcagccgtggctgccgcgcgcccggtgggggagacgctcctgctgctggccgtcccgctcggctatgtcctgctgctggcgctgttcggcctgttcgcgggcctgaagctgccgaacctgacgtggacgaatgagatcacgcccatcaagcagggcggcagcgtcatgctggccctgttcggcggcttcgtctatgcgggccttctgccgctggcctatttccttggcgcgtccgccctgggcctttctgcctgccttggaatttatctcggcctgacgctggccctttccgccgtgctgtatgtctggctgcgccggcgcggcgcggccgtgttcgcggctctgtaacaaaaaggagagagtatgaacgatattctggaggtccgacacctcgtcaagcgcttcggcgatgtgacggcggtggacgatctgagcttccgcgtgcgcgagggcgagctgttcgccttcctcggtgtgaacggcgcgggaaaatccacgaccatccacattctctgcggccagctggcccgcgacggcggcagcgtgcgcgtctgcggcgcggacccggacgaagcgccggagcagctccgccggagcctcggcgtggtgttccagagctccgtgctggatcaggcgctgtccgtgcaggagaatctgcgcagccgcgcggcgctttacggcatccggggcgcggcgttttcccgccgtcttgcggagctgacggacctgctggagctgggcgagctgctgcgccgccccgtcggcaagctctcgggcggccagcgccgccgtatcgacatcgcccgcgccctgctgcaccggccgcgcctgcttattctggatgagccgacgacgggccttgacccgcagacgcgcagtctgctgtggcaggtcgtggcgggcctgcggcaggaggagaatctgacggtcttcctcaccacgcattatatggaggaggctgcggacgcgggctacgttgtcctgctcgaccacggcaggatcgcggcggagggcacgccgctgcagctgaaaaacacctatgctcacgatacgctcaccctctacggcgtgggtgaggcggacgtgcggcggctcggcctgccgtatgcgcctgcggagcagggctggcgtgtcaccgtgccggacccgtctgccgctgcggagctcatccggcgggaaccggcgctgttccgcgattttgagctgaccaagggacggatggacgatgtgttcctcgccgtcacgggcaaaaagctggcgggaggtgcggagaaatgaccggactcggtgcgctgatccggcgcaacagtaagctgtatttcaaggataagggaatgttcttcacctcactcatcacgccgatgatcctgctggtgctctatgtcaccttcctcagccggacgtatgagggttcgttccgttctgcccttgcggcagccggggcacaggtggaggactcgctcctgcatggctgtgtcggcgggcagctcatctcgtcgctgctggccgtcagctgtgtgacggtggcgttctgctcgaatctcaccatggtgttcgacaaggtctccggcgcacggaacgacctgaccgtttcgccggtccggcccgccgtcctctcgctgagctattatctggcgacgttctgcaccacgctgctcatcaacggcatcgccgcggccgcctgcttcggctatctggcactgaccggctggtatctgagcgctgcggacgtgctgctcgtgctgctggacgtggtgatcctggtgctgttcggcacggcgctgtcgtcttgcatgatcttcccgctttcgacgaacgggcaggccagcgcggtcggaacgatcgtgagcgcggggtacggctttgtctgcggggcctatatgcccgtttcgagcttctcgcccgtgctgcagaaggtcatcgccttcctgccggggacgtatgggaccgctctgctgcgctgccatgcgatgcggggcgtgtttgcggagatgcgccgcatcggcttcccggcggaggccgtttcgggcatccgtgacagcgtggactgcaatctctatttcttcggccatgccgtaagcaccggcgcgatgtatgccatcatgctggggagcatcgccgcgctcatcggcctttatgtcctgctgaaccgcccgggacacggagaaaagcgccatgggtagagcctccaccagacagaacaagacgccctatcagctggcccgcgaggagctgggcctttcccgcgagcgggcggcggagctgctggagactatcccggcggagcgcatcgagcgcatcgaaagcgagcgctccctgccgcggccggacgaggtgctgcgcatggcgcagcggtataagaagccgtcgctctgcaatgcctactgcgcccgcgcctgccccatcgggcaggaatatgtgccggagatcaagccgaaggagcttccggccatcgtgctcgagatgctggcgaccctcaacacgctcgaccgcgagcgcggctgcctcatcgacatctcggccgatggcagcatcgatccggacgagctggcggatttcctgcgcatccagcaggagctggagcagatctcccggaccgtggaggccctgcagctctgggcggaaaaaatgatggccgacggccgcattgaccgtgcggcctatacgcggaagatctccgcagcaggagaaaaatagcgggtgttaatttgtacatttgagcctttattttctgcgcccggcctgataaaataagaccatacacagcggatccgtaaaacccacccagatacagaaaaggagagtaacaatgattatttttatgttcggcatcgtgcttaccatcgtgcttttcattgccatgggctttgtccgcggcgagggcatgagctggagagtcaacaaaaagcagctgctggcgctggtcggtgtgctcgtcatcgtgttttcgtgctatgtctccattccggcaggccacaccggcgttgtgacgacgttcggcagcgtggagaactacacgctcgaggccggcatgcacttcaagctcccgtggcaggaggtcatcaagatggacaaccgcgtgcagaagagcacgcaggatatgtcctgcttctcctccgacattcaggaggtcagcatgacctacaccgtgaactatcagatcagcaagcaggatgccatgacgatctataagaccatcggcatcggctattacgatacggtcatcgccccatgcatcacggagtcggtcaagatcgtcacggcccagtatacggccgaggaccttgtctccagccgcagcctgatggcctcgcagatcgaggaggtcctgtcccaaaagctggctgcctacaatatcgagctggtcggcgcttccattgagaatatggacttcacggacgcctttacggatgcagtggaggccaagcaggtcgccgagcagaacaagctccgcgccgagactgaggcacagcagcgcgtcctcgaggccaatgccgctgcggagatcaagcgcatcgaggcggaggcggatgcctatgagctgacgacccgtgctgaggccgaggccgaggcgaaccgcaagatcgccgaatccctgacggaggccctcatcgcctatacttacgcggagaactggaacggcgagctgccgacatttatgacgggcgacggcacgacgctgccgatgttcgacatgtcggccctgctgaacggcgggaccgataacggaacaactgccgcacagcctgcggaataacagagcagaaaaagtcctgcccggagtgaaagctccgggcaggatcactttttaggggagggttttgtaggggagcggcatgccgctcccggagacgcacctgcagttggtacaaggcggcgataaaatggtatgcaccaattgcgtctgtagcgccgctcactgcgtagccgttggcggctttgccgccttacggatgcggcgtgccccttgcgggtagtgagcgccttgtgcagggaaattaaactgtataagggcactggtgcaccactgcaccaccctgatgtgtcattccgaggagcgaagcgacgtggggatctcgcaggacaatggcggataacaggaaagccatcggcgaaaacgtaactgccttcccgagattgccacgtcggcctgcggcctcctcgcaatgacaaatctggggcccttgtgccacagaatcagtgcgagatagttgtcagcctccatggcgctcaatgagcgccgctacaatattgttattgtttgaaattaattccctgccggggcgggttcgcgctccatggcggcgtgcttgcgcgccgggcggtagcacagcagggcaatgaagatcatcagcgccgtggcggacaagctgaccggataggacgtcatgatggtctgcagcgtggggtgctgcgggaagacaaagtggatccaagcgatgcggatgccgcatacgccgagggccgtgagggcggcgggcacgagcgagatgccgaagccgcgcagatagccggacatgacctcatacagaagcgagaaaatataggcaaagaacacgatcttcagccggtcgtagcccagtgcgacgacctgcgggtcgttgttgaagatggacagcaggaagcggcctgtcagcagcaccagcgcgacggtcgcgccgagcgaaacggcgtcttcgatcaggcagaggtacagcgttttgcggcagcggcggatctggcccgcgccgtagttctggccgacaaacgtcgtgcaggcctgattgtaggagttcatcacgtcataggcgaagacttcgatgttgtaggcggcgctcgaggctgccataacgaccttgccgaggctgttgatggcggattggatgacgatgttggaaatggcgaacaccgcgctctgcagtccggcgggcaggccgatgcgcaggatcatccacaggctgcggccgtccatgcgcagcttgcgcggctcaaggcggatgtccttgccggagcgcagcaggcggcggaacagcagagccgagctgaaggcattggcgatgacggtcgcgatggccacgccgttgacggtcatatggagcacggcaacgaagaacaggttcagcagcacgttcagcacgccggacatcgccagcgccacgagcggcacgcgcgtctcaccgacgctgcggaagatcgccgcctcgaagttgtaaagcaggatgaccggcatgcccatcaggtagatgcgcagatacagcagcgcctgcggaaacacgtcgtccggcacatgcagcgtacgcagcagggcggccgcagccagctcaccgagaacggcgacgacgatgccgcccagcagcgagaatacgatggacgtgtgcacggccttctgcacggcctcgcggtcgccgcggccgacggcgtttgcgatgacgacattcgcgccgagggcgatgccgatgaacaggttgacgatgagcgcgatgagcgcgctgtttgcgccgacggcggcgacggcaatggtcttgtccgcaccggtgaagttgccgacaacggcaatgtcggaggcgttgaacagctgttccagaatggctgttgcggcgaccggcagggcaaactgcggcagcttgctccagattggaccatggagcatgtcgagccgtttgctttctgcggatctcatgtggaatttctcctctcaattcaaaaacatctcgattgcggccctagtatagcgcaatctgccccgcagcgcaaacatttttccggcttttcccaaaccttggaagactgcacgggaacggcccgaagaatgagaccgttcccgtgcagtttgttcaggggctgtggtcagatgtcagaggagcgcggcagaaatcagtacacgccaggaatgcagcggatgagcttgtcaaatgcctgccgttctgtctcttgcatgcagcatgggaaatgaaatcgggaaaaggttagaaaatcatcatgagagtgcccgcaacgatcagcacgaggccgagcgcggcctttttgtacagccgctcatggaacacgacggcggaaaatgcgatggagaccagaatgctcagcttatcgatgggcacgaccacgctggcaagcccgtcctgcagggccttgtagtagcacagccacgaaccgcccgttgcaaggccggacaggcagatgaagccgagctccttcttcgggacctccttcagcgtgtgctgcttgcccttgacgaacacaatgagccacgccatcacgagcacgacgcccgtgcggatggccgtgccgaggttggactccacgccctcgatgccgaccttgccgaggatggaggtcaggctggcgaacacggcggagaggatggcatagagcagccagctctttcgttcggccttgttttcggtgactgcttttttctcgatcatcaggaacgtgccgatggcgatgagcacgacggccgcgcccttgagccaggtgatgccctcgcccaggaagaggaacgccagcacgatcgtcaggatggtgctcgatttatcgatgggaacgaccttgttcacgtcgccgagctgcagcgcgcggaaatagcacagccacgacgcgccggtcgcgaggcccgagaggatcagaaagacccacgtcttcgcgctcaggccggtgatggtcggcgcggagccgacgatggccaccatcagccacgaaaacagcaggaccacgatcgtccggatggccgtggccgtgtcggaatccgtcttccggatgccgcattttgccagaatggatgtcagcccggcaaaaagcgccgaaccaaatgcaaacaggatccacatgacaatgccttcttcctatattttgtttcacgcagtggatgagaaaaggttgacggttttttcggaagattctaatgaatcatggttccatcaaaaatgttgggggtctggctctcttctcggccccgttcttgcgaaaaaagttgagcatagagacaaaatcctttgagtacaccactaccacatccaaaggagagtcactatgcctaattcagactatacaacagaactgctcaatttggaagaggtaatcgtcaaaaagtgcaaattcctactggcgaagtctgcttttttctggagcagcccggcccgctggacactcacggattgcgtgcacgactaccggatgcaggagagaccgctgtccaacaccatctacaacgcaggatatgacgttgaccgcgtgaacttagccgccgggagtgcgtatttgacaaaagctgcgtaataggataaacatccaacaccgtgcgtttccaggacgcatagtgcgggatgtttttgcgtttttgggaagatggttgctgcacaaacgatttaagtttttaagtatctgtttccgttccaacaatgacttgtgaagtttcttcggtattggactgggctggatgagcagtgagaccggtaaaagcaattatgcccaggatgtacatcacaataatgccgccgataataaaggcgaatactttccatactctcttcgcccgtctgtttttgatagccagctgctcgttgatccgcgaaagctgctctgccaaagcgtcgggcttcgtttctgcttcaattttggatccgagcaatcggcttacagggacatccaaaatctccgccagctttattaacagatccgagtcgggaacggaaagacccgtttccctaaattaaagatattggttatgtatgagtgcctacgcctacttgcataggtactcatattcgttgttttactcaattttgccgataaatcggtagtagatgtcaatatcctgctcacgcataccgtccacggtggctgcttcgtgaatgacgattttctcaatcagcgtattcagaagctccgctgtcagttcggtgggattagcgtactgcttagtatcatagtaattttccttatctgctacactaaattcaatctcataaatacatatccatcttcaacggaatctgaataggcaaatcctaactttgcccaaaacttctgcgcagccgtatggcactgatttacaggagctgaaactcgtcttgctttgtattctttataaaggaaatcaatacagagtttggcagcagcagttccatacccttttttttgataggcatcatcaataagaaaattgattatttgatagttttcttcaccaacatacattgaaacaaagccaatcattgtttcatcagcataaattgcaaatggcttggtgtctttataatgaacccatgcttctgccagagaatacgccacagaatccacaaaatttgtatttgcaacgctggctttaagattaagacagtctgtgtagttattctcgttgattgttcgtagctctatcattttatctttctcccaattttcatatcctgtcgccacttgggagcttcgccatcgtctgcccaatactcatccatagcggcgatcttaccgtctttcagcttgataaaggacgtaacgtgaaaagaagcggagcaatccttcggatatacctgtgttgcggtgataatcatatcgcccgtcgtgacgatcttttcaacctcgccatcccaatcaccgggatagtcacagttggctcttataaattcctcgaccgtaaaatgctcgttggagcaatgccaattcacataggcatcggcttggaaatattctcttatctcgtctgctctctgtgcaagaacgtcagaccaaaactgttgtatgttcattctatcgccttaccaaaaattcgctctccgtctgatgatgtacgagacaattcaaacccattacggaaataaaagcgttcagccattccaacaggaacaagctctatatactttgcgcccaatgattgaagatggttttcgaccattcgatatgtagcagaaccaacaccggagcttctacgctctgtacatacatagaagttgttaataaagcctttgttacgttcctcatcatacgaatagctaatcaatccaacgcaaacttcattttctacaatccgcataacaaaatacggattatgttcttgaagcgtctgctcaatcatttgtgcgttcagttcatcattgtgaagatcgtcaatgttctcttgatattcttcttcgtcgcacacttcgctcagatacgaactgaaccaatcatagaaatcatcccattcgtcttttttctgtaaatcaaatcgtatcagttcgatcatagcctataccaactctttcaaataagaaattagatcattggggaatttgttattcattacatcggttgtcagcactcgaactgcatattcctcaaaggcatttagtctgcctgcattatcaccggataaataataggattcatcaacgcctggatatatccgtttggttgtcgcaacagtatccgcaatatccatgacagcgggatggacaacatgatgcaaaaactcatgtattacagactctgttctgaacatgccggaacagaaaataaaacagttgccgtccatgtgaaagtcggcagagtaaacgcacttgatcggattgatgacgattcgaatatcctgcaccggggagccgtacttggagacgcacacatctaagcaattcttaatcacccgaagcgctgctttatgcttagcattttgtgtggcaagccattcctgttcccattccagataattcttgaaggcatcacaagctaaaacatcggagagtgctgttggaaagtcggctatccaatcccacaatctttgatctcgctcaaggtctccaatgttggtagcattcataatttgattgcgtaaagcatcatagtctcggatatgcgagcgatctggcgatagataaaatgatgctgtttccaaaattgcagcacggggccaatatggatagacttcacaggtgttctgcttcacccctgcgaaaaaaagagtagtattctcagcgccaatatactcttgaatatatgaaatatgattctgacttcgctccatagtataatagtcatatccactttgcagcaacgcaaagtagattgccgatatttccggaatatttgaaattgtaatctgctctgcggtttgcattttcatctatcttacctcaatttacatctggtgtgtgtatacacattataccatagtgataagaaaattttcaagcggtttgtattctgttactgccattagataggcttcgggattgccgttgagtatcagatcggcgtatgcaatcgggtcattgtagataagataatcaagctctgaccgttcatacatatttcgggcgacctcgttctcaacggcaatcgtatcaatcgcaatcatgctgccatcggtgaatttcagttccacacagcagttatcgaagttatattcgcaggaaatcagctttttcatagggtttacctccaaaaatgttttgtttggaagtaatgtaagcgtgggtttttagtgtggtatctttaagtttgggaaacccctttttcccattttgaaacggtctgcctcacgacattcaatcgtgctgccagttcctcttgcgtgattcctttttccttacgaagtgcttttaggttgtcttgaaacatagtggcttcctcctttgcactctcattatagtgcggaagactgcgttgcctcaagcaacgcagaataacattgaaccaaaccaaactctatcaagtagaattatagcagagacttgtgaataattccacctctactccgagttgaaccgtcctttgccttgcattgcgcatgggacgcagcgcaggacttttcccgtttctggcgatttagagcggcacattcgatgccctacgcaggacacacctttgcgcatcacggaatcgagcagggagattaagtatttgacctctttccggtagaccgccagggtgttggccgttgtatccatgattcgccacctctttgtcgtttgctataagatacaaggcggctccagattttgggtaccacttttgcaaaaaatgaaaaaatttctgtcggagataatgatctgcctatgaggctgaccttttagctgcacaaaaaagagcaaggtctgttcaaccttgccccagtcagtattcagtttggcggattagccttatcaaaatatgataccaatatcaaaaggcaagcatgaaaatgagcgcttttccttttatatctgacgcattatgttaaaatgtgcagtagatgctccattttactgtcccactctctgctggaatcggcgcactctttcagttcggtttcgatttcagcatttatcggcaagtttttcttatagcggatggtatgctcaaggcttgcccagaagtccatcgcgattgtacggagttgtatctccaccggcacatggatctctttttccgcaaagaataccggcagccggatcgtcaggtgcagactgcgatagccatttggtttcgggtgtgaaatataatctttctctgtgataatttcaatgtcagactgatcttttaagcactttgccaaaaagaacacatcctcttcgaaagagcagatcacacgaacaccggcaacatccatgatatttgcctgcatggtcggaaaatccagagaaagtccgcgcttctgcatcttgttcataatgctggacggcgacttcaagcggcttttcatactttctatcggattgcggtcatgctgcaatgaaaactcttcgttcagaatttccaatcggctttcaagcgctttcagcgcacagcggtattgcagcatgacttcctgatacttgcgattttcacttaaaaggcgctggcattgcagatcatccaagcctttatctgccgcaaccgtcaaaccaaataaattttcactcatagcttctccattccgcagggataggcgctttgcgctgtctgccgctcttgtgttacgacctgataaaagctg

SEQ ID NO: 11220 - DNA, 502 bp, Unknown
  gut microbiota DNA sequence
gttcccatcccgaacacagaagttaagctcatttgcgccgacaatactttgcgggtgactgcacgggaagataggtaacgccaacacttatattcccccttagctcagtcggtagagcaacggactgttaatccgtgtgtcgttggttcgagtccaacagggggagccaatgaaatagccgccacttggtggcggctatttctttacttaaaccttatgggcctttagctcagttggttagagcatccggctcataaccggacggtcccgggttcgagtccccgaaggcccaccaccttttctgatgtctgatataggggtatagctcaattggtagagcggcggtctccaaaaccgtaggctctgggttcaagtcctagtgcccctgccacgaaagcaccttgcatctttgcagggtgcttttttgcgtttctggcgtaaaaatgcccggcagagggctgctctgccggggagtatggattcttagaatgttttctgcagg

SEQ ID NO: 11221 - DNA, 40379 bp, Unknown
  gut microbiota DNA sequence
aggtgggaatgcgagccttcgtccatccaaacgagctccttcggggcattgcaggccgcgtacagctcttctgcgcgcttcggcagcgagaaggcgtccttgcggccgtggagaaacaggatcggcgttttcaccttgccgataacgcgaatgggccgcgcttcgcggatcttcatgccggattccagccgggcggcccagaaaatttcgtacaggacggggaaaatcggccgcttttcggccttcatgtgcagcttgaaggattccagaaacgttgcgaacaggccctcaaccacgagatgggagacatagaccggaaagtccggctttgcggctgccagcacgacggcggcgccgccgacgcagatgccgtgcagcaccacgtcgctacagccgagctgatcgtgcgcgaagcgcgaccatgcgataacgtccgaccactcgcgtgtgctgcagtagttgtatttgccttcgctcaggccgtgggcacggctgtcgacgacgagaatgttgcagccagcctcggcgtagggctgtgcgaaatagtagctgtagtacagcgactcggtgcggccggggaagatgatggcgcagcgcttgtggccgaagtcgaaatactcgcccgcgagcttcagaccctcgttttcgatgaaaacgggccgcttgtgcgcttcgttttcacgcgcccagtccatgccgaggtcaaacatccgcgtgtgctccggattgggcggatagctgtttgcgcgggtccatttttccggcccggtccggacgagaatgttgtgatacaccttttttgcgatgggccaggtcgctgcgaacattcccaggaacgacagcagcacgaaccccaaaatgagccatatccagaatggcatgggaagatacctccgttttttctttcattatatcgaattttgtcgtctttgtaaacgcagaatcataaaaatacattgttccctcttgaaaaatgaacgcatccatactataatgaatgccgggaaaggggagaacacttatgacaaattttgcgatcctgacggattcctgctctgatctgacggcgccgctgcgcgagcgctttggcgtggacggctatgtgcccggggcgctcgtctacccggacggcagcaatcattatgcggatcttgactggaagaatatgacacccgcgcagtttttcggcacgatgaaggataaaaagggcggcctgttcacctcggcgcagatcggcctgcaggacgttgctgaccggctcgagccgctgctgcagcagggccgggatatcctgttcgtcgccgtgtcctcgggcctgagcggtacatacaacagcacctgcctcgtggcgaatgagctgatggaaaagtaccccgagcggcacatccgctgcgtcgacacgctccgctactgcggtgcggagggtatgctcgtcatcgcggcgacgcgtctgcgcgctgccgggaagacgctggacgaaacggccgactggctggaggagaaccgcctgcgcgtgcaccagatgggcgtgctggaggacctgttcttctgtaagcgcatgggccgcgtctcgggcgcggcggccgtgatgggcacgcttgtcggcatccgcccgcttgcggatatcaatgagaagggcctgagcgacgtcatcggcaaaacgcgcggccttgccccggcgctgaaggcgaccgtcgactatatggcccgcacggtcgagcggccggaggagcagatcatgctcctgtcgcattcggaccgtccggagcgcgcggaggagctgcgcgccatggtcgaggagcgcttccacccgaaggagctgcacgttgtaccggtgtgccagtcgtgcggcgcgtcgatcgggccgggcctgtacgccatcttctattttggccgcccgatctcgtccggcctgacggaggagcgcagcctgatcgcggagctgacgggaaaaacaaaataatcgcgcgggagccagcggcagtcgagccgttggctcccgttttttgctgcaatttacaaaatctggaagttatgtttcggaacatgccaaattcgggcgtcttacaacagaaaatcttggaaaaacctgttgattttccaaaaaacgcgtggtaaaatatttacaactataggctccggagtatgccggggcgtctgggagggagtgcccatgaaacacttgctgcgcgcaatgggcgcagccatgttagcggctctgctgctgtcggcctgttcgacgccgcaggagcagaccgagccgtccgcgccgcagaccacgcaggccacgcaggccgcaaccggcgcgacggaggagtccgcaacggaggcagaggaactgcttgcgctgccgcgtgaccttggcagcggcctgacgctgcaggcggtcctgccgttttccggcccgaatgtggatgcagacggcgcggagagcgaccagcttgccaccatcatcgtgcagaatgacggcggaatggccgtcggcgcggcggatatcaccctgacgtgtgaggacggcgcggagctccgcttccgcgtgacggacctgcccgttggcggctcgtgctacgccttcgagctgaattccgcgcagtacaccggcgagaaccgcgtctgcgcggcctcggcggaggtcgagccggacggctcgctctccgtggactaccgcgtcagcgtgatggtgcaggacggcggcctcgtcctcgtcaacatgacggaggatacgctgcacaacgtcaccgtccgctaccgcacggacaccggcggcacctacttcggcggcctgagctacacggccacggtcgaggagctggcccccggcgcgtcgcagacggtcctcgcggcggaatgctacatgggcctgccctccgtcatcgcggtgacggcagacgaatcgtaatcaccctagaaaaaggaggaaatattgatgagaaaactgagcaaaacgctcctctcgctgctgctgatcgcggcgatgctcgcatcgttcgtcgttctgcccgcagccgcagaggaaccggccgcagagcagccgaccgaggctgtgcaggcggctgagacgcaggcgacggatgatacatcctatcgctataatatcgtccacgtggacgcgggcagaaagtatttcagcccgacaagcatcaaggcgatcatcgacaatgcagctgaggccggtttcaatcaggttgagctgtatctgtctgacaatcagggcttccgctttgccctggatgatatgacggtcacaacctccaccggtaatacctatgacctttccgctgcattgggcgacggttataccgcttccgacgggaagtgcccggatggttccgacaaatatctgacacagagcgagatgacggatatcattgcttacgcaaagagtaagaatgttgagattgtcccgtgcgttaacgcccccggccatatgggcgcgattctagaagagttctcagatttccgctatacctctggttggcagacatcgaagagctcgatcgatcttggaaatgctgaggctgtggcgtttgctcttgcaattacggacaagtacgccaagtactttgcctcgcagggctgcaaatactacaacatcggcgcagatgaatacgcgaatgatctgtcgtccatgggttttgagaacatgggctctgcgctgtatacgaagtttgttgagttcatgaacagtgcagcagacatcatcgtcggctatggtatgacaccgcgtgcgttcaacgatggcttctgctataataagaacgaatataactctgtgactgttgcaccgagcaaggcttatgagatttgctactggtccagcggctggggcggatataatgtcgcttccgcgaaaacacttagctccaatggatataagctgatcaataccaatggtgattactattgggtgctgggcaatttcggctggcagtgttctgccaacaaggcgagcggctttgattacacgaacttctccggcaacacgaagatctccagtccgagcggctcgatgttctgcatctggtgcgactttggcaataccaacggagccgatggcggaacgcaagtcgtttccaaaacggccgatgtgatcgctgctttcggtgcggttctgccgacggtcaggaataatacggcaaccgacgagaacaagactgtttccgatgccagcttcccggaaatctctgtgactggaccgaacctgacgaaggttactgtgaccgagactgacgcgccggcgaacctccccgctggcgtgaccgccgcgaaggcgtgggacattgttccctacgttggtgaagacgagtatcatgatgccgctaaggtcacgttgccgattccgacgaaatggaccggcgcggatgtctatggcggcgtcatcgaaaatggggaagtcaagcccattaaggatgtcgagctggacgaagaggcagatacgctgacctttaccgtgccgcatttctcgacggtcatggtgcttgaggcagagaagattgaaaatatcacggttgtcctgaacgacactaaggtaattaccttagatggcaatgtgaccccgattgatgaaactgggctggataagaccattgcaaccgtcagtgctgagtatacgaagacggatgagacagaggactatgttgaaatcgatactctggccgatacggatgcgcagacaaacggaatcatcattggcgatgggacaaattggcttgttgtaagcggaagcaatatcagctccactactgacaagaataaagccacgctctttactattggtggctcggaaaatgcgtatactcttcaagtaggcagtagtcgctattatttgcgggctagaagttatagtggactcggattgaacagtgatacctccagctattatcgcaattattggaaatatgcaagtaaagaaaagggattcttgtatgagtatacgggttggcaaggtactacttatagtggcgcgctgatttacaataatgatgagtggtgcgtaaaatccaacgagactgtcggtgcaaaggcatatacgaaaaagccaattcctgccgccaagactgtcctgacgttcaccggcgttgcagaaggcactacgtccgttaaggttggcaatatccgctacaacattactgtcgttccggagaatgtgaaggatgtaactccgctgacaatcgagtattggatcacgaacagatatgtgtccgagggtacgacttacaacgacgcgaaaaaaacgatgtctctgagtgccactacggcgtacaagccggagggcgtggtgcttgcagaaatcgtaccagcaactggcacgattgagggcggtgcaactggtgtttactggaagagcagacaactgccttctacggataagcagacgcacacctctggcgtcgataagacgacggtaacgaccggtacggatatcacgcgcgttcgttactggggcaaagcttggcagtattccagcgacgatggcaagacgtggaaaacctttgaatcgacagatcaggttgtcgcgtactatctgcagaagactactgttacggatgaaatccaaacggaagttgccgactggggtgagaacttcccgtactctattaaccagtatgtccttgtggattatgctgtgaagcttgagtccggcgagcgtgtccccgataagttcccaattacaaataaaacacaggttttccactgcacacatggtgacctggcttgtgctcaggattccagtggcaactattaccgcaatatcggctatattagggcgaaagagaccgccgattatgaggtatatatgatcaccctgacaccgacatctgatagcattaatacaacgctggcatcgaatgcatatagcatcggaacacagcagagtaatttctatgccggtacggaaaaggttatctgggttgacgatgaagccaacttgggtgattttgcggatgaaagcaagcacttcaccagcattaacggcgatttttcttacagtgttggtggcgaacctgccgttcctggactccagatttatgatcgtcatggtatgctcattacctactatgttcgtaccaagactactgaggattccctgacggtgcactacatcgataagacggccaatcaggagttctattcctacaatattgctgttgcgcagggaacatactttaacgcgaatatcggcctgaataaagatgcttggaagggcccgcttgtgaatggcgaagtgacgaacctgaagggaaatatacagacggtttctgcagatttgagcactctgcctgcactcagcgcacagtaccgttacagtgattatacctgcgttgaagtaacgcgcagcgaggccgatgcggaaaccggaacaccggccggtaaggaggtctacctgtattataccttcaacagtaaacatacctttgttgttgactttggcgtaccgctgaagatcggcgcgaaagatatcaacctgagtgagaccggatggacgaccgcgaaggtcaacaacgtatcggagtatgaggcactgtatggcacggcaaaaatcagtttaaacgagggcctgacctacacgctgacaaagccgatgcagggtgttgagacgctgcaggttacgctgggcaaggagggggaaaaacctgctacccataccatctaccttgtccccgcgacgacggtctactatgagcagaacgttgcgacctacagcgatggctggagcttgaatggaaccgcgattgcagcggacaagtatcaggaaacccagaagggccgcacggcgggttgtaacttcggctatgatccgtattacaaagagaaccaactgggtgcaaacggttctgtgatgtacacgaccacgccgggcgaaagtgctcagctgaccttcaagggcacgggcatggagctgtatctccgcacgcagaatgcgaacgcaacatctgacccggcgaccgaggccaataatgccacggatcattcttacatgctcgttcaggtctatgccggtgatacggccgaagcaaacagcctgaagcgcatgagcttcgtcgacgtgaacaacctgttcgtggcacatggctctgacaagtacggctacaacaccccgtgctggacggtcgatggcatggcctacggcacctacacggtcgttgtccgctatgtcaagggcacgacctacggccttgccatcgacggcttccgcgtgacgaacacgctgaatccgagcgatgccacgacgaacggcttctatgctgatgtctacgaggccaacatgcagactgccgagatccgcaatatggttctcgcaaaggcaaatgtaaacaatgccatctttggaatgtccgccccgatgtatcaggtcggcgttgatgaagttctggatgccgtattcgatgacaaggatgtcattgctggcgcaacaattattgaatcgaatggcacggtcactacaaatgttacggtcgacaaagaccttgtcaacatcggcccgaagaatgagatctatctcgagccgggtcaggccgttgtgatggagcttaccgggacctacgcctccgtgcaggtcggtatgcgtagcctgacgggcgcggcagtgacctatcagatcaacagcgagacggcgaaaacaatgaactccaccgttgacatgtattacccggttaagcttgttgggaatatgctcgtcattcggaatacttccgaaaacgatgaaattctcgccctgacgaagctgaaggtcacctctgcgacggcggcaaccgggaatgaccccggcgtggtcccgcagaccacccccgaggcgatccgctacgcgatggcgctgatgcgtggccttgaggtcccgcagttcaccgacgtgcccgagggcgcctggtatcacgactacgtctacgacctcgtctaccgcggtgtcgtcaacggcatgaccgccacgacctacgagccggagggcaagctcacccgtgcccagttcgtcaagctgctggcctgctccctcgcggacgccgaaacgctcaagacctacgagggcaagcatccgtttaaggacagcgagggccactgggccgagacctacatcgcgtgggccaaggacaagggcatcgtcgagggtgtctccgccacggagttcgaccccgaggcgccgatcacccgcgagcagatggctacgatcttcggccgctacgccctgaagcagggcatcgagctgccgaagtccgacaacgcggccgggtccttcccggacgccgacaagatttccgagtatgcccgtgagttcgtcgagctcatgcgcatcgcgggcatcctgaacggctacgaggacggcacgttccgtccgcagggcaacgccacccgcgcggaggcagccaagctgttctccctgttcctgtccatcacggacaagctcgcaaaataaacccattgccgccgccctcccgggcggcggcatcttgtcaaaaaagtccctttggactttttcgccaagctgcccccagaattgcaaaatataattttgtagtattattttgcaattctgccgctgcggcgggttattgaacgcgaaaggaaaccctgacggtttcctttcacacttttcttccctccgtagctttcggctgagcaattttccaatcaggcgggggcgaatatttgcaaaaatggggaccaccggcttcgccggtggtccccaaataattttaacttttctcgcaacaccgagctaccatttcctccatcatgccctgccgtaggtggcacagcagccggaactgctccacgatgtccgcctgcatgccctggctcatccaaagtacgatctgcccatagcactcgcactggtaaaaccgcacgaggacctcccggtccgcctctggcagcgccttcccggcaaacgccgtgtcaaaatagctgcccaccacgctgtggcagatgtccatcaggctgtgctcataggcctcgtggctggcggaattgtaaagatgcagcacggccgttcggttctgcagggcaaattccacggcgatctccaggcactgctccagcgagtcgaccgtcgggtactcctgcacgatgcgcgcggcctcgtccttgacgatctcctcggccagcgcgggaatatccgtgtagtgataatagaacgaattgcggttgatgccgcagtcctccacgatgtccttgactgtgatcttgttgagcggacgctcgttgagcagcttcaggaacgaagcgcggatcgcacgcttggtcagcgatgtcacgggctgcaccttcctttcctgcccattatgccacagaccgggattttttgcaaggaaaaaaacagggccgccggagcggccccgcttgtggatcattttgctgcgttgcgcaggatgcacttgagcgtccgcacggcggcctccatgtcctcgaccgggacgtactcgaaccggccgtggtaattctcaccgcccgtgaacaggttcgggcaggggagcccctcgtaggataggcgcgcgccgtccgtgccgccgcggatgggcacgacgcgcggcgtgacgcccgcatcgcgcatggcctgctgcgccgcctcgacgatggccatgtgcggctcgatcttctcacgcatgttgtagtagctgtcgcgcagggcgacttcgaccgttcccgcgccgtatttcgcgttcaggaaggccgccgcggactcgaacagcgccttgcgcgcctcgaacgacgcgcggtcgtggtcgcggatgatgtattcgagcgtcgccagctccacctcgccctgcatggcgcacaggtggctgaagccctcgtagccctccgtggcctccgggcggtcgtgcaccggcagcatgccgtggaactccatggcgatgagctgcgcgttgaccatgcagcgcttggccgagccggggtgaacgttgcgtccgtggacggtcacaacggcggaggcggcgttgaaattctcatattccagctcgccgagcgtgccgccgtcgacggtgtaggcgtagtccgcgccgaaatgcgccagatcgaagcggtccgcgccgcggccgatctcctcatccggggtgaagccgatgcgcagggacgcgtgcgcgccgccctcggccagcagctcctccacggcggtgagaatttccgcgatgcccgccttgtcgtccgcgccgagcagcgtcgtgccgtccgtgacgatcaggtgcttgccgatgctgcggctcaggatcgggaaatcctcggggctgagcaccgtattttcgttcagcgcgatgtcgccgccgttgtattccacgatacgcggcttgatgtccttgccggagcagtccggcgaggtatccatatgggcaatgaggccgatggcgggcgcaccgggcgtgccgggcacggagccgtagacatagccgtccgcgtcgatgcgggcgtccgcaataccgagcgcgcgcatctcctccacgagcgcttcgccgagcagcttctgcttcgcggtcgaggggcaggtctccgagctctcatccgactgcgtgtcgaaggaaacatagtgcagaaggcgttccgttaccgtcatatccgttctcctttccaattgtcgaaaactgccccggcgtttggccggggcagaaattttttcttacttgccgcagagcgctgcagtgtcctgcgcgatcatgagctcttcgttcgtggggatgacccagaccttcacgcgggaatcgtccgcggagatgagggcttcctcgccgcgcaccttgttgcgctccgggtcgagcttgacgccgaggaattccagaccctcgcagatggcggcgcggttcgtgcagccgttctcgccgacgccggccgtgaagaccaggcagtccagaccgccgagcgcggcggcgtaggcgccgatatacttgcggacctcgtagcagaacttgtccagcgcgagctggcaggcctcgtcgcccttgttggcgccggcctcgagatcacggaagtcggaggacacgccgttcgacagagccagcacgccggacttcttgttcagcatcgtcaggcactcgtcggccgtcatgttgtacttgtccatgatgaactgcgcaacgcaagtgtcgatatcgcccgcgcgggtgcccatgggaacaccggccagcggggacaggcccatggacgtatcctggcacttgccgtccgcaacggcggagagggaagagccgttgccgaggtggcagacgatgatcttcagctcgcttgcgggcttgcccatcagctcgatggcacgcttggagacgtagcggtgggacgtgccgtggaagccgtagcggcggaggtgatcttcctcataatacttcgtgggaatggcgtagcgataggccttcgggggcatggtcatatggaacgcagtgtcgaacacggcgacctggggcttgcccggcatgaccttctcgcaggcctcgatgcccatgaggttggcggggttgtggagcgggccgagggggatgcagtcgcggatggcctgcttgcaggcttcgtcgatgatgcaggattcgacgaacttgtcgccgccgtgcagcacgcgatggccgatggcatcgatctcgtccgtggacttcagaacgccgtactccggatcgacaaggatggacaggacggcctcaatggcttcagaatgcgtgggcatggggatgtcgcgctcgaccttcagaccggtggcggggaccttgtgtgtcagcttgccatcgatgtagatgcgctcgcacaggcccttggcgaagacctcaccggaggtcgggtccatcagctggtacttcagcgaagagctgcctgcattgatcacgagaattttcatggttgtgtcaactcctgtaaaaacattgttttcttttcttcaatttcgtgatagtattaacacatacggctttattctataataaattggcgcatgatacaagtgcttttttgggaaatgaggaattttttgtgaggatcgccggaatcatctgcgaatataaccccttccacaacggccatgcccatcagctcgctgtgctgcgggaggcgggctatgcgccggtgtgcgtgatgagcggggactatgtccagcggggagagccagctgtcatcccggctgcgtcacgggccgaggctgccgttcgctgcggggcggcgctggtgctcgagctgccgccgagctatgcgctccgctcggcagagggctttgcggacggcggcgtggagctgctcgaccgcctcggctgcgcggaggcgctgtgcttcggcagcgagagcggcgatgcggaggccctgctggctacggcgcgaacgctgctgtctccggagcttgtgccgctgctgaagcaggagcttgcgggcggcgcctcgttcccggcggcgcggcagcgggcgctggaacggcttggcgcgcccggtgcggcgctgctggagcggcccaattccattcttgcggtggaatactgcaaggccctgctgcggcgcgggtctgccatgcggccgatcgtgctgcaccgcgcgggggattatcacggcgggagcgctgcggatgcgccttcggccagcttcctgcgcgggcaggcggactggactgactatatgccggaggctgcgcgggccgtgcaggccgctgcaccgcgatataggctggcggcgggggagcgggccatgcttgcgcgcctgcgggccatgactgcggcggaatttgccgcgctgccgtacggctccgagggcctgtggcagaaggtgatgcatgcctgccgcacggaggcgtcgctagagggcatcctcgcggccgtaaaatcgaagcgctatccgcgcacccggctgatgcggatgctcctgtgcggctttctgggcctgacggagcagcagctgaccgagcctgcgccctatgtgcgcgtgctggcgctcgatgcggacggccgggccatcctgcgggcggcgcagggcgggctcccgctcctgcatgcgggagagcgcgcacaggactgcgcgtttgcggaaacggagcggcgctgccgcgcgctttatggcctgttccgggagaacgggcccgcggagccttctccgaaaatgcgcgtctatgtgcaaagggattgacatcgggcagcatttcccatacaatcatttccagatgcgcacggcgcacggaaaaggagagagaaaaatggcaattatgcttcggctcaaatgcccgtcctgcggcgaagtcatgaacgcggcaggcttctgcaattgcaccaaatgcggcacaccgatccgctacaacggctggggaatgctgcagatctaccgcatgggctccccggtcagcatcgcggcaggctacggcatttatctggacggccagccctacggccatctggccaacaaggagagcatccgcatcccgctcccgatggggacgcacacgctgcacatgacctgcggcatgacgcgccggtgtcaggacctgacgtttacgctgacccccgaagcgcccgccgcctatgtcaaggccgccatccggatgggcttctggacgaattcgatcagcctgactccagcgaaccccggcgatatgccgcaggaataaaaaagttacagcagatgcccggaaaaaacaaaaataatgcttgcaattctgcgaaaactgtggtaagatagtcgggcattgaaaataagaggggcatcatgcccttttacgaaacgagaaagaggtgaaagcaatgaaggaaggaatccatccgaagtacgaacagacgacgattcgatgcgcgtgcggtgagatcattgagaccggttccacgaagaaggacatcaaggtcgaaatttgctccaagtgccaccctttctataccggcaagcagaagctggttgataccggcggacgcgttgaccgctttaacaagaagtttggcctgaagtaaagaatgaacgaaaagtctgcatcgtatcggtgcggacttttttcatacttttttcgggaaaatacgcagctcctgccgccggccgcaccggtcagcggctctggggagcccagtcagaattttggaggtagtcatgcagcagaatgatcgagtcaaagcagagaaggccatcctggtcggcctgagcgcggactgcttccggccggaggagaacgccacggacgagtcgctggacgagctggaggctctcctcgagacggcgggcggcatctgtgaggcaaaggtgctgcagaaccgccacacgccggacccgcacagcttcatcggcgagggaaaggcgcaggaggtgcgcacgctgctcgagagcacgggcgcgacgctcgttgtatttgacaacgacctctcgccgtcccagatccgcgcgctggaggagctgacggatgcgaccgtcctggaccgcagcgccctgatattggatatctttgcccagcgcgccaagacggccgagggccgcctgcaggtcgagctggcgcagtatcagtatctgctgccgaagctctccggtatgggcacgtcgatgtcccgcctgggcggcggcatcggcacgcgcggccccggcgagacgaagctcgaaacggaccgccgccacatccgcgagcgcatcacccgcctgcaggcggagctggacgaggtgcgccgcgtgcgcgccacgcagcgtgagcgccgtgtgaaaaattccatgcccgtcgtggcgctggtcggctacacaaatgcaggcaagtccaccctgctcaacgctctcacgggcgcgggcatcccggccaacgaccggctgtttgacacgctggacacgacgacccgccgcctgaaggtgtcggatcatctggagatcctgctgtccgataccgtcggcttcattgccaagctgccgcatcatctcatcgaggcctttcaggctacgctggaagagctgcagtatgcggacctgctgctgcatgtcatcgatgcgtccgacccgcaccgcgaggcgcacatcgaggttgtcgaccggctgatcgacaagctggcgaagcccggcgtgcccgtgctgcgctgctataacaaggccgacctcgtcggcgatgtctcgaatctccccatcggcgagaagaacatccccatgtgcgcgcgcagcggcatcggcatggacgagctgctcacgcgcatcgaggagacgctgacgggccggctccatcgggccgtgttcctgctgccgtattccgacgcgggggcgctggcccagctgcacgagcaggcgcaggtgctccgcgtggattacctgccggagggcgtcgaggtcgaggctgtctgccgcgaggagctgttcggccgcctgaagcgctttgtaaaggagccggaggcatgaaggagtatctcgtccccaccggcgacggcgaggcacagttcatcgagcgccgctcccgcttcatcgggcacatcttcctgacggagacggaggaggaggcgctcgcgcggctgaagcagatgcgcgagcagtactgggatgcgacccacaatgtctatgcctacatcatccgcgacggcgcaacgcgcttttccgatgacggcgagccgggcggcacggcgggtatgccggtgctgcaggtgctgcagcgggaggagctgtacaatgtaacgtgtgttgtgacgcgctatttcggcggcatcctgctcggcgcgggcggccttgtgcgcgcctatgctcacggagccaagatcgccgtggacgccgcagggcgctccatcaagcgcgtctggacgaatgtctatctgccgtgcccctacagctggtatgagcgcatccgcctcgaggtcgccgcattcggcggcatgatccgcgagacgcagttcggcgcggatgtcgagctggatctgctgctgccggaggagcagacgcagggcttcctcgagcgggtgaccgacctttcggccgggacgatcgaggggctgatcggaaaacaggaataccgcgcgttcccgcttccctgagcggacgcgccgagcgacagacgggaggaaatgccgatgacgatccgggaagaactggaatggaccgagcacctttgcctcagtgagcgtgcgcagttttccgatgccacgcgcggccgtccgcggccggaggaggcgcaggaaaacgacgtgcggacctgctatcagcgggattccgatcgcatcctgcacagcaagtccttccgccgccttatgcacaagacgcaggtcttcctgcagccggagggcgatcactaccgcacgcgtatgacgcacacgctggaggtcgcgcgcatcgcgcgcaccatcacgcgcgccctgcgtctgaacgaggacctgtccgaggccattgccttcggccacgatctcggtcacacgccgttcggccacgcgggcgaggttgcgctgacggaggtcatgggcgagccgttccgccataacgagcagtctctgcgcgttgtggacgtgctggagaaggacgggcagggcctgaacctgacctatgaggttcgcatgggtatcctcggccattcgagccacagccgcatgccggagacgctcgaggggcagatcgtccgcaaatccgaccagatcgcctatatcaaccacgacatcgacgacgccatgcgcgccgggatcctgacgaatgacgacattccgcgcgagatctccgatgtgctcggcgagacccaccgcgagcgcatcaatacgctcgtgacggatatgatcttccactcacgcggcacgggagagctgggcatgacgcccgagatcgagcagaccatgcaggccctgcgccagttcatgtttgagcgcgtctacaagaatccggtcgccaaaggcgaggaatccaaggcccgccgcatcctgcaggagctttatacctattacatcgcccatcccgaggcgctgccgcaggatttccagccgcagctcacgttcgaggggcttccgcgcgtcgtgtgcgattatatcgcgggcatgacggacaaatatgccatgtacaagtatgacgagctgttcattccgaccggctggcaggtgcgtggctgaaaggaggcagagccgtggcttttcccccggcatttctggatgaactcaacgcccggaatcccatcgaggacgtcgtcgggcaatatgtcgcgctgacgcgccggggcagcaatctgttcggcctctgccccttccatggcgaaaagacgccatcgttctccgtcgcgccggagaagggtattttctactgcttcggctgccacaagggcggcggcgtggtgaatttcatcatggagatcgagaacctcacctacggcgacgccgtgcgctttctggcaaagcgcgcgggcctcgaggtcccggacgacggcgcttatcagtcgcagtataagaaaaaagaacggctctgggcactgtgccgcgcggcggcacagttctatcacgcccagctcaagaccccggcgggagaggaggcgcgggcctatctgcagaagcgcggtgtctccggccagacggtcacacgctttggcctcggctattcgccgaatcgctggacggctctgcttgacgttatgacggcaaagggctacacgaaggaggaactgcttgaggcgggcctcctcagccagaaccgcgacaaggggacgctctatgaccgcttccgcaaccgcctgatgttccccatcatcgacgtgcgcggcaatgtcatcggcttcggcggccgcgtcatggacgattcgacgccgaagtacctgaactcgccggaaacgattatttttaacaagcggcggaaccttttcgccatgaatgtcgtcaagaaaagcaagcgggaattcatcatcctcacggagggctatatggatgccatcgcgctgcatcaatatggcttcgactgtgcggtggcctcgctcggcacctcgctgacgcaggagcacgcggacatgctgtccaaatataccgatgagcttgtgctgacctacgacggcgacgaggccgggcagaacgccacccagcgtgccatccccatgctggagcggacgggcctgcgggtgcgcatcctgcggatgcgcggcgcaaaggacccggatgaattcctgaagaaatacggcgcggaccgcttccgcctgctgctggagggctgcgaaaatcaggcagagtaccgcctgcgctcgctgcagatgcgctttgacctctcgcaggacgagcagaaggtggaatttgccaagcaggccgccgcccttatcgcgggcttcggcacggcggtggagcgcgaggtctacggcacgcgtgccgccgaggcggcagggctttcgccggacgtgctgcgcatggagatcgaccgcgcccgcaagcgcctgctgcggcaggagaagcgcgaggagacgcgccgggagatggacccggccgcagccgttcagccgttccagcgcgagctgcgctacgacaacctccgctccgccgtggcggaggaggggctgctgcgcatgctgttccgcgagcctgctctgctggcgcagacggagggcctgacggcggaggatttctccgtgccgctgttcggccgggtctatgccgctctgcgcgagcggtggcagaacgatcttgccatcacgcctgcggcgctggcggacagcctgagcccggcggaaatggcgcatctgacggccgtgctgcagaagcaggagccgccgctgtccgaaacggcgctggcggattacctgcgcatcctgcgtgaggagcgggccaaggcgcgcgtgagcgacgccagcgacctgcttgccatgcagcgggatctgaagaagaaaaaaggatatggaggttcgtaagcgatggaagaacaggtgcagatgaacgagaagctccgcgcgcttttggaaaaggcgaagcgggagaaaaagatcgcctccaaggacctcatcgatacgctcgaggcgatcaatgcggatgaaaagcagacggagctgatctacgaggcgctggacgaggccggagtggagatcgacgtctccgacgtcgtggagctgctgtccaagccggaggagatgctcccgagcgaggaggacctcgagctgatcgaggaggagaagatcatcgacacggaggatctctccgaaaatatgagcctgaacgacccggtgcgcatgtacctcaaggagatcggcaagatccccctgctcacgctggaggaggagcacaagctcgccgtgcgcatggccgagggcgatgaagaggcccagaaaaaaatgacggaggctaaccttcgtctcgtcgtttccatcgcaaagcgttatgtcggccgcggcctgccgttcctcgatctcatccaggagggcaatctcggcctcatcaaggccgtcggcaagttcgactacacgaagggctataaattctccacctatgcgacctggtggatccgacaggccatttcccgcgccattgccgaccacgcccgcacgatccgcattccggtacacatggtcgagaccatcaaccgcgtctcccgcgccaaccatgagctgctgcaggagctgggccacgagccgtcgcccgaggagatcgcgcacaagctgcatctcccgctggagaaggtcgaggaggtcatgcgcatcgggcaggagcccatctcactcgagacgccggtcggcgaggaggatgacagccacctcggcgacttcattcaggacgacgaggccgaggagcctgcggatgccgcgtcctatgccatgctgcgcgagcagctggcgggcgtgctgaagacgctcacgccgcgggaggagcgcgtgctgcgcctgcgttacggcctgacggacggccgcatgcatacgctggaggaagtcggggaagaatttaacgtcacacgcgagcgcatccgccagattgaggcgaaggctctgcgcaagctgcgccatccgtcgcgttctaaagtgctgaaagactttttaggatgacagctggaacgcccctgaaaaaatttctcttgactttacggaaaaaatccgtatgatatagagaggagagaggcgcgactttgcagcgcgtcaaagacaggagcgaagaacgatgtttgaacggatcacgacatatctggcagagcagttcgatttcccgaaggattcgctgcactgggatacgacgtttaagagcctgcagcttgactcgatggacatggtcgaaatgatgatggacatggaagaagagctcggcgtggattttgaccagaacgatatggcagagctgaccaccatcggtgagcttgccgattacattgaaaagaagctgaacgagggctgaatcaggccattccggtctgtgacaaggtcgcactagtcggggagatagcggtgccctgtgacctgcaatccgctatagcagggatgaactcccatacccgggttcgtgctgttttgctgtccgaataagcggtgttgaggcatcggtcttgcgcaacgggctcccgtgaaccatgtcaggcggggaaccgagcagcattaagcggatctgtccgtgtgccgcaaggacgccgctgctgagctggctgttcgggaaacggaaatggttccggattcaaatatgggtgtgcgatcttgtcatggatcggaatggacaatagaacgcgcggaagggacgcccctcccgcgcgttttttgcaccggcgcgattgcaatttgcgctgttttcgcgtatactatgcactgggagatgatgacatgtatcaggcactttaccgcaaataccgcccgcagacctttgacgacgtcgtcggtcagcagggcgtgacccagactctgaagaatcagctccagaccggccgcctgagccatgcctatctgttcacgggcacgcgcggaaccggcaagacgacctgcgctaaaattctggccaaggctgtgaactgcgaaaacccgcaggacggcaacccctgcaaccgctgcgccgcctgccggagcatcgatgcgggcgcgtgcatggacgtgctggagatcgacgccgcctcgaataacggcgtggacagcgtccgcgccctgcgcgacgacgccgtctataccccggcggaggtcaaaaagcgcgtgtatatcatcgacgaggtgcatatgctctcgctgagcgcgttcaacgccctgctcaagatcatcgaggagccgccggagcacctgctgttcattctggcgacgacggagctgcataaggtgccggccacgatcctgtcgcgctgccagcgctttgccttccggcgcatcgtgccggaggatatcgtgggccgtctgaattatatcgcctatcaggagagcatcgagctcgagccggatgcggctgcgtttctggcgcggctggcggacggcggcctgcgcgatgcggtgagcctgctcgaccagtgcgcctccgctgcgcagggcgcggtgacggtcgacgaggcctgcaaggtcctcggcctcgcgggcgcgaggcagacggcggcgctcatggaggccgttggcaggcatgatgcggctgcagcactctcgattttcaacacgcagtatgccgagggcaaggacctcggcgccatgctggacgagctgtgcgccgtggcgcgcgacctgctcatcctgcgcacggccccgcaggccgggatccagatgatctccggaatctgcacgccgcaggagctgcgcacgctgcagccgctgctcagcccgggcgagctgctgcgcatcacggccgtcctgcgcgatacggcggcgggcttcaatgccagcgcgaaccgacgcatcgacgccgagctctgccttgtgcgcctgtgcgagccggaggccagtctggatgccgagtcgctcaatgcccgcctgtgccgcgtggaggagcgtctggcgcgcggcgtcgtgcccgtcgcggctgcgccgcaggcggagcaggcacagcaggaaaccgcagcgccggagaagccggaggcggccccggtgccgcagcagcctgcgcccacggaggccccgccgggcttctggccggagctcgtcaagcggctgaaaacgacgctcccgctcccggagcaggccatgttctccacgcaggacaacgcgccggtgcgcggtacgctgcatggggaccttctggagctgcagacggagacggaattcgtgcggaacctcatcaacaagccggaggtccttcagccggtggcggatgctgccacggccctgctgggcaggtccgtgcgggtgcgcatcgcctccggtaaggcagagaagccgaacgagggcttcgcgcggctcgtgagcttcggggaggagcacccggaactggtcgagctgaagtaagaaaaaattccaacttgaaaaaggagaatgtcactatggcaaaaggcggtttccgcggcccgatgggcggcggcatgaacatgaacatgatcaagcaggcccagaaaatgcagcaggacatgctgaaaatgcaggaggagctggaggtcaagcagtatgaggctgctgcgggcggcggcgtggtcaaggccgtcgtgaacggcaagcacgaggtcgtctccctgacgatcgacccggaggccgtggaccccgaggatgtcgaaatgctgcaggatatggtcgtggccgcagtgaacgaggccatgcgcaaggccgaggccgaggcgtcgcagaatatgtcccgcctgaccggcggcctgaatctcggcggcctgttctgatgcgcgtttttcccgccgcattggagcggctgacggaacagtttgccaagctgccgggcatcggcggcaagacggcgcagcggctggcgttctacttactctcccagccgcaggaggaggcagaggaattcgccgacgccctgctcgaggcgcggaagtctgtccacctgtgccccgtgtgccagaacctgacggaccgtgatatctgccccatctgcgaggatgaggagcgtgaccacggtctcgtctgcgtcgtggcggagccaaaggatgttgtcgccatggagcgcgcccgggaataccacggcgtgtaccatgtgctgcacggcgtgatctccccgctgaatcaggtcggcccggacgatctgcgcatccgcgagctgcttgagcgtgtcggcaagggcggcgtgcgcgaggtcatcatggccacgaacccggacacggagggcgaggcgaccgccatgtatctttcccgcctgctgcgcccgctggaggtgcgcgtgacgcgccttgcctacggcattcccgtcggcagccagctggagtatgccgacgaggtcacgctgctgcgcgcgctcgagggcagaagagacatctgaaaaaaacgctgcgatccaaccggggaccgcagcgttttttctatcattttatgggcctcagcgctccgttccgaggaagaacagggccagtgtgccgggaccggagtgcgcaccaatgaccgggccgacgtagttgatctcgatgcgcgggacgtgcaggcggcggcggacctcctgcgccaggaattccgcgtctgcaaggcagtcgccgtggctgatgaagacggtctgcttttccggctcaatggcacttctctccatgcggtcgaccagcgcgaggatggagtttttgcggccgcgggccttcgagacgttgatgaggtggccttcgttgtccacatgaagcacgggcttgatgccgagcgcgctgccgacgagggccgtcgccgccgagacgcggccgccgcgcttcaggaagaacagatcgtcgaccgtgaaccagtggcacaggtgcaggcggttgtcttcagcgtactttgcagcctcctccagcgttgcgccgtgcttcagctcctgcacggtcagccagaccagcaggccctgacccatggaggcgcacagcgtgtcgaccgtcagaaccttccgctcgggatagcgctcgcgcagctcctgcgcggcgatctcggaggcgctgtaggtgctgctcagaccggatgagaagccgagatacagcacgtccttgccctgctccagatggcgggacattgccgtgaggaacgtttcgacgttcgcggctgcggtcttggcgtttgcgccgctgcgcagcatgccgtaaaactcgctggttttgatctcgcgctcatccggatagtccaggaaggtccggtcgccgcagttgacactcagcgggatgatatccacgcccagctcctgctccagtgccggattcaggtcagcagaggagtcggtcatcacaacataattcttttccatcgttcttacctcccggagttctttacataatacagaaggatctccgcagacgagcggataatcttcatttgtgttgcttcgtcgatcagaatgcggaaattgacgccgcccgtgagcaggttcacgagattgaggtagaccatctcaagatcgaggtcgcggcggacggagccgtcctccatgccgcgcacgagcgcctcgcgccccggtttgtccagcccggtcgccacggggcggctgaagcacatgtagcgcacggattccgtcagctgctcgcgcagggcatagaacgccatgtcctgcagaaagcggatgtattccggatgggcctcgtaggtatcgatatatgcacccaatatgcgggaaaacgtctcataaccgttctccggcgcgccgctccgggcggcctcgcagcgcgcactgtgctcggcgagatatgcgtcgagcagatgattggcgacggcgacggcaatggcctgcttgctgccgaaatagcggtagacggacatcggcgtcagatcggcgtcctcggcgatctcggcgatggtggtcttgtcaatgctctgggcgaggaagcgcccctgtgccgcccgaatgacggcggcgcggttctgctcgcgcagctccttttgggtcataaggcaccccagctttctgatagtatcactatctatctgtgatacattataacaaaacggcgcgggcctgtcaacacttccgcgtcgaacagacccgcgtcaaatcgggaatatggttcagccgaagatcaggatcgtgccgatggtcagcacgggctgatgcagcatgtagatgagcagcgaatgccgcccgcagaacgagaaaaagcggatgacgggatttgcggcgttcacgcgcggcagcaggctctgctttttgcggtaggcggtgcggccgatgaccgcgccgagcaggaaccagccgaagcccggcagcagcgggaagtagtctccgccgcagtagaagccctgggcccgcaggccgagcgggaacagaaacttcacggggatgtagaacgtctcgaaccaggcgccgagcgccacaaaggccacgcccagcacggccagcgcccataccggcagccgcttgaacagcgggaagagcatcatgcacacaccgagcagatgcaggatgccgaaccagatgagcatatcgtccggaaagttcaggacttgcaccataaaaaacgtgacatacgagatcacaagggccgcgccgaacacatacacgccgcgctgaaagctgcgcgaggccagcgtggcacacaggccggagagcaggatgaacaggatatggccgtactgccggcagaacaggaaccagcccggcagatcaaatgtaaagccgccgaaggcgctcaggtcccagaacgcatggatgatgaccatgcacaggatgcacagcccgcgcagggcatccagctcccagatgcgctgctttgcgggcagagaggtttcatttgtcatgcgttctgctccttttccgcttcctcctccagcacacggtaggcgaccttgccgacgagcgtcttgggaagctcctcccggaattcgatctcatagggcattgcatatttggcgatgcgcttgcggcagtaggccatcaggtcctgccggactgcttccgtcggggcgactcccggcttcagcacgacgaaggccttgaccttctgcattttataggaatccttcacgccgatgacgcacgacagcagaacgttttcgttgccgtcgatgatattctccagttggcttggatagacgttgtagcccgaggtgatgatcatgcgcttgatgcgctggcggaagtagacaaagccgtctgtatccatgcagccgaggtcgccggtgtgcagccagatgcggccgtcgttgtgccgctgcagaacgagcgccgtctccttcggattgtcgagatagccgagcatgaccgtcgggccggacaggcagatctcgccctcctcgccgggggcgacctcctccgttgtgccggggcggacgatcttatagaaggtgtcggggaagggaatgccgatggagccgtcgcgcgcggtgtcgaccggcgtcaggcagctggccgttacgcattccgtcgtgccgtagccctcgcggatctgcaccttggcattgtgcgcgcgcaggaaggcgtcgaccttgtgcttcagctccacggacagggagtcgccgccggagaatacgcccatgaggaacgacatgtcgagcttttccaacccggtcgtgcgcagcagagcctcgaacagcgtcggcacgccggggatgaagttcgggtgctttttgcgcagcaggtcggcataggtccggatgttgaaattcggcacgaggatgcagcaggctccgccgacgagcgccgtgtggatgccgatgccgaggccgaagccgtggaacacgggcatgacggagagcatcgtgcagccgcggatgctttcatagccgctggctgcgatggtctgcagcgcaagagcgttgaaattgtagctggaaaggcagatgcccttcgtcgtgccggtcgtgccgccggaatagaggatgctggcgcaggcatcgcactggccgtcgtccggcggaagcgtacctgcggctttgcgcagcaggtccgtccagagcgtgcagccctcctgtgggagcttcggtgttttgcggccctgcgtcaggtcatagccgaggcgcatgagcggcttcagctccggctgcaggcgggcgatccagagcttcggcttgcgcttggcccgtgcggcggccgcggctaccttgccgtaaaagcggtcgagcgttaaaatggcctgactgcccgagacatcgaggtagaagcggatctcctcctcggcggacaggggatggatcatattggacacggccccgatgcggttgagcgcgtagaagcagtcgagagcctgcggcgtattcggcatgcagatcgtcacgcggtcgcccgcgcggatgcctgcggtgtagagcgcgagggcggcgcggtcgatgcgcgccagaaaatcgcggtagctcgttctgcggcccatgaactcataggcgggcagatccgggcattcccgcgcggtctgcgcgacgagctggtagatggtcaggcgcggataattcagcgtgcggggaatcgcaccgtaataattcagccacggtgcttctgcagagatcggcataggcttgcctcctgaaatcggttttcctcattatagcagagaattaccggaaagaaaaggtacaatcgacgtcaaatgtcaggccgcccggaaagagcaagtgatattccgggctttgcccggagtgatattttcctattcgggaagtgatataaaagcctctcggtttttgtgatattatattcgcccgttaaactgccgcaggcaatatcacgatgcgaagtatcctatcactgtccgaaggacaatttcactcgctgtcaggcgaatataactgaggcgcacttccttccagagtgcgcctctcggcagggcatttttattttgcgggtgtgctgctgtggccgggcagcaaaatcgggctttcttttttcgcgcggatgtactaaaatataagggtaaaaacaaggataaaccatttcgccctacagccgatccggcgggggcttctcgacagggagtaattatgacacaggaactggagcagcgcttttgcgccgcacgcagagattatatcgcctcgcgcttttcgcgcatgaatccgcgtcagctcgaggctgttctgaccacggaggggccgctcctgctgctggccggcgccggcagcggcaagacgaccgttctcatccaccgcatcgccaatctgatccgttatggctgcgcctccgacagcacggaggttccgccggatgccgtgccggaggacatcgattttctggaggagcaggcaaaataccaaacggaggagggcgtgcagcgggcggatgccctctgtgccctgcgcccggcagcgccgtggagcattctggccatcaccttcacgaacaaggcggcaaatgagctgcgcgaacgcctgacagacctgctcggcccggaggcgaacgacgtctgggccatgacgttccactcggcctgctgccgcatcctgcggcgcgagatcgagcgcctcggctatgaccgcagttttacgatctacgacaccgcggattccgagcgcgtgatgaaggacctccttcgcgagcgcgggctggacgagaagacattcccgccgcgcgccgtcctcacgcagatctcccgcctgaaggaccagatgcagacgccggaggagtttctggcctccgtcaactcggattaccgcctgaagtgcatcggccagctctacgcgtcctaccagagacggctgcaggaggcgaacgccgtggattttgatgacatcatcctgctgacggtccgcctgctgcaggaatatgaggatgtgcgcgaccactatcagcgcaagttccgctatgtcctcatcgacgagtatcaggatacgaaccacctgcagtatctgctggcctcgctgctggccggccggcacgagaatatctgcgtcgtcggtgacgatgaccagagcatctatcgcttccgcggcgcgacgatcgagaacatcctgaattttgaaaacgagtatcagggcgcgcgcctcatccggctggagcagaactaccgctcgacgcagtccattctggatgcggccaacgccgtcattgccaacaaccacagccgcaagggcaagaagctatggacggagaacgggcagggggaccgcgtgcgcatctatgaggcctccgacggcgtggaggaggccaactacgtcgcaaaccgcatcctgacggattcccacggccggaattacggcgatttcgccgtgctctaccgcatgaacgcgcagtcgaacgcgctggaatatgccttcaagcgaaacggcatcccgtatcgcatcatcggcggcacgcgcttcttcgaccgcgcggaggtcaaggacatgctggcctatctctgcctcatcaacaaccgtgcggacgatctgcgcctgcgccgcatcatcaatcagccgccgcgcggcatcggcggcaaaacgctcgaggtcatcgagcgccagagcgcggcggagggccgcccgctgtattccgtgctgtgcaatgcgcgctcctatcccgcgcttgagcgggccgagggcaagctgcagcagttcgcggagctgatcgagtcgtgcgcggagctttcccgcacgatgccgctgccggaattctacgacgagctgctcatccgcacgggctacgccgccatgctcgagcagaagggcgatgtggagagccgcacccgtctcgagaacgtgcgcgagctgcgttcctccatcctgacgtatctggagaatgcggatgtgccgagcctcagcggctttctggaggagatcgcgctctataccgacatcgagcagtatgaccgcacggcggacgccgtcgtcatgatgacggtgcactcggccaagggtttggaattcccggaggtctatcttgtcggcgcggaggatggcctgttcccgagcgcccgcgccatcggcgagccggaggagatggaggaggagcgccgcctgtgctatgtggctatcacgcgcgccaagcgccgcctgaccatcacctgcgcgcaccagcgcatgctctacggccgcacaacggtcagccgtccgtcccgcttccttgcggagatcccggaggagcttgtcgagcgcaagcagcacacgcagccgcgcttcgtgcagcaggccaagccgcgcccgcgcccgaccatgccccacagcgacacgctcggctcgcaccatgcatccggacctgtgatcgacttccgcaagggcgacacggtcgagcacgacgtcttcggccgcggccttgtgctgtccgtcctgccgacgggcaatgacaaaatgctcgaaatcgcctttgaccagatcggcacgaagcgcctgatggcgaacttcgccgcctcccgcatgaagaagctataaacataccacgcccgcgccccgcataagctgcagggggtggtgggcagaatgacatttgtgcagcggaaccgcctgcgcgcggcgcttgccgtgctgctggcggcggtctcggtccttgtgctgctgacgcggcttcactatgcgcccgtgctggcgcagctggcggcgctgcagctggataatcaggcctcggcggccatcaacgacgccgtgcaggacacgctcacggcggaggagatcacctatgacaagctcgtcgagctggagaaggatacgcagggcaatgtcacggccgtgcggtcgaacgtggcggggctgaaccgcttccgcacggcgctgacggcccggatcgacgaaaatctcgcggacctgtccgttgaggagcttggcatcccggtcgggagcgtcgtgctgccggagctgttttctggcatggggccgcggctggtcgtgcgcgtgctggccgtgcggacctcggacgccgcgttccggaaccgcttcagcacggtcgggatcaaccagacactgcaccagatttttatcgatattcacgttacggtcacgatcctgtcgctggccggtacgcaggagctcgccgtcgatgtgaccgtccttgcggcggagaccgtcatcgtcggcaatgtgccgtccacctacatcgggctgggcggcccggaggaggaaggaacatgaacccacgcgaagagatcgcgcacctgaccgaggtgctggagcgggcgaaccatcagtactatgtgctcgatgcgcccgagatggaggattatgaatatgaccggctgctgcggcggctggaggagctggaggccgcgcatccggagctggcatcgccgctctcgcccacgcgccgggtcggcggcgaggcgctgagcaagtttgaaaaggtcgagcacgccgtgccgctcgagagtctgcaggacgtgttctcgccggacgaggtccgcgaatttgacggccgggtgcgcgagagcgtgccggacgccgtctacagcgtcgagccgaaggtcgacggcctgtccgttgcgctggagtatgtggacggcgcgttcgtccgcggtgcaacgcgcggcgacggccgcatcggcgaggacgtgacggaaaatctcaagacgatccgctccattcccatgcatctggacggcgcgccgcaccgtctcatcgtccgcggcgaggccttcatgccccgcgcggtcttcgcgcagctcaacgaggcgcgcgaggaggagggcaagccgctgtttgccaatccacgcaatgccgcagcgggcagcctgcgccagctcgatcccgccgtggcggcggagcggagactggacattctcgtctttaacctccagcttgcagaggggcgggagttcacgtcgcatatcgagacgctggaattcctgcaggcgctgcgcttccatgttatcccgcacacgcgctgcgccacggcggatgaggccctgcggcgcattgccgggatcggcgagacgcgcgacggctttgcctttgacatcgacggcgcggtggtcaagctcgacagcctgccgcagcgcgcgcagctcggcagcacggcaaaattcccgcgctgggcttgcgcctataaatatccgcccgaaattcgtgagacccttgtggaggacatcgtcgtgcaggtcggccgcaccggtgttctgacgccgcgcgctgtcgtcagccccgtccggctggcgggcacaacggtcacaagcgcaacactccacaatcaggacttcatttccgaaaaggatatccgcatcggcgacaccgtcaccatccgcaaggcgggcgagatcatcccggaaattcttgcggtcgtgccggagaagcgcccgcaggacgccgtgccgttccgtctgccgtccgtgtgccccgtctgcggcgcgccggtcgagcgggacccggacggtgcggccatgcgctgcacgggtgcggaatgtccggcccagctcagccgcaacatcgcgcattttgtttcgcgcggcgccatggatatcgagggcctcggcgaggccattgtggaccagctcatcgcgggcggccacatccattctccggcggatatctactacctgcagctggatgacctgaagagcctctggaagagcggcacgcgcgctgcgcaaaagctgctggactccattgcagccagccgcaacgccgatctcagccgcctgatctatgcgctcggcatccggcaggtcggcgaaaaggccgccaaggtgcttgcgcgcacgtttggctccatggacgcgctcatgcaggcggacgaggccgcgctcacgcaggtcagcgacatcggggccatcacggcacagagcatcgtgtcgtggtttgcaagcccgcagtcgcagcacatgctgcgccgcctgcgcgaggcaggcgtgaattttgagagcacggccgcgccgtcggacgaccgcttcgcaggaatgacgttcgtcctcacgggcgctctgtcgctgttcacgcgcgatgaggccacggaaaagatcgaggcacacggcggcaaggcctccggctccgtctcgaagaagacgacgtatgtcgtggcaggcgagaatgcgggcagcaagctgcgcaaggcaggcgagcttggaatccccgttctgacggagcagcagttcctcgatatgctgcaggaataaaacagcttgtcaaataatcccttcgggcttttccgccaagctgcttccagaattgcaaaatagaattttgtagtgttattttacaattctgccgctacacgatccttccctccgaaacttttggctgagcagttttttgacagtctgaaaaacacatgacgcccccgtgccgcataggatagagcacgggggcgtataatttttccggccccgtgggacaatatgattacccgcggtacttagaggaagctctgcatagatcagctgcggcggatgccggatatttttcgtcaatccatcggtatgaaaaacttgaaatattgcgcagccgttggcggctttgccgccttacggatgcggcatgccccttgcgggtacacaaagtattcctgcgttttccataccttgacttgccaaaaaatctctcgccatccactcttgctgatctaagcagagcttcctgaaagcaatcagtgtaacgggtgatatttttctcggagcgtgaaacggaaatggatatgactgtcaagcgtggcgatattttctatgccgatctcagtccggtcgtcggcagtgagcaggggggcacgcggcccgtgctcatcgtgcagaacgacatgggcaaccggcattctcccacggtgatcgcggcggcgatcacgagccagatgaacaaggcaaagctgccgacgcacattgagctgaccggccggaacgtcggcctgacgaaggactccgtcgtgctgctcgagcagatccgcaccattgacaagcgccgcctgcgcgagcacatgggcaggctcgatgcggccatgatgaatcaggtcgacaacgccattgcggtcagctttggcctgccgaagggcgaaacggaatgatgcgccaccctcccgcataggctgtgcgggagggatttttgatgatggaattgagcgtttgggagcagggcgagcagatcggtaccgtaacggcgcagcaggagggcctgttctatatttttatctgcaaaatttccaagcatgcggaacaactgcgccgcatttacgtcatatctaaatggagagtggagtatctcggcattccgtatccgcgccgtgagggcgcagagctgcaggcctgcatcccggtgtcacattttccggacgggctgacggccgctgcggcggctgccatgccgcgcggcgcgtggcttccgtggtgcggcgaggcggacggcgttcccatccgcaacggcctgctcaagcagctggaggacggctatgcgcttgccctgctgcccgaagaggcgcagcagctcccgcaatggctgccgcaggcggcggagcaggagcttatgggccgggcgcggctggtgttccggctcgatgcggcgggatgcatgccctccatagaaatgacagaaaacggaggaagtaccgatgaagcacagaattttagcgatccttctgctggcggcgtgccttctgacgctgctcccggcgacggcgatggccgtgccggagacggagacccgctcaaagggcggcaagctgatcgccctgacatttgacgacggccccggaccctatacgcgccgcctgctcgaggggctggcgaagcgcggtgtcaaggcgacgttcttcatgctcggtcagcaggccgagaactacgatgtgacggcgggcctcgtccgcgacgcgggccaccagatcgcctcgcatacatacgatcacccgcagctgagcaaaaagacggactcgcaggtgaggtggcagatcagccatacggccgatattctcaaccgcatcacgggctatggcacacattatcttgtgcgcccgccctacggcgattataattcccgcgtgctgtcgctgctggacaatccggccattctctggtccgtcgatccgctggactggaagtaccgcaatgccgacaccgtctgcacgaacatcgtcaacggagcacatgacggcgcgatcgtgctggcgcacgacatccactccaccacggtggacggcgtcctgatggccattgacaagctgcaggccaagggctatgaattcgttacggtgaacgagctgttccgtcgccgcggcgtctcgctggagaagggccacacctacagctcctgcaagccgaccggaacggatctcggccccgtaaatgcaccgaccgtcacggaggcgggcggaaaggtcaccatcacggccgacaagggcgcagtgatctactatacgctcgacggctcctcgccgctggcctccggccgggtttattccggtcccattgaggcaaaggcaggccagacccttcgcgctgtggccgcctttaatctgaatggcagtgccagcgctgagacctcggtccaggtgcgcggcattacgctgaaggagccgaccgtcagggctctgaacggcaaggtcatgatctccaatccgaatccgaattccgagctgcgctacacgctcgacggctctgctccgacggagcgctcggcggtttacccttcctccggtttggaattttttaccggaattctgcgctatcgcgtgtttgcaaaggagggatgtggccagacgtacacgctctatctgagcaagtccggccatctctttcgcgacgtgcccacaaattcctggtatttcgaaagcattgaccgggcagtctctctggatcttcttaaaggcgtgggagactttgcgtatgaaccggatggaggcctgaaccgcgccatgttcgttacgatgctggcgcgtgccgtcggcgagagcctcccggacagcgcagcgggcttttccgacgtgaagggcggccaatggtacacggcagcgatgagctgggccctgcggaaaaatctgatccgcggctatgaggacggctcctatcgccccgaggcgctcatcacgcgcgaggagatgtgcgtcattctcgaccgccttatgcagcagcgcggcgagacgctccacaccggaaagctgagctttgccgacacggcgtccatctccgtctgggcgcgagacagcgtcgcgcgcatgacggccctcggccttatccgcggcgcggagaacaaccgcttcttcccgcagcgcacgaccacgcgcgccgaggctgcgacggtcatgctccgcatctacgaccatctgcactgaaacacaaagtgcccctgccatgccttcagcgtggcaggggcattattgtgctttagaccatctcttcgggatggaacagagcgtcgaactgctcgccggtcaggtagccgaggcgcaggcatgcctcgcggagcgtcaggtcctcccggtgggcgagctttgcagtctcggcagccgcttcatagccgatcgtggggctgagcgccgtgacgagcatgagggagcggcggagattttccgccattttctcgcggttggcgcggatgccgtcggcgcagcgcaggcggaacgagcgcatgccctcggccagcagccgcgcggactgcaggaattcgtgcgccagaacgggcaggaagacgttcagctcgaaattgccctgcgaggccgcaaagccgatcccggctccgttcgccatgacctgcacggcgatcatcgtcagcgcctcgcactgcgtcgggttgaccttgccgggcatgatggacgaaccgggctcgttctccggcaggaacagctcaccgagaccgttgcgtgggccggagccgagccagcggatatcgtttgccagcttcatcaggtcgcctgccagcgcctgcagcgcgccgtgggcgaagaccagctcgtcgcgggaggtgagggcgtggaacttgttcggggcgctgcggaagtccttgcccgtcaggaggctgattttcgcagcggcctcttcggcaaagcctgcgggggcgttcagccccgtgccgacggccgtgccgcccagcgcaagctcccgcagcggcggaagcgccagccggatcagctccgcatcgcgctcgaggctgctgcgccagccggagatctcctgtgggaacgaaatgggcgtggcatcctgcaggtgggtgcgcccggccttgatgacgccctcattttcggcctcgaggcgcttgagagagtcgatcagctccgccagcgcgggcaggacgccgtcctcgagcgcgcagacagccgcaatatgcagggccgtggggaacgtgtcgttcgaggactgcgagcggttgacgtcatcattcgggtgcagcagccgcctgcccgccagctcgttgccgcggttcgcgatgacctcgtttgcgttcatgttcgtctgcgtgccggagccggtctgccagacgacgagcgggaagtggcctgccagctttccggagataatttcatcggctgcggcgcagatggcgccgcatttttcggccgtcatggccgtggggcacaggcgggcgttcgttatggcggccgcctttttcaggatgccgaatgcgtggatgatctccggcggcatgggctcgcggccctgcccgatcgggaagttttcaaagctgcgctgcgtctgcgcgccccaatagcggtccgcaggcacgcggacgtcgcccatggagtcgtgctccatgcgatattccatatccttcacctcagaagcgggccgtgtgcccgcattttttctgccgataccatatcatccccgccgcgccgtgtcaagtgcgcaggagaatatcggataaaatgcgccccgcagcttttcgggctgcggggcgcgggaagggggggtgaaacggtcaggttatgcgtttgccttgacgtagcgcatgaggatggcagccgcctgctcgcgggccgcaaggccctgcggggcaagataggtgccgtccgcttccttcgagccggtaacgaggcccgtggaaacggcccatgccatggcgtctctggcgtaggtgctgatggcttccgcatcgggatagccgctcagcacgtccgcctcgggcgcttcggccttggcatagcggaagaagatcgcagccagctgctcgcgggtgaccggctcggacggggcgaacctgttgttgccgacgccgttgacgatgccgtttgcggcggcccaggcgatcgcatcggagtaccactggccgtcagccacatccgtgaagccggacggagcgtcgacagccgggctgcccgccatacggtagagcacggtgacgagcatggcgcgcgtcagggtgtccttcggtgcaaacgtcgtagaggtcgtgccgaccatgaggccgttctcgatcacgaagcagatgccttccttcgcccaatccgtcgggatgtcggtgtaggcagcgcacttgtggccgagggccggggtctcgctgtccacatagctgtcgccgcagcggctgcaggtgtgggtcgtatagccgccctcgtcgagcgtcggagccgtcacgacagcctgataatcatggccgagaggggcggtgatctccgtgatgacgctgtagtcgcagtgcttgcaggactcgcggacaaagccgtagccgaggcaggtggccgggacggtctccgtctcgcagtcatggccggcagcgtccacatagtccgcaacatagctgtcgccgcagacggagcaggtgtaggtggtgtagcccatcttgtcgcaggtcggggcggtcacaacggcttcgtagcggtgcgcgaccgtcgggatggcctcggtgtaggacttgccgcactcgctgcaggtgaaggtcttcacgccttcctcggtacaggtcggttccttcgtgacgacggctgtgtaggtgtgttcgagcgcatcggtgtagctgccaacgtagctgtcaccgcagacggagcaggtgtaggtggtgtagcccatcttgtcgcaggtcggggcagtcacgacggcttcatagctgtggccggtggccgggacgatggaatcgacgtagctgtcgccgcagacggagcaggtgtgcgtggtataaccggcattcgtgcaggtcggggcggttacgacggcatcgtagctgtggccggtggccgggacgatggaatcgacgtagctgtcgccgcagacggagcaggtatgtgtggtgtaaccgttgttcgtgcaggtcggagccgtcacaacggcttcgtaggtgtggtccgcctttgccagagcaacgtcatagctgtcaccgcagtgcgagcaggtgaaggtcttcacgccctctgccgtgcaggtcggcacgcgggtgatctgccagacatagtcatggccggtggccggaacgatggtgtcgatgtagctgtcgccgcagacggagcaggtatgcgtggtgtaaccggcggcggtgcaggtcggggcagtgacggtatcctcatagctgtggccggtagccggaacaatggaatcaacgtagctgtggccgcagacgctgcacagatgcgtggtataaccggcggcagtgcaggtcggggcagtcacggtgagcgtgtactgatgaccggcagcgtcgacatagttgtcgcggtagctgtcgccgcagacggagcagacgtggttcgtgtagccgtccttctcgcaggtcggggcaacgaccgattcctcgtagctgtggccgttggccgggataaagtcggccttgacggtctcgccgcaggcggtgcaggtgtagatcgtgtagccctgctcggtgcaggtcgggtcgacaacggtcgtcttctccagcgtatgctcgctctggccctcagccagcttctgccagacaaggatgggatagccgccgttgaccttctgcatgcaggtgccgtcagccttgaaggaagcgccgagcttcgtgacgaagccggaggctttcatggcctccgccgacatctctacaaagacggacggatcatgcatcgtggaatagaccatcatgccgaggccttcgaggccgcaggcgcggtagtagacgtctttcacttcaaggtagctgccctcggagtagtccgcgtgcatgacgccgatggcagcgccggggttaccggctgtcttcagaccgaggtcggtcacggtgccggtgttgtagcagttgtgaacgtagctctgctcatagactctcgaggagctggcgtcgagcttgccgacaagaccgccgatgccgcagtagtacttgtcactgtggccggtgatcgcgccggagttgtagctgtcgacgatgtagctcgggccattcgtggcatcggagctgctgccgaccgagccgacgaggccgccgacatagcagtcgccggtgacggcgccgctgttgtaggagcgggtgatggaggaaccatagcggatctctgcgaacaggccaccgatggcctgcttgcccgtgccgtaggcaatgaggccgatggcgccggtgttgcaggagtcaacgaccttcgtggatttgacctcagcgccgagaccaccgatctttgtgcggccggtgatcgcaccgttgttcgcgcaggcggtgtaggtcgtcgtctcactcttgggcacgaagccggagacgtagtcgccgtcagaggtcacggtgccgttgttgacacagcgcaggaagtctgcattcgtcacagtaccggcaaagccgccgacatagctccagggatagggagccgtgccctgcttggccgtaacggcaacgtccacggtcacat

SEQ ID NO: 11222 - DNA, 17868 bp, Unknown
  gut microbiota DNA sequence
acatatcctgcaccgccgacaaggccgccggagtaagcataggagttgcggtagttttcggtgatgttcagcttgccggtgagcgtcaggtttttgatctctgccttcttgtcggccgtgcccttgacatagccgaagaggccgaggtacggagcgccgattgacttgtcatcggaatcgaaggtgatgctcataccggtgatgctgtggccgtcaccgtcgaagctgccggtgaacggctgcttcagggagccgatcggggtccagctttcaacgctcgtcaggtcgatgttggccgtcagcttgccgctgatgccggtctcaccgctgttgaccttgctcgcgaaccaaagcagctggctggcgttgccgatgaggtagacaccgtcttcatcctggctgggcaggacgtcgagctcgagcttggccgtcttcgtcttcaggccgtagttggcgctgtcgaagccgtaggtgtaagagaggatgatggaggtctgaccctgctcgatggggccttcctgccaggtcacatagttcgtgatatcccgctcgagaccgttggccagcttggcaacgaccttcatgccggaggcgtcgaacgtctcgccggccttataggtcatcttctccgggctttccgtgacctcaatggacagaatcttcgaggtgatggccatcatgtagcaggagtcgttcttgtagtagatcgtgccggtgctgtctgcgatggtggagcagatacagtactgtgccagcggagcctgcggcgtgaagatctcgctgtagccggaatccgtggccgtcttcggctcggtctggcccgggcgatccatcaggacggaaatgccgccgggggtatagttgtaggggaggtagatgaagacatagccgtcgcccgcgccgtcgccgtcgaagtctttgtcgacataggccgtggagaccatggccgaggtctgcggatagccgatgatgccgtaggaataggcatagctcatttcgccagttgcagtatccagatcaatgacctcgatgcagtggccgccgttctgggagaactggcccttgctgccggaaacgccgaggtagatgcgcccgttgtagacggacggcgtgcaagtggacatgatggcaccgggcttttcctcactggtgtagccctcggcgtccttgagcgccagagacttgaagtccgtgatcttgccggtttcccagtcgatggcggcattgtagatgtagccgcccttggacgtgaagaacacgcggtcagaatccgggtcgtgggaaacgttggagcggatatcacccttgcagccgtagtgggagtcgagcagcttgcctgtcaggcggtcgaagaccagcagggcggaggtgttgatatagtcaccctcgccggagccgtcgtccgtgccgacgatgcagaggttatccgtcacataagcgcctgcccagtagaagccgccgacgcaggcataggaccaggaggcgagcttggcttcatccgtcttcatcgggtcctcgtccgtcacggagatggcaacgaagttgccgggcttgctctcgccgttccagaagccgacatagatgtagccgtcgtggtatgtcggggaggtattgggctggccgccgagcggatcggtgtagatccacagggattcgagcgtcttggcgttgaaggcctggatcttgccgccggacaggccgacaaagatcatgccgtcggcataggttgccgggttgatggagaagctggaggtacctgccatcgtgccctctgcgagcaccttgccggtgttgacgtcgaggcgcttgatggtgctgccggtgtaggtgatgaggtcaccgtccaccagaatgggggagccgggagcggccgcccagcctgtgccgtacttcgcagcccacagcagctcactgtcctcacttgtgtagggcgtgggggcgttcgtgatgccaaggtgattgctgccgttgcggaagttaggccattcggcggggagatccttgacaagggtcgtgttctcttcggctgcggtcagcgtgatcttgagcactggctcggccgcgctggcagtcaggctgcccgacttgccgacatagccctttgccgttgcgacgtaggtgtaggccgcgccgtccatcagggtatagtcgccgttctcatccggatagatgctggtgttgaacgagtcatacatgaccagcagggcgttctccgggtcaagctctgcacgcaccttgcagatggcgtgcttcgttgccttgacggtgtaggaggtcgacaggccgtctgcgttggagacgacgacggtcatgacgttctcgccgtcctgcagggtccattcgccggactccgcgccgttgtaggtcacggtgtagccgtcctgatatggcgtagcgctgagcgtgatggaatctgccgtcgtgtcgatggtgtattccgccgtgcggtgcgagaacgtctcgttcatgcgcgcgccggtcacgttcagggcagacagggtcggagtgcggaacgaggtgagcgtgtaggtctgcgtattgccgtcaacgccgaccgtcagggtgacggtgttcggcttggcatcgcggctgaagttcgccaggctctggccggaggtcttgccggacgtaatggccgtggactgggttttgccgttatacagattcgtccactcggccttgatggtggagccttccggggcattttcggacagcgtggcccacaggaaggcgctgaagccgtccgcatcggggactgcaacctgatattcggccgtcttaccgtcgaattccggcgtgaaggcatagtcaccggaaccgttataagcggtcaggcggagcgcggacaggtaggcgatcttctcaccgcagcggctgcagatgccgtcttcgccgacattgtggccgagagccggaatctcttccgccttcgtctcgccgcaggccgtgcaggtgtaggtcttggaaccggcctcggtgcaggtcgcgtcgaccgttgcggtcactttaaacgtgtgctcgctctggccttcgcccagctgctgccaggtgaggacggggtagccgctgttgaccttctgcatgcaggtgccgtcagccttgaaggaagcgccgagcttcgtgacgaagtcggaggccttcatggcctctgccgtcatctctgcgaagacggacggatcgtgcattgtggaatagttcatcttgccgagaccttcgaggccgcaggcgaggtagtagacgttttccacttcgaggtagctgtccgtggaataatccgcatgcatcagaccgatcgccgcaccggcgttgatcgtcttcagaccaaggtcggtcacggtgccgacattgtagcagttgtgaacgtagctctgctcataggttctcgaggagctggcgtcgagcttgccgaccagaccgccgatgccgcagtagttcttgtcgctgtggccggtgatcgagccggagttgtagctgtcgacgatgtagctcgggccgttcgcggcgtcggagccgctgccgaccgagccgacgagaccgccgacatagcagtcgccgatgacggcaccggtgttatagcagcgcgtaagcgtcgagccgtagcccatctcgccaaacagaccgccgatgccctgattgccgccgttgtaggctgcaaggccgatcgtgccggtgttgtaggagtcgaccgtcttcgtggactttacggcgccgccaaagccgccgatcttcgtgcggccggtgatcgcaccgttgttcacgcaggaggtgtaggtcgtcgtctcactcttggccgcgaagccggagacatagtcgccgtccgtggtcacggtgccgttgttgacgcagcgcaggaagtctgcattcttcaccgtaccggcaaagccgccgacatagctccacggatagggggcagagcccttcttcgcggtgacggcaacgttcgtcgtgatatcggtgaaggaaacatattccgcaccgccaacgaggccgccggagtaagcgaaggagttgcggtagttttcggtgatgtccagcttgccggagagcatcaggttcttgatctccgccttcttgtcggccgtgcccttgacatagccgaagaggccgaggtacggagcgccgacagatttgtcattggaatcgaaggtgatgctcatgccggtgatgctgtggccgtcgccgtcaaagctgccggtgaacggctgcttctgggagcccatcggggtccacgcttcggtcagctcgatattggcagtcagcttgccgctgatggcggtatcgccgccgttgaccttcgctgcgaaccactgcagctgcttctcgctggcgatgccgtagacgccgctttcgtcctgcgtggggatcgcggggtccttttcaccgcagcggatgcaggcaccgtctgcgccgaaggtgtggccgagggccggaagctcttccgtgcgggtctcgccgtgcacgctgcaggagaacgtcttgacaccggccgtcgtgcaggtgggctccgtcgtgacgacgccttcgtcccactggcagggctgaggtacctcgctcgtgagaacgaccttcgccgttgcgggggcgtagcaggcgttctctgtgccgtagttcgggtcatagcccagcaggtaataggtaccggccttcagcgaggccgtgtcgagcgtgtagctgctgccttcgctcgtaagctcctgctgctgttcccagttttcattgtagagcttcacattgagaccggtgatcggctcaaaggactccgtgccgccgtcggacacggacttggtgtcatacttctgcgtttcgaatgtgatcttttcaccgaccttggcggtgtagtcgtccttgtcaaagcgggcgaatgcgccgtaggtccagaagctccagttggagaacatggccagatcgatcgtgtcgttgtcggacagcagaatgtagtctgccgtggagccccagcccgcagacatcaggggatagacgtggttgcggtagtacatgaggttctcgtcatggccccagaagttctgcatgtacatggacgtggcgctgccggagatgagcagcgcattgcgcgtatcctcataggagccgccgagcatgtcatccacgccttcgccgctgccggtgaattccagcaggccggacgtgcccttgccgcagtccttctcggccacgccgaggtagtagcgctcgagcatatagatgtagaggtgcaggagcgtcgggcgctgcacgatctcgttgtccgtatagcttccggagccgttctccgtgtggtaacggttaaaatcgtccagaccgtacagggacagggggaagtacgggactttgacctccagatgcgacaggatggtgccgccgtcgtccttgccgatgatcggtgcgccgtcgctcgagatggtcacatagacggtgacggaggcctggtcggtctcgtcatagccgtactggttcttgtcgccgtcctccacggcctcgaccgtgatgggaacggtgacttcggtgctgccgccgcccgtgcaggtagcggtaatgccgatgcggaattcccctgcctcggcagaggtgaactgcagcgtattgtccttgatatagaccttatcgccgtaatccgccttcagcgcgaagctgagggtgtgcccgttcgggtcggtgaacaccgttccgagcgggagctggtacagcgcaccgaccttgacgggatcgggcgccggggtacttaccgtgatgtcgcagttcgccgcgaagaccgcggggatcatcgacagaagcatggcaagcaccagcaggatgctcaggattcttttcatgctgctttcctttcttttggggaagccattgaggatacgattagtggcttcccaattttatttatccttagaccgtgttcggtccaaaagatcagcgcaaagcccaacgggcgggccgcaaaaaaacagcctgacaggaaactacatgggagacatggagtttttggcaagctgctgcatcgtggggcgggtcggcggcacccgacccgcccacaggaggagaacacccggtcatgcgcagcgggaacgcatccgctgccccgaatcgggcacaaaaaaacggctgaaaggatagatagactatcccctcaaccgattcgggcaaagtaatgcatcacagtaggtcttctgggtcgcgcatccgggagcaaagcccccacggccgctgccctgccttctcagggttccccaatgaccggctttcgccgacggacagcggactttgcgctcacagcgacggttatcccagaggcgcagtgcgcctccctcggggtattatccccgttcccttgtttacccgtatgcctgacggggtcgccccgcgccgttgcgtacatacggtctctgcaagcagaatattcagttcctgccgcacaggctttgtgcggactactttgattatagaccatgcgggcgcgcctgtcaagcaccgaaatccgtatttttttagcgaatgcggaaacacacaccggaacgggcttgacaaaaaaatcggcccttgttatactgagagcaatggaagcttcaagtgcttccgctgccgtccgggcagcgggagaggatagggaaccgggtgagaatcccggacggtaccgccgctgtatgcgcggaggccgcgtgcagggcgaaagccggtcattggggaaccctgagaaggcgcgcgcggccgtcgaggcgtgagtcagaagacctgcttggggaggctctgcccgcatggtgcgggaaacggggcgctttgttgtgtgcaaatgcggacgctgcaacgattgttgcagtgtcctttttttctgggggtcgtgccatgagacggaaaacaatctggggccgggtctgcacggccgtgctgatcctttcgcttctggccggtgcggtggctgtcgtgttcacgggcggacgggtgcgcccgcccgatccgctgccggagcaggcgcaggtcctgcagccggaccgacaggagcgcggcggcagcggcggcacatcggacgacgtgcccctcacgcagtccccggagccgacggagccgtccgaagagccggacgagacggaaacggccgagccatccacgaagccggacgagccgacggatgcgacgtccgccacgcagacgacacagacgcccgagccgagcgaggagccgacgcgcggcaccggcggcggaacggagccgacggaggagccgggtcctgcccccacggaggcccccggccccgaggagccgcatatcgtgacggatctcgtcagccgcgtctggcgctccggcgagctggacggcgatacgctgcggttttatgcctatgctgcgggcagcggagacctgagcctgcgggtatattataaggagtccggctccaccgcaaacaacggcacgcgccttctgccgacggacgaccggaacttctccgtccgccttaccttaaatcagtcctataccttctccttatatttatatcgcgacggccgccgcgtcggcgatgccgcggtctactatgtttcctatcgcgcaaggcttgcagacgacgatcagcccgagatcggcgatgcgccgcccgtcatcacgacgagccgcgacggccggaccgatcccgtctccgtgcagacgatgacgtttgtcgtctgggcgaggacgggcacggacggttcaccgatctacacgagccatctgcaggtctcgatggacggcgaactgctgacgaacccgaccggcagcgccgcgtccggctatgaatatgtgctgcgcttctccgcgccgctcgtcggcgatgagcgggaatacacgctgcgcatccttgcgtgggacgatgccggaaattccgccatgcgcaccgtgaagatcgtctatcagacggtctcggagggcgacgatatcggcgaggcgaccatccgcatcgacgccacgaccgtcggcctcggcatcgtcgacgaggagaccatccgcatcaaacagggcgacacggccgcgcagaccgtgctgcagatgctggaggactgcggctatgaggcaggctatgacggccttgcggaaaagaacggcggtttttatctcatgcgcctgacgcgcggcgacctgctgtatcgcgcgcaggtgccggagcgcctctggacactcatccagcgcgacggcatctcactgacgggcgcgcccggccgcgacagcctcggccagcacgactacacctggggcgcgggctggatgtatgatgtcaacggctattaccccggcaagggcctgtcggaatggatgctcggcgacggcgacgtgctgacgctgcgcttcacgctggcctggggcaaggatatcgacggcttcggcgcgacgggcggcggctacggcgtgctgtccagctactgctatgtctggcgcgacgggcaggagatcccgcttggccacgactggcaggagacggcccgtgtcgagccgacggagacggaggacggctatgcggactatgtctgcacgaagtgcgccgagacgcgccgcgacgtcctgccgaagaccggaacggtcgacccgacggttcccacggagccgaccgatccgaccgatccgaccgatccgaccgatcccacagaacctgccgacccgacggagaacgaaaacgagaggagcatgttccttgaaacgaatgcggaatattctgatcctgctgctgtgcgctgcactgctggcgggctgcggcgcaagatcggcgcctgcaaaggcactcgagggctgccgggcactgctcggcgtgcgcgagggcttcctggaggaccgcgcagcggagctggcgggcagctccatcggagactggcttgccatggcgctttcggcctgcggagcgaacgagagctatgacgcttaccttgccgcactggagcagcatgtcacggagcgctatgccgagcagggaacgcttgatgcgcttatggcgacggagtattcccgcacgatcctgaccgtctccatgctcggcggcgacccgagcgccttcggcacgcggccggacggcacggccatcgacctgctgaacgacggcgtgtggaattttgcgggcgagctcggcgcgcagggcctgaacggcctgatcttcgccctgctggcggccgatgccgggacctatccggagccggagcgggcgaaaaacacgcgcgccgggatcgtggaggccatccgcgcggcgcaggagccggacggcggcttcggcctcgtttccggcgcctcggaggcagacctgacggccatggccctgcaggctcttgcgccctacggccgggacgagaccgtggagcgggcgcttgcctggctgaaggaccagatgcagccggacggcaccttcctggcctacggcgagccgagcgccgagagctgcgcgcaggtcctccttgcgctggcagcgctcggcatcgatccggagcaggaattcggcagcgtgaaccccgaaacaggccttgcagaattccggaaggcggacgggagctatgcgcatctgctgacggacacggaaggaaatctcatggcgacggagcaggccatgctggccctctgcgcgctggagcggctgccggacggcggctgcgtatacgaatcgaaatatcgggaggcggcatgatggaacagaaacaatatgagcttgcggcgcaggtgctccgcgaggtgcagaaggtcatcctcggcaagcgggagatcgtggaaaaggtcctgatggccgtgctggcgcagggccatgtgctgctggacgacgtgcccggcgttggcaaaacgacgctggccatggccttcgcgcgcgcgctcgggctggagacccgccgcgtgcagttcacgccggacacgatgccgtcggacattctgggcttctctgtctatgacaagcaggcgggagccttttcctaccagccgggcgcggtcatgacgaacttgctgctggcggacgagatcaaccgtacctccaccaagacgcaggcggccctgctggaggctatggaggagcgccgcgtgaccgtcgacgggaagacgcatccgctgccgcagccatttttcgtgctggcgacgcagaatcccgtcggctcggccggaacgcagctcctgcccccggcgcagctcgaccgcttcctgctgtgcctgagcatgggctaccccgaccgggaaagtcaggtggagctgatgaaggagcgccaccacgccgacccgcttgcgcaggtgcgccccgtgacggatgccgccgcgctcggcggcctgatggatgccgccgccatgacgttcgtggcggacccggtctatgattatacggcccgcctgcttgaggccacgcgctgccatgagagcctgcagctcggcctgagcccgcgcgccggtctggccctgtgccgcgcggccaaggcgcgcgcgttcctgcatgcgcgggactatgtcctgccggaggacgtcgcggaggctgcgcccgatgtctgtgcccaccgccttgtgctcgcgccgcgcgcccgcctgcatgacgagacggcgcggtcggtgcttgccgaaattctcgagcgcgtcccgcagcccgcggtgcgcgaattcaaaagctgatgcggaagcgaatgctgcgcgcctggctgctgtggctgctggcggcggcctgctgtgcgctggcctttgcttttacccatgccggggcagcgctggccgcgctctgcgtgccggtgctggcggcgctggcgggattcgtcgtgctgcggtgcagcaggctgcccgcgctttcgctccggctcccggcaggtgggcggaaggacggcgagatcgcgggcgagatcgtggcctcccgccgcgcgccaggccgcgtcctgtgccgcatcgaggtgcgcaatgacctgacgggcgaaataacggaatttttcgcggaggaacgcttctcgttccgcgccgaacactgcggccgcctgacggtccgcatccgcagggcctggctcctcggcctgccgggcctgtttgcccggaagatccggacggacgcggcggcgcatgtcacggtcctgccggatacgttcccggcctctgtccatgtgacgatgccggaggtgcagagcccggacagcgacaccagcagcccggaccgccgcggaagcgacctgacggagccgttccgcctgcgcgagtatgcgccgggcgacagtcttcgccagatccactggaagctctcgtccaagctcgatcgcctcgtgatccgcgagccgggcatgcccgccgcgcgtacgctgctcgtcttctgggaccgcagcggcgatgccgccgcgcgcgatgcgcaggcggaggccgtgttctccgtctgccagagcctgagcgagcaggggtatgcctatcagctcggctggcccgagggcggcacggcccgctttgcggaggcaggctccacggaggagctgctgcgcgatctgccgctgctgctgcgcggcggcgcggagcctctgcaggagaccggggcgctgcgcgggttcggcaagattctctattttacggcctcgccggacccggtctggcgcagcctgacggcgggtgcggagccggtcctgctgctgtgcggcgtgccggagcagccggatgtccgctgcatctgctataccaaagaggactatgctgccgcgctgcagcagctggagctttgagcatgaaacgaacgaacggttttcaactggaacgtgcccctgccggggggcagactttgccgccgtgggcggccgcgctgtgcggcggcctgtgcgctgcgggggcgctgacgctgctggcggggtccttccccgtgctgcccgcgtgggcggccctgctgctcggcctgctgctgggggccgggcttgcgctcctgccgcagcgggcgtggctgacgcctgcgctctgcggtgcggcggcgctgttctgcctgtgcgcctttgtgcccgtcacggcgggcctgcggcagctggcggactgcgtgcgccgctggctgacggcgcggaccggatacatctatttcacgtcttcctccgaaacgcggcagggcctctgggccttcctgccgctcggctttctttcggcgctggcctccggccgctgcgcccggcgcgggagcgtatggtttgcggccgtttcgctgcctcttgcggcagctggctgcgccattgggctgttcccgtcgtgctggggcctgctgcttctggcgggcggcctgacggctctgctgctgttccgcacggaccggggacggacggcggccctgctgcttgcgggctgcctgctgctcagcgcgccgctcggacttctctccctgcccgagagcggggccggggcggcgctggcccacgggctgcatgcgctgcgctatgatgcggcggccaactccatgccggagggaaaactgcacgatctttccgcgtgggaaaagaacgggacgcccgcgctgcgcgtgacgatggagcagccgcagcggctttacctgcgcggctttgttggcgaggtctacacgggccggagctggcagccgctcgatccgcagacgctggcggacgaggccgggcgtttctattggctgcatgaaaagggctattatgcccagagcgccgtcgggactgcggcggtgctcgccgggcagacgcaggtgcagaccgtcacggtcacaaacctgtctgcctgcggcgcgcaggcctatctgccgacgggccttgcggacaacgccctgctggagccggaccgcatcggcgaccgcgcggcgaaagcgccggggaaaacgtattcctattcctgcgccgtcggcggcctgcgcgactggtatgccgcgcagcaggcgctggcggacgatccggacggcgcggcgcagtggctcacgctggacgagggctaccgggcgtttgccgaggcacagttccttgagcttacgccggaggcggccggagccgcgcaggcactgctggggagcgaaatgcaggggaagaccctgccggagatcctgcagaccatccgacagacgctcacggagcacttcgtctatgacgagagcgtctcgacgcagaacgggacgcaggactttttccaatatgttcagtccgtcaccgcgcgcggctacagcgtgcactatgcgacggccgccgtgctgatgctgcgctattgcggcgtcccggcgcgctatgccgagggctactacctctccggacaggatgcggcctccggcgagcagacgtttgaactgaatgagacgcacgcccatgcgtgggcggaatattatctgaccggcgtgggctgggtcccgtttgaggtcacaccgggctatgtagaggccgaggacctcggagcaggcggcgaggcgggtggaaagcagtatgaaaatacgcagctgccgcccgttgtggagcagccggagcagcaggccccacaggaggagacgcagcgcagtttccactggtggctcgctgcgatcccgcttgccgcggccctcctcgcgctcgtcctgtgccagctctggcgcagacgccgcctgcaccgccggatcgcggccatggcggcggacgagccgcgcgaggccgtgacgcagctctatggctacgccgtgttcctgctggcgcggaccggcgcggccccgcccgcagggctggagcaggcccggcaggacaatgccgaggccatgttcagcggccacgatattccagcggagaaggccgctgccatgcagcgcttcgtgcaggaggttctgcaggcctgccggaaaaaacgcaatccgctccaacggttcgcggaccgctggttccatatctggtattaggtttgaaggaggcaatgcttatgaagtccattcgattttttgccctgctgctgtgcgcagcgctgctgcttccgctcgtgcccgtgcatgcggcgcagagcggcgggagcttctatctgacggcctccacggccgggcagacgctcattgagccggtcgccgtgccctatacggccgggcagaccatccgggatgccctgcgcggcagcggttatgccttcggcggcatcgataccgcgttcatcacggacatcgagggcgtcgcgggaaactttacggtctattatgacggcggcgcgtattcgctcgatgcgattgccagcccggagaccgtgacggccgtcgtcttctccgagcgtgaaagaggctttccggccctgctggacgccgtgacggagcttggccgcttccgggagcgcacggaccatgtgcagaattacccggcggcgcagcaggcctatgcggcggcgctgtccggcctgcggacggcggacgaggcgggcctgacgacgcttcttgccgcactgcgcagcgccgtggcggaatacgaggccattctgaacggcacaaagtaccccgtgacctttacggacacggccgggacggccgcgcagctcacgctgacggacagctacggcaatgtgacgcaggtacagggcctgcgcgccgaggtcgtggcaggggagtacacgttcagcctgtctgacggcggcgcgaaccgcgtcgacggcacgctgaccgtggcaggcgcggtggaaaagcaggtcgcgctgccgacgggcgactggttcggcacgatccgcctccacaatgcgtccggcgcatccgcgggtgcctatcccggcacgcaggatgagaagacccatacggcacagttccgcgtggaggacttccgcacgctggcctatctctatgccgagcgcggggtggatgcccctgcggacgcggcgctctacagctgctacatcggccagaacggcaaggactacggcgacggcagccagccctcgaaccgcaagagctggtcgagctatcagacggcgctcgtgtcgctgctcacggccggaatgacggactgcgaggtccggctcgaggcccgcagcgcctccggcgcggatacgcgcatccagtcctatacgctccgcctgcaccgtgtgccgacgctcgcgtcgcttgccgtctatggcgaaggtacgcgcctgccgctggactttgacccggccggaacggactatgccgtgacgacggtctccgaccgtctggcgatcgaggcggctccgttcgacacggagggctattccgtcacggtgaacggcggcacgtccgcagaggtccctgtcgggacgatcacggtgcaggtagcccacacgaacggagagcgcaccgcctataccattgcggcgacgaaggtcgactccgtcgaggtgcggatcacggtgcccgcgggaacggacactgccgtcttcaatgcggcggacagcgagatcgcgcccgtcggcagcgggacctaccgcctcatccccggcgagcgctatacctggatcacgacaaagcaggaattctatcatgcggcgggcagctttgaggccgctgccggtctcacggtgcaggcgtcggagccggacacgacggaccgtctcagcgcgcttgcctcctacagcgcgcgcaatccgaagaacggtgtgagctatgagagcgacgtgccgttttcggcggcgcagcaccgctatacgctgacggtgccggatgcgaactccacgttctatctgcaggcgacgccgacgggcggctatgccgtaaaggcgcgctacctccgccagacgacgaacacaggcacgaacggcacgcaggcggaaatcaacgtcacggcgaccgtcaatcccgcgaagaccgccacggcctgcggccagagccttgcggcgagcggctattccaacaccgtgacgctgcgcctgagccggacggctggcagtgtggaatattatcaggactacacgctgctgctgcgccgccgcctgacgctgggtgggctcagcgccgccgtggacggcataacgctgaacctgctgaatgcgaagggcgaggcgcagagctttgaccgcgatgtgacggaatactggacgcgcgtcgacgtcagtgcccgcacgttggacttcactgcctcgttccgcagcctgccgacggagacgaacccgaacagcggcggctatcttgcggacatcaacggtacgacgtatgcggaagcgccgtccgccgcactgacgctcgatccggaaaaggccgcggaggatgtgaccgtgaccgtgcaccatgcagacgcggcggcgctcccggcgacctatacgctgcatgtgcagaaaacggagccgacgatcgtgacgttcgtgacggagccgaaggacgcgaccgtcttcctgacgaatgagcagtccgggcggcgcgcggagcgggccacagacggcagcttcgccctgacgccgggcgaccgctacacctataccgtgacggcaaagggctatgtcggcacgaccatccagcattacacggccccggagcaggcggaaacggtccgcgtcacgctgcagaaggcggcggagaacacgggcctgcagcagcttcctgcccagtggccctcgttccgcgcggatgcctataacaacggcgtcatcgacgccagaacgcccgtttcctcggagaatacggtcctctattgggccacgcagctcggcagcggctattcctccgatgcctgcggctgcccgatcatcgtggatgactgcctgtatacctacggcggcgagacgatctacaagctcgacaagcgcacgggcgaggtgcttgcgcaaggcaagatggaccataagtccagcttcgccatcaactcgccgacctatgccgagggcatgatcttcgtcggcctggcaaacggctgcgtgcaggcgttcgatgccgtgacgctcgagtctctgtggctgtacgaggacccgctcggcggccagccgaactgccccatcacctatgaggacggctatctctacaccggcttctggaaccgcgaggacggcaacgcaaatttcgtttgcctgaccgtgacggatgaggacccggcgaagacggatgagagcaagctggcctcgtggacctacacgtcccgcggcggcttctactgggcgggcgcttacgcctgcaaggacttcgtgctcgtcggtacggacgacggcgaggcgggctacacgacgggccatgcccgcgtgctctcgttcgacccgcgcagcggccgtctgctcggcgagctgacgctgccgcagacgggcgacctgcgcagctccgtgaccttcgtcccggacagcgagggcggccttgccggtacggcctattttacgacgaagggcggctatttctacggcctgcatgtcgaggccgacggcacgttcacggagggctcgctgcgcgcgctcaagctggccaattatgccaacgatccgaagaacccggccatgagcacctgcacgccgacgatctataacggccgcgcctacatcggcgtgtccggcacggcgcagttcggcgcgtattccggccacaacatcacggtcatcgaccttgcttcgatgtccgttgcctattccgtccgcacccagggctacccgcagacgagcggcatcctgacaacggcctatgaggcggagaacggttatgcctacgtctacttctttgataactatacgccgggcaagctccgcattctggccgacaagccgggccagaccgcgccggtcctcatcacgcaggagacggacgagagcagcggcaagcatgtcacctatgacacaccttatgttctgttcacgccgagcggcgcgcaggcgcagtatgccatctgcagcccggtcatcgacgcggacggcacgatctacttcaagaacgactcagcctatctgatggctgtcggcagcacgatggaccggctcgaggtcacggcgcagccggagaagacggtctaccacgccggccagacgtttgatccggtcgggatgcaggtcacagccgtatggcacaacggtgtgcggacggatgtgacggcgcttgtgcaatgg

SEQ ID NO: 11223 - DNA, 36131 bp, Unknown
  gut microbiota DNA sequence
tcaggaccgcgacggcacgccgggaacggcttatgctgccccggtcggcctggcggcgcttgatgtgcgcaagcacatctatgaccgcgtggaggttacgccagagggacaccgcggcacctgcagctattgcgggcagacggacgaggcattccagccacatgaattcgtctgggtcatcgatcgtgagccgacggaggaggagaccggcctgaagcatgaggagtgcttctgcggctaccggcgcagtgaaaacaccgagatcccgaaaaaggagcatgagcacacctatgcggccacggtcgtcgcgccgacgtgcacggagcagggctacacgctgcacacctgctcgtcctgcggcgatacctaccgcgatgcctggacggacgcactgggtcacagctgggatgccgggcgcgtgacgatcccagcaacggaggacacggacggcgaacgcaccttcacctgcacgcgctgcggggccgagcgcacggaggtcattccgaagaccggcgaaacgccctgcgacggcggcgcaaattgtccgggcagacgcttcacggatatgccggcagccgggaactgggcacacgcaggcatcgactttgccctgaagcagggcctgttcaacggcatgtctgccacgacgttcgagccggacggaagcatgacgcgcgccatgctcgtcacggtgctgtggcgtctggacggcagccgcgcgcccgccgggcggaacacgtttactgacgtgccgggcggccagtggttcaccgatgcggtgacctgggcggcggaaaacggcgtggtcaacggcgtgggcagcgggaagtttgagccggacggccgcgtgacgcgcgagcagatcgcaacgatcctgttccgctatgccgcaaagcgctatgatacctccgcgcgggcggacctgtccgtcttcccggatgccggacgggtgagtgcctatgcacgcgaggcactggcatgggccaacgctgcaggccttgtgaacggcacggacaacggcttcggcctgatcctcgacccgcagggcgacgcgacccgtgcacaggtcgccgccattttgatgcggtatgtaaaaaatattgttcgctgatactagaatctgataaaaagctttaaaagctttttatagcgccgaaggcgcgtcagattctgcatgagacggcgcagcgtgcgtcagcacgatgtgagtgtgcgtagcacacgggattcctgatgaaatgttttaatcaggaatcagtatgagatgacggcagcgagaaaaccccgcaggagaaaagcctcctgcggggccgttttatatcctgtaaggcggtcggttgacccggctgtaaaatggtttgcgtagagaaatgtaaaattatataagctccgaaacatatggaactgtcggataaaattttcaaaaattttgaggaaaacatattcactttagcatgttttgccgtataataatagacgctggttgcccaaaacaactttatccggccgctgaacgaaaacgtttctcccggcggacgagcgccgggaagacaacagagcacgaagagaggagaaaacttatgatcaccgctgaatccctgttttttgcgattctgggaacgacccgggccgagatcactccctccgtccttgcaacggagatcactgccgagctgctgtttgacgagaacctcggctttgacgacttccgcatcacgaaggatgtgtatcccaccgttgccaagctcctgcgccgcagctccgattcggtatcccgaagcgtcgagcgcatgactgcgcgcctgtggcgctgcggaagcccggagcagctgcgaaaaatcaccgggcaggagcggctgctgccgcgtcccgcccgggaaacgatcctgtatctggcgtattatctgcgtgcggagcgtccgatctctgcgctgcggtacggaacggatgtcccgccgaaccgggatcagcgcgtgatgatcgcctcgcgttccgcgccgacggagacgtaagaaatgtggcagccgatggccttttccacggtctctacatagtcgcgcgcttccttcggcaggtcctcatagcggcgcacgccggaaatgtcgcagttccagcccggcatggtgcggaagacgggctttgcctccggcaggatggcagggaaggggaaatcgtccgtcagcgcgccgttcagctcatactgcacgcacagcgggacctccttcatgccggacagcacgtccagcttcgtcagtgcgacctccgtcgcgccctggatgcggcagccgtagcgcgtggccacaaggtcgatcgggccgacgcggcgcggacggccggtggaagcgccgtattcgccgcccttttcacgcaggttctcggccttctcgccaaaccactctgctgtgaacgggccttcgccgacgcaggtggagtaggccttcacgatgccgacggtacggtccacatggctgcccggcataccggcgccgacgcaggcatagcccgcaatggatgaagaggaggacgtgtagggataaatgccgaaatcgatgtcgcgcagtgcgccgagctgggcctcgaacatgatgttcttgcctgctctttcggcctcatagaggtacttgggcacgtcgcacaggaacggacgcagcttgccgccgaactcctcgcaccaggcgagcatgtcctcgagcttgtagggctctgcgccgtagacgttgtggatgatgaggttcttccactccagaatgctggccaggtgggccttgaggtgctccgggtagagcagctcgccgagcatgacggtcttcttctgatatttatcggaataaacgggcgcgatgccgcgcagcgtggagccgtacttccgatccttcagacgggcctcctccagaccgtcgagtgcgcggtggaagggaaagacgatggtggcacgctccgagatcttcagattctccggcgtgatgcggatgccgtgcgcacggagattgtcgatctcgcggcacaggtcttccagatcgatgacgacgccgttgccgagcacattcacaacgccctcggagaaaatgccggacgggatgagatgcagggcaaacttgccgtactcattgacgatggtatgaccggcgttgttgccgccctgatagcgaatgacaatatcataatcctttgcgatgaggtcgaccatgcggcccttgccttcatcgccccagttgatgccgacgactgcacaattgctcataatatttctgctcctgtttctgcccaatgggcttgatttcacacaacgcgcctattataatacaaaccgaggcataagtaaaacatgaatatcttatgcaagacatcaataattctgatggggtgtgagaccatgacagtcaagctggagcaataccggatatttaaagcaattgccgacacgggaaatatttcccggacggcaaagcagctctatttgtcgcagtcggccgtcagccagtcgctgcagcagctcgaaagcgccctcggcgtgcggctgttttcgcggacggcgcgcggcgtgacgctcacggcggaggggagcgtgctctatgactatgcagcgcaggcgctgtccctgctcgaggcgggggaggagcgcatcgcacagtcgcgtgagcttctgaagggcgagctgtccatcggcgtgagcagcacgctgacgaaatactatcttctgcccttcctgcgggactaccatcagcaatatccgcatatccatgtgcgcatcctgaacggaacgagccgccgtgtgctgcagctgctcggcagcgggcaggtcgagcttgcgtttgcgacctacacgccggatgcagacagtttttccgttttcccgtgctttgatacgcacacggtgttcgtggcggcgccggattatccctgcgattttgaccgcgtgtatacgctgcaggagatcagcgaattcccgctcatcctgctcgaacgcgaggcaagctcgcgccgctttctggaggactgcttcctgcagcgaggcctgcgcctgcagccggagatcgagctggccagccacaacctgctcatctcgctggcgcgcatcggcctcggcgtggcgggcgtgacggaggagctgtcgctctccggcctgaaccgcggcgtcgtgcgcaagctgcatttggccgaggagatcccgtcgcgccgcgtcgtgctgtgcacgcgccgcaatacgccgccgtcggccgcggcagggcggttcatggagatgatccgcgccaaccacgggttcgaccgcccggcggagcaggacggttaacggccgacttgtcaaaaaagtcccctcgggcctttttcgccaagctgcttccagaattgcaaaatcaatttttgtagtatgattttgcaattctgccgctgcggcgggttatttgacgcgaaaggacaccctgacggtttcctttcacacttttcttccctccgaaacttattaccgggcagttttctgacagtccgggccggtttcgccgtcccccggcacgccgcgcatggtcagactgatgcgcttgcgcttctcatcgacttccagcacggcaacacgcacgacatcgccgacggacacggcctcggacgggtgcttgatgaatttattgcagacctgcgagatgtgaacaaggccgtcctggtggacgccgatgtccacgaacacgccaaagtcaatgacgttgcgcacggtccccgtgagtaccatgccgggcttcagatccttcagctccagtacgtccgtgcggagcgcgggctgcggcagctcgtcgcgcgggtcgcggccgggcttgcacagctcgcggacaatgtcacgcagtgtcggcagaccgatgccgcaggcctctgctgcgcgcgcagggccgtaggcctccagccgtgcgggcagctcggtcagcgcgccgacgtccgcaagacgatagtcacacaggcccagcagcgtctctgccgcggcataggactccggatgcacgccggtgtgatcgagcacctgcgggctttccggcacgcgcaggaagcctgccgcctgctcataagccttctggccgagcttcggcaccttcaggacctgccgccgcgccgtaaaggccccgtgctcctcgcgataggcgacgatgttctttgccgtcgtggcgttcagaccggccacgcgccgcagcagggagggggaggccgtgttcagatcgacgccgacggcgttgacgcaatcctccaccacgccggagagcgcttcgtcgagctgcttttccggcacgtcgtgctgatactgaccgacgccgatggccttcgggtcgatcttgaccagctcggccagcgggtcctgcagccgccgcgcgatggagaccgcgctgcgcaggttgacatcgtactgcggaaattcctccgccgccagcggcgaggcggaatagacggaggcgcccgcctccgagacgatcatataggccgcgccgtgcttctgccgcagcagctcgcagaccatggcctccgtctcgcgcgaggccgtgccgttgccgagggcgatgtgcgtgacctcataccgatccatgagccgccggagcgtttcgatcgcttcggcgcgttttgctttggagaatgtggggtagacgacggcggtgtccagcaccttgcccgtcgggtcaacgacggcgaccttgcagccgtggctgtagcctgggtcgaggcccatagtcacatggccgcgcacgggcggctgcatgagcagcggccggagattcagggcaaaattgcggatggctccctcgttggcccgctccgtgagcgcggcgcgcagctcgcgctccatgctgggcgcgatgaggcggtcatacgcgtcctcgcaggcggcgcgcaggaaggcggctgcgccgccgcccggtacgagcacgcagcggcgcacgcagatgagggcctgatcgcggtccgtttccagcgtgaccttcagaaagccctcgcgttcaccgcggttcacggcgaggatctggtggccctgcagtctgggcaccggctggcggaagtcataatagagctgatagacggaggtctcctcctccttccccttcgcggcctgcgtgcgcagaacggactggcgctgcatcaggctgcggagagctttgcgcacggcagcatcatcggagacggtctccgccacgatgtcggacgcaccggccagtgcgtcctccggcgtctccacgccgcgcgccgggtctgcgaatccggcggcaagcgtgagcggatcgggcagatcgcgggcctgccccagcagctgctcagccagcggcgcaaggccgcgctcccgggcgatggtcgcgcgcgtgcggcgcttcggcttatagggccggtataggtcctccagctccgatagcgtcactgcggcctgcagagcagcgtcaagctcgtccgtcagcttctcctgcgcggcgatggagcggcggatctcctcacggcgctggtccagattgcgcagatactgcaggcgctctgccagtgtgcgcagcgtcgtgtcatccattgcgccgtgctgctccttgcggtagcgggcaatgaaggggatggtgttcccctcgtcaagcaggcggacgaccgcccccacatgctgcggcttctgccccaactcggctgccagcagccggatcatatcttccattccgatctcctccgtgtgttcggatacggcggccgtgccaacatggcccagccgcctgtttttctgtattgtaccatgttttccggaaaaagaaaaggaaaacgagaaccccgccggagcagccggtggggttcggtgaatcgcaggcctcccgccgccgcggcagaattgcaaaataatgctgcaaagttttgttttgcaattctgaaagcccaaagggattttttcaacaaaatgggggctgctccaaaagaagcagccccgcggaagagacagataaaacaagatgttcgacaataccaatacttcacttcaaattattaggagatgctagaaaggagaataagatagtaagaaaaaattacccatactcgcggttaactcttgcctgaccaaataacgaaagaaagaagaaaagatgaaaacgaacgtggactgagccgcggggatcccagagtgcagcccatagcctctgcaggacaggcctgctcacaaagacggctgcgcacaccgctctgtgcgggacaggagaacgaacgagcgggaccggtcaatggcgaaccatgcagcgctgcggcggccgccgcgctgctccgactatgttcagaggagatcttctcctctctggtgccagtttaccacgttgtgcaaaaaagtgcaagcatgttacgcctaaaaattcatggagaattcaacaaattatagaaagaaaaattggcaatatcgacaaaacagggagaaaatggaattttcagcgctcaagctacggaatcgtcggacgatttctgcattttcttgcgcttttcgcgccattcacgccagcgcgtctgcgcgcgcagggtgtacagcaggatcagaaggacctcgagcacggcgcagatgacgtagacaagaaacagccggttcccgtgcgccgtgaggtgcaggctcagaccggcgccccagatgataagcgagcaggcgaagatctgcgagagctggttgctccagagcgcgcagaaaacctgcgccacgattccggagatggggatgccgtagatgaacagcagccaggcataccggtcacagatcgagaagatctgcgcgccgcagaataacactgtcatcacgagccagacaaggccgacggacagcagcgagatgagcaggtggcgcgtgcgcgttttggcgaccttcttttcgcgcagcaggtcctgcacggtgatgccgtagagcgaggcgatatgggagaggatgaagatgtccggcgtgccgtcgccgcgctcccacttggagacggacttatcggagtagctgagcttttccgcaagaccggcctgcgtgtcgccgttcagcttgcggtaataggcaatgttttcggcgatgagctgccgcagcttttcatcggattcattcatgggcgtttgtcctttctgttggtggggaatgcccgcaaacccttgcaaatcaaggactctactcacagtagaaccccattctcgggctgatggagtcgctctccagactgcggagagggacggctcacgccggtagcgtgacatacggggcggggcatggtacgatgagtccagcagccggggcggcccggcgaatgactcacggggaggcttcatcatgaaacagaaatttgcacaggcggtccgtatcctgacaacgccgccggttttttccgcactgatgtgcacgctgctctatgtgctcgtgcctggctcatttgcttcgctgggacattatctgcttgcgatcgtgtgcctgtcgctgctgccggtgctggcctatccggtgtcctatctcatcccggcgcttcgcagaggcggcagaaagacgcagcgcaatctggcgctggtgttctccgtgctcggctatctgatcggcttccttgctgccgtgctggacgacggcgcagcgatggaaaaggtcgttttcggaacgtatctcatctccggcacaacgcttgctgtgtgcacgctgctgcatttcaaagccagcggccatacctgcggctgctccggcccgatcgcggcgctgtcgatctttatcaatccgtggtttctggtcggctatgtgctcctgacgccgatcatctggtcgagcatccggctcaagcgtcacacggcgctgcagcttcttgcgggctgcgtcatcccggtgctggctatgctgatctgccgggcgcaattcctgtaaacagggaatcccaacgcacgggcagcacgtccgtccgtgcggatttttatgcaactgcaaaatcaacacacagagaggacccacaccatgccgtacatgttaagctgtgattccacgacggatctgacgcttgcgcaatacgccgcgctcgatctgcattatgtttcgctccattttctgctggacgggaaggaatatcctgacgactatggccagagtctgccgatgaagacgtttttcgacgccatggcagccggggccacgacggggacgtcgcaggtcacgaccggggaattcgagctgtatttccggcagtttctggagcaggggagcgacatcctgcatgtttcgctctcgtccggcctgtcgggctgctatcattccgcctgcgccgcgcgggacatgctgctggaggaattcccggagcggaaaatcatcgttgtcgactcgttctgcggctcgggcggcgctgctatcctgatgctcgaagcggcgcgtcagcgcgatgcgggccggaccatggaggagaccgccgcctggatcgaagcgcgcaggctccatgtgcaccactggctcttcacgccggagctggcatattttgtgcgcggcggccgggtcagcgctgcggcgggctggatcggcacgctcctgcgtctgtgccccgtgatcgaggcaaactgcgagggcaagctgatcccgcgggagaaaattcgcggcaagcagcgcgccttgcgcgttcttgtggagaaaatggtcagctatgccgagggcggcatggcctatgacggcccctgccatatctctcatgcggacaatcttgcggacgccgaacagctggcaggcatgatcgaagagaaattcccgcagctgcgcgggagaatcgtgatcaataccgtcggtacgacgctcggcagccactgcgggccgggcatggttgcccttttcttctatggcacggagcgcggccgttgagcaggctgacaattctccaatattaatattatagcagaacaccggcggattgccaagcccgaaaacggcggcagtccgccggttggctgtatcaggacataaaaacaccgggcacggaaaatccgtgcccggcaggcggttgaccttatttggcgtattcgacgaccttcgtctcgcggatgacgttgaccttgatctggccgggatattccagctcagactcgatcttcttcgtcagctcacgggcgaggatgatcatgttgtcctcggagacatcctcgggcttgaccatgatacgaacctcgcgcccggcctgaatggcgtaggacttctcgacaccggggtaagtgccggtcagctcctcgagcttttccagacggcggatataattctccacgttctcgcggcgtgcgccgggacgagcggccgagatggcatcggccgcctgcacgaggcaggcaatgacggtgcgcggctcgacgtcgttgtggtgcgcctcgatggcgtggatgacatcgggcgattcgttgtacttgcgggccagctcaacgccgagctggacgtggctgccttccatctcgtggtcgacagacttgccgaggtcatgcagcaggccggcgcgcttggccagcgcgacgtccacgccgagctcgcttgcgagcagaccggcgatgtgggcgacctcgatggagtggttcagaacgttctgaccataggacgtgcggtacttctggcggccgagcagcttgatgagctcggggtggaggttgttgatgccggtctcaaacgtggcgcgttcgccctcctgcttgatgacgcggtcgacctccttgcgggccttctctacgagatcctcgatacgggtcgggtgaatgcggccgtcggcgatcagcttctcgagcgcgagacgcgcgacctcgcggcgcacgggatcgaagcatgagacggtgatggcctccggcgtgtcgtcgatgatgagatcgacgccggtgatggcctcgagcgtgcggatgttgcggccctcgcggccgatgatgcggcccttcatctcgtcgttcggcagagcgacgacggagacagtcgtttcggcggcgtggtcggcggcgcagcgctggatggcgatggagatgatctcgcgggcgagctgatcggcgttgtccttgaggttcgtctcgatctccttgatcttgagcgcggcgtcatgcttgcattcgttttcgagattcttcagcaggtggttcttagcctcctcctgcgtcaggccggagagcttttccagcgtttcgagctggctcttcttgatcatttcgacctcgtcctgcgtggcggcaatatttgcctgacggcggcggagatcgtcttccttgcgttcgaaggcgtcgagcttcttgtcgagagactcttccttctgctggaggcggcgctcctgcttctgcaggtcggcgcggcgctccttgacttccttttcgtattcggttctggatttatgaatttcctctttcgcttccacgagcatctcgcgcttcttattctcgccgcccttgatggcttcgttgatgatacgcgttgcttcggtttctgcgcttccgatctcacgctccgcgactttcttgcgatagagcatgccgatcagaaagaagataaatgctacaatcagcagtcctgcgacgagcaggacgtaaccataccattccattgccggaatacacctcctgttcttcaaattgggtgcgtgtgtcacgaaaaagtaatgcttcctccggctaccccaatgcacagagcaaacaaacaaatccactgtttattgtaccgtttcacttcgcgaaagtcaagcaattatgcagggaaaattgtttccctacaggaaaacttgtgcaaagcatacaaggcgttgacaacttgcagccggaatgatagaattataatgagttggaagcggaactcattctccgttttcaatttgatcgatacgcgggtatgatggaattggcagacatgcaggatttaggttcctgtgcagagatgcgttggggttcaagtccccatacccgcaccacgacaagccactttattctataaaaatgtgaggagaaaccggaacgtcatggacaatttcagattttcgaccctggaatataagcgccccgatctggatgcataccgcgcaaagctcaaggattggaaagctgcgatcgaacacgcggagagctacgaggctctgcgcacgctgcttcttgagatggaccgcgagaactgcgagctgtccacgcagtattccatcgcgaacatccgccatacgctgaacacccgtgatgaattctatgaaacggaggtcgcctatcttgacgacacgctgccgaccctcggcggcgaggaggtcgcgctgagcgaggctattgctgccagtcccttccgcccggatattgagaaggaattcggcaagcagtattttgtctccatggatctgcagaagaagctgttctgcgaggccaacatcccgctgcgccagcaggagagccgcctgaccaacgagtatcagaagattatggcgactgcggaaattcccttcgacggcaagaccctgaacctctacggcgtgcagaagtatttcgagcaccccgaccgtgccatgcgcgccgctgccgtcagggcctacgccaaattctacgaggacaacgagccgcgtctggaggagatctgggacgagctgatccgcatccgcaaccagatgggcaagaacctcggctatgagaactacatccccgtcggctatctcgagcagagccgcacggactacggcgaaaaggaggtcgcgtctttccgcgagcaggtgcgcatgttccttgtcccgctgtgccaaaagctctatgacgcgcaggccaagcgcctcggcatcgaccatgttatgtggtacgacgagaaaatggtcttcccggacggaaacgccgagcctgcgggcgacgacgcctttatggtcaagaccgctcagaagatgtatcacgagatcagcccggagacgggcgagttcatcgatttcatgatcgaccacgagctgatggatctgcagaacaagccgggcaaggcatccaccggttacatgacgagcctgcccagcctgaaggccccctttgtcttctcctgcttcaaccacacgatctttgatatgcaggtgctgacccacgagcttggccacgcctttgccggctatatggccatgcgcagccagcccatctcggactactacagcgagtcgaccgacatcgccgagatccactccatgtccatggagcagtttgcctatccctatgccgagtggttcttcggcgatcaggcggataagttccgcttcgcccacctgcaggaggcgctgaccttcgtgcccttcggcgtggccgtggacgagttccagcacatctgctatgcccatccggagctgacgccgaaggagcggacctatcagtggcacctgctggaggaaaagtacatgccgtggcgcaagtatgagagcaatcccttcctggagcgcggcggctactggtaccacaagctgcacatctatctctatcccttctactacatcaactacacgctcacgaccatgggggcgatggagttcaagaagaagtacgccgaggacaaggccgccgcatggcaggactacctcaagctctgcaagaccggcggcagccgcagctatctcgagacgctgcgctacgccaatctggccaatccgttcgatgccggctccgtcgagcgcgcctgcggctacgcggaggagctcctgatcaagcagatcgcggagcaggaacagaaagcgtaaaagcctataataacgatcaagctccccttgaggcctgccttgaggggagcttttgcatgcagaaaaactgcgagtccgaagaagcgtgagccgccccacaatttgaacggataacactgcagattctcctgcagtttgcaggatttcctttttgaccgcgattctgtacaatattaccagagaatcaaagaaaaggaggctattcttatggcattttctctcgacagtaaggtaaaggacatcctgaagaacccggcggcggcagcggtgctggacaaatacagccccgatgcttccagaaatccgcagatgaagctcgtcggcggtctgacgctgcgcaagcttgccagcttcccgcagtctgcatttctgaagccccatctggaggagctggacaaggagctccaggctatcgaatgatttcgaagctgacaaactgatttctacgattcatcccttcaaaatgggcggcttccccgatcggagagccgcccatttcatgtccatttttatttcgctattctgaaagcacttggcgaaaaagttgactaaatttgcggaacaaagatcccggcgttctggccgccatcggcgaggatatccacgccgttgacatacccggctccggacgagcagaggaaagcggtcagcgcacccatttcatagggatggccccagcgtccggccggaatcagctccagctgattttctgcagtttccggttgattgtcgatgagcttctgatgcatgggcgtgagataacagccggtcatagaagttcggctcattccatgcctcaaacgcatccgtccactcgtccgtttgcggcatggtataggcagcgacagaggcaaaattgatcatcacgccgtccccggccagaaccggataaaacgcctcaaccatattgactgcgccaactgcgttgattttgatgatattttccgtccctgtatcgctcggcgacacaccggaggtgtggatgatctgcttcacgctgcccagcgatgcagcatagtctgccagtgcctgcacctatgcgcgatctgcaatgtcagttttgcaaagatagctctccacaccaagctcgtccagctccgcttttgccgtttccagctttgcaggattacggcctgccagcacgatcgcagaagtctttccaagctccttgcagatcgcttttcccataccgctatggccgcctgtcacgaccgttatggccttttttatgtaagttcctccctgatttcaagatggcacaggcggctctgtatgggccgcctgtgctgtgttttcatttgtgttttttcagaagcacgtccagccgccgtcgcatttcagctcctcgccgttgacatagcgggactggtcgctggccagaaacagaatcgcgtccgccagatcctccggcatggcaagctcaccggagaagtccagcagcttgctcgtccggctgaagccgaactcgtcggagggcggcatgacaagcggaatgtcggttaccacaccgccgggggaaaccgcattgcagcggatgccctcctccatgtacatgaacgcggtattctttgtcgccgccagtaccgcgcccttgctggcgcagtaggctgcgccggaggtctggtgcgttgcgccgacagagcagatattgacgatcacgccgccttcaccctgtgcaagatactgccggcattcctcacgcattccgtacatgaggccaaaggtgttgatgcggaacgtctcatggagcatttcatccgacagatcggcaatggcggtgttgtcgtccatgataccggcgtcgttgacggcaacgtccagctttccaaacgtctcgactgcctttttgaccatgcctacagctgtttccgggtcgccgacgtcgcccgcgtaccagacaagttcgccgggcaagtctttgcattcctccgccagctccttgagccgctcctcgcggcgggcgaccgccacgaccttcgcgccctcgcggcaaaacagctccgccgtggcgcgcccgatcccggcggaagcgccggtcacgatgcagactttaccatctaatcttcccataatgtcctcctcagcagaaaaccttgtttacgacaacagcgggtgaatcgttgcagccgacggtcagctccgcgccgtcgggcacgtccgcgcggacggtggcaaagccgatgttcttatcgaccgtatagccgtagatggtctgcgcgcagcggccgacctcgacgccgtaccagtacacacgctcccaaatggagatatcctcggtggattcgcgggagaattccagaccgaccatacggtatttcgggtgctctttccgtgccagcgccgcttccttgccgataaaatccttgtcggcggcgaccgcccagccaaggccgcattcatacgggctcaggtgcttgaaatcctgcttgagcgcgaagcccttttccatcgggatagagcggacgtagacctcgagcgtctgcagctcgcggccgccgacagactcgacggctttgagcgccaggtcgtgaacttccgcgctcttgtcgaatgcggagtagatctcatatccgttttcgccggtgaagccggagcggtggatataaacggggatatcgccgagcttccgctcacagatgccgaagcgcttgagatcgtcgaccggcgcgtccagcatggcgttcatcgccttgaggctgtccgggccctgcacggcgtacatatcccagtcgtaggtgatgatcttcgcgtgaatatcagcctctcccttgtgctgctcgatccacggcagcaggcgcgggccgtagaggtcggagacccaatacaggccgtccgccatgtgcatgacgatcacgtcgtcgatgatctcgccgttttcgtccagcgaggcggtgtatttcgagcgcccgacggcgaccttggaaatgtcgctgatatagattttttgcaggacttctaaggcgtccttgccggtgatctccaccagatcatgcgtccagcggtagaagcctacacccttgcggatggcctcggcgtcggcgcgcgcgactgtatcttctctgaataacatcgttcggcacctccttacagcatccgcaggtcttccttgcggatgaccttgatatacatatcttcctcgtcgcggtcttcaatgacgcaggaccattccgggctgaccagcgtcttggccgcaccgttccactgcgcctcgtaggcatcgaccagctcgtcgagcggcgccatctcatagcgggctgtgaagtcctccgatttgactttgatccatgtctcgtccttcgtccagcgcaccatctcatacggcacctgctgcacgtcgagcatatagcggatgtagccgccgagaattctgccgtcgttttcgtccatctcgtgcggcacgccgaggtagctgcgcaggccctctttggcaaagggatcgatgaactggttcttgccggccgtggcaaagacgatgcggaacacgcgcaggaactcatcctcatcgggagccatgtccttgatggccatcatcgggaactggatagaccagacccagcccatctgcgcgacccagtggtacgctttttcgagcgacgtttcctcgccgaagttctgcgtgtactgaccgttgcgcaggcactggccttccttgaccatgcgctcgcgcggggtgtcgtggatggggtcgacgggctgctgcatgtggtcgagccatccctgcttgggaaggccgtacacgtcgcggcgctccgccacgacgcggcagtgcttgttgccgcagcctcgggcctgacacatgttgagcgcgacctcgttttccgtgcccttggaggacgcgaggtcaaagtttgcggtgaacatgctggtcgtcatgttgcacagctcgctgccgacgatgtcccacggacaggtgtcgagttccttttccacacggttgcgcgtgaactgcacgacgcggcccgccatgttctcccactcgtcgccggagtcaccggtgatgccgccgagccagctggacttttcgcacagctccgggatgttgaacgcctcatagagcgaggcgttgacatagtccttctgctcctccggcgtaccggcgacggccatattcatcatgttggcaatgccgcagatggcttccgtgcgtttttcccagctcggttcaaagatgcgcatgacctgaaataaatttgcggtcattgctgcgatctgacggttgagctggcgataggcctcttcttccgtaatgagcttgccccatgcggtcgggaagcatttccgctgctccagtttttcttttagcatggtattcctcctgtctctttttctgtattgccgctcttattataaaaaatagacagtgcggcgaaaatgctgcaaactgcgcgtttttttctgctctgcaccgtacagtttgtacgccgacaaatcatacaatttgtatggtttgtttttgtgcaaaacagaaaatatagcaaaaagtatgaatacggagccatacaaatgatatggtcttccattgacagccgcttccggacggcatataataaaaaccgaaaacgggagtgaaaagtgatcggaggggaacatcccatgaaactgtgcgcgggtattctctattgggggctgaaggaggagctgaagacggtcgagctgcatggcgcaggcagtcaggagctgacactgagccggccggaattttaccttgaccggacaaaaacgtttgagaggaaccgcgtctacgtttgctcggccgatcatctgccgacacgtccgtcgctcagtgcaaacgtgtgcctcgtctgtctggggcagcactggaacctgaatgggttctatgaccggtgcagtgtgattgtggtcgaagcagatacggacatttttcgcgtgttcaatctggtgcagcacatttttgaccggtatgaggcatgggaggaacggctgtggcatatccttcgccacggcgcaagcctgccgcaaatgctggaggtcagtcggggaatctttgaaaaccccatgctgctcattggctcagacttccggtatcttgccgtgacggacgaggaatactttcagaaggatctcggcatccggctggataccgagacatttgacgcagagaagatggcaacctttttatctctgcacgacctttccactcatgtgcatgatccgcttttgctggagctgcagggtattcggacgctgtcggtcaacgtattcgatcaggaggaatacctcggctgcctgacggtgtttgaggccttccgtccgcttcaagattttgaccgcgcgctttcgatctttcttgcaaagctcctgcggcaggctgtccagcagaacccgacgcttgccagcacccgctccgccgtacgccgcgccctgcgcagcgttatcgcagggcagcctgtcgattttgagctgcggcgtgcgctcagtcaggaaaacgggaaaacggactgggtctgtgtccgcctccagccaaagcgtggggcagcgccgctgcccggcacgtatctttccgccgcattggaagaacggtacaccggcgcgatggcctttgagtacgagcgtaccgtcgccgcatttctacccgccgcacaggccgaatgtgagacaacggcgcagctcctgccgctgctggacagactcggcctggtctgcggcgtatccggtgtgttttccaatctgtatgaggcaaatcaggcatggttccaggctaccagcgccctgcagaacggctttttgcaggatggaaacggcacggtcttttattttcaggactatctgctgccgcagcttttgtccggtgcgctgtcagggcgaccctcgtgggtctattatccgaacgggctgaaaaagctcaaagcgcatgacgaagcttcgcaggtctcgtatctggagacgctgcgcgtctacctcgacaacaacctttccgtcaccagaacggcagcggctctctatctgcaccgctcgacgcttctcgatcgccttgcccatatcacgcagatgcttggccgagatctgaaggatccggatttctgcctgacgctcggcattctgctccgtgcggagctgcagcagaaacggctgactcgaccgaagacataatttcattcccgctgcgggtttcgcagcgggagctttatgttcttagcggagaaacagcgccataattccggagagggcggcatagacaaagagcagcacatccggggcgagaatttgtctttgatccgcaggccgtttttctgaatctcctctgcccagctgccccgtgccagattgcagccgggcacacctgcgccgaataccggaattttcatagttcgatctcccgtttctgtccgtttgtttagataaggttagcgaacgctaactgctacggcatgatgatagcacccattttgccccaatacaatggcccttgcgaaaaaaaggacgcttccgggaaaacggatgcgttgtatatctacattacacgctgggacaaaccccaacactctcgacaaatatcgacaaaaatcgcgttattctgcgcaaaaaactgcttgacatttcattaaaatttcgatattctaaaaataacggcgaatccgggcagcaatgcgggattccctgtgaatcggaaaacgggaaggggaaagaatatgagttgggatttgcgcgccctcggcggggcggtacagcttccgtgcggagagctggcctggacaaagccgcagatctttcgggtgcttgccagcgtcgaggcaatgcgcggcgtcgttctgggcggggatgtgctgttcggcaacgggacctacaccggcagcagctggcagtattgcctgacctgcgaggatcactatgtcgccttcctgcgggagaactgccgcggcagccgcagaacggccgaggcattcattcgggactttttggccacgcgcagcggagaatacctgtttgcgcccgtgctccgcgagggcgtggatgcctatatccaccgcagcacggggggcctggctccgggctatgactgcgccgcacggtcgggctgcggactgccgtgaccgtttgccggaaaagccccttggacttttccggcaaagaaattctgcttcgctgcggagcgcttcagacgcgctgcggcgtctgcgcaccctccgggtgggtgatccggacgggataggacccggtcccgtcgccgacggtctgggcatacagccgcaccatatgctgccaggtccgccggtccagctcgccggtcacgggcaggccgcagcgggcctgcagccatttgaggcaggcggtgcaagcttcatcgtgccggcctgtcacggaaacgggcggcatgccgtcatagtagtgccgcagggcctgcagcatgccctgagcaaggtacaggtgcatgttctgctcgccgggggagatggtctgcatcggctgaaaaagcgggcgcagcggctcggccgggccatggtggatgtgcgcctcgcgcgcggcatccacaacggcgttccaagtcgtaaggtcggccgctccggtgacgggcaggccgttctgctgttgaaattcccgcacggcacgggccgtctccgggccgaagatgccgtcgggaacgacggttgtgggcttcccggcatggcgctgcagcaggcgcagcatggactgcagggaacggatgggcatttgcatggctttcctccttttatgtgtcgctgtcgccgaggcgcaggatctgtcccgggaaattcgggatcactccggcctgcacgagatagccaacctcctctgtgatctcctgtgtcacatcctgtggcagtggcccggtctcggcgatcccggcgagacggtcaaaaatggcgttccacgtctgctcgccgacgatgccgtcaatggccagaccggaaaagcgctggaaggcccgcacgctgttggccgttaactcgccgaagatgccggtctgcggcggcatggggacgtcgttgatatacgagccgatgacctgcagcatatactgcagcacgcgcaccggctcaccggtgctgccctcgcgcagtacgcgggaatactgccagtttacggcatagaacgtctgcccctgcgaggccagctctgacagctccgtcaccgcgacatacagccgcacgagctgataccacgtgcccttgccgacgatgccgtccgggtccagattgaagatgcgctgtgcggccagcacggcattttccgtctgcgtgccgaaaatgccgtctacggacgcaacacgtgggatggcggggtagttctgcccgatgcggttgagcatgacctgcagctgcacgacctgcggcccacgcgagccgcggcgcaggggcgttccgccgtaggagggggcgtagccgcgcatgggcgcgttgcggacgatctcgatatcctcgccgtaatagcggcggagaatttccacggagctcagcccctgctgtgcaagctcctgtgagccccactggctcagaccgtcgcacgtcacggtcgttccgttgcagaatttggcggccagcggctccacaaagccctgccgccggagataggtgttgaacagctcgtcgacgaggcggccgacattttcaaaaatattccgcccgttgatgaatttctggtcgatggccgtcgaggacgtgatgtcgaaatcatagccccggctgcggtagaattccgtataaacgcggttgagggcaaaggaaatgatggccagaatgttggcgacgagggcgctgtcctcccacgtcgggtaaatttcgctcgaggcgacgtttttgacatagtccgcaaacgacaccgtcacattcgcggccgaggcggtcggcggccccagatgcacggtgatctgcgcgggaatgtagggagtgaccgttaccatggccgccacctacagcgcctgcggcgagatcgggaagacctcggtcaggttgtaatactccggatactgcgggtaggggatcatggccagctcctgaatggcccgcaccccggcgaagatctggatgccctccacgaggatctgctcgtagccggggcactccgccgacaggtccacctgcgtgaacggctgccccgttcccggggcctgactgcccgctcgctcgggcgcttcgatgacgatggggccgatcatgccgctttcgtccgtgatgcgcagggcaagcagcttcatgctgccctccggcgtgcgctccgtgatgcggatggctacgccgggcagcgggagctgcgcgttggaagcaaaggctcgcgcctgtagggttccgcttgctgccataaggtacctcctgaatcgggtttgggcagcccttgcgtactgccctgagatagtctatgcgcaggtgctcccgcctgcgccaaaatttgtgcttgacagcgtaacaatgttatgctattatgatggcgtaacaatgttacggaaggaggatgcgaatggaagacctcatttccaagcgtgagctgctggagcgctacggcgtgtcctatggcgcgctctatcgctggaagcgcatgggcctcatcccggaggactggttcctgcgccgggcgacgccgaccgggcaggagacgtttttccaccgggcgcagatctgcccgcgcgtggagcagattttgcagcgcggggatacctcgctggaggatctggccgaaaagctccgggaaccggagcggcatgcgccggaaaactggctcatcgtgacggaccgctttaccagccgccgcttccggctggaggaactgaaaagcattacattgatcgtggacgggcaggcgcaggagctcctgccaaagcagaagggagttcatcagaaatgaaacagaatttgaattgttccggttcgacccgcgttgacggcggggaatacggcgaggtgcgcgtaagcgccagcctgcgcgtggacggcgacctgcggtgcgacaccctgcagtgctccggctccgcaaagatcgagggcgcgctttcctgcgccggtgaggtccgctgcagcggctcggtgaaggtcgcgggcgaggctgccatgcaggagggccgcttttccggcagcgtgaaggcacagtcgctgcactgcacgggaacgctgcagtgctccggctcggcaaagatcgagggcggcatgcagcttggcaaggcccgcttcagcggcagctgcgccgcagagggcgacatccatgccgaggagcttgagatcgcaggctcactgtgcgccccggctgtggaggccgagcgcttccatgcctccggcgtgttccggatcaacggcctgctcaatgccggagagatcaccctgtcccgcggcggcctgtatcaggcgggcgacatcggctgcacgacgctccgcgtggtgcaggacgcgcatgtgatctcgctcggccgccgcaagcgcgcactggaggcccagtccatcgagggcgatacgctcgagctgctcgatacgcaggcggccgtcgtccgcgggcgctttgtctgcgtcggcgcaggctgcgtgatcgaccgcgtggagtattccgaggacctgacggtcgaggacggcggtatcgtaaaagaaccggtccgctgctgattgacacggcgtgtcccgcatgatagaatgcgggaaaaggaggaaatgcttatgctgaaatttcccagggatctatactcggatgtccgtgtggaggacgtggcggaaacgacgctcgtactcgaggacggcgagctgaagcagtgcaccgagagccgccgccgcggcgcatttgtgcgcgtctatgacggaaagcgctggtataacagcgccacaacggagccggaccgcctgcagcaggagcttgatacgctggccgccatggcagagccgaacccggccatcggcgacgaccctgttgtgcgccgttttgaggtgaatcgtgactgcgtgctgcgctggcaggcaggcgacctgcgcgccgtgccggtggagcagaagctggcgctgctgcgcagctatcagcccctgctggagcgcagcgggcttgccgccacccgtgcgcgctatctggatgtgcatgtcgacaagaccttccgctcttcgctcggcgcggatatccggcaggactatcagcactgcggcatcgcgctgggctataccgtcacgggcgcgaacgcgccgttcacgaatggtcggcagcgctatgcatcggatttcgcgggcctgcagggctgccaggagggcctgcgcgcggccattgcggaggacgtgaactatgccatgcacgccgtccccgtggagccgggggaatatacctgcgtgctctcgccgacggtcgccggtgtgtttgcccatgagagcttcggccacaagagcgagtcggactttatgctcggctccgagacgatgcgccgggagtgggagctgggcaagcaggtcggctgggagggcctgagcattctggactctggcgtgccgaacggctccggctactgcccctatgacgacgagggcacgcgcgcgcgcgacacctatctggtgaaaaacggcgtgctgaccggccgcctgcattccgcagcgacggccgctgcgctggacgaggcggtcacgggcaacgcccgtgccatcagcttcgagtttgagccgatcgtgcgcatgacctccacctggatcgcgggcggcacggacacgtttgagagcctgctgcggggggccgagggcggcctgtatatcccggacttcttccacggctccggcatgtcgacatttacgatcgctccggcgcgcgcttaccgcatccgcggcggaaaaccggcagagccggtgctggtcagcgtgatctccggcaatgtgatgcagacgctgcatcagatcgacggcgcgacggccgagacggagctgcacagcctgttcacgggcggctgcggcaaaatggagcagtggccgctgcgcgtcgcgttcggcgggccgtacctgcgggtgcgcggcctgaaggtgcagtaaggaggagacggagatgcaaaaggagctttatcagatcgagagaagcgaggtttctctgaatatttccgagggcgccgtgacggaggtgcgccgcaagcacatcgtccgcagcggctgccgcgtgtatgatggcggaaaactcggcatcagcggcgtgtttggcgagccggacgaggcaacatggcaggccgcgcagcgcgcgctcactgccggcctttcccacccggagccgcttggcgctctggtccgcagccgcgagaccggcgttatgccggaggagcgtgagctgctggagcagtccgaggctctgctggcacatctgcgtgaggaatgccccggctttgtgttttccaataagatcgtggcgctttccgagcgggtgcggctggaaaatgacctcggccgcaggctcgacgacaggcagagcggttcgttcctgaatctggtcgtgaaggacgaggcatcgccgaacgtatttgacaccggcatcggctggacgagccgcggcaatgcggccgtcgacgggctggaggccgcgcgccgttccctgcgtgcctaccgcaacgaggtgcctatgccgaaggaaaagctccccgtcctgtttgagggcagcttcctgagcgaaaagctcgagggcctgctcgacgtgcagaagctggagagcggtgcgtcgctgtttagcggcaaaatgggggagaagctcttctccggcgcgctgacgctgcaggtcgaccggcgtcctgagagctggctgccgttctttgatgcggagggctccgtgctcgagggcgacacactgccgctcatcgaaaacggcgtgcttgtgcgcggcgcagcggatcgtgcacaggctgcgcgctatggctgcatggcgactgccgcggcgggcggcgcttatgacgccgcgccctgccgctcggcctcggagggctgcctgcgcattgcacagacacattcctatgccgagctgctcggcgatcggtcgtttatcctgatcgacgtggcctccggcggcgatatgacgcctgcaggggatttcgcgacaccggtgcagacggcctatctgtgccgtgacggcctgcctgtcggccgcctgccggaattcagcttccgcggcagcgtgttcgacctgctgggcggcggcttcctcggccggacggacggcggcccgctcggcggcgacggctggacgcttctggaaggtaccatcgacgcctgaacggatctgcaataacaagcaagacctgcctgaacaaaatcaggtaggtcttgcttgttattttgcgtctctggaatcgatcgttccgcggaagacgacgaagcggtcatagaggaactctaacacgaggttcagcaccatgttgagcgccgtgacaaggtagtcgttccagagctgcacgtcggtgagccagtgctccagccaggtggtgcagggcgtaaagacgaggtagaacagcgcgacaagcgccatggcgcgcggcacgcttgcggcggagcggaacgtatagcgccggttcagcgtgaagttccagagcacggagagcaccagcgcgatgagatagcccagccatgcgggcagacggatgacgtcgttgcacagggcgaacgcgccgatctggatgagcccggccgaggcggagaacagagtgaacttcagcgaacgcagcagctctgcacggcggttcaccgtgcccatgcggcgtcctctgcctccgaggtgcggtcgcgcagcatgagcgaattgagcgcctcacgcggatcgcggccctcatagagcacggcataggccgcctcggtgatcggcatgtcgacattcttgcgctgcgccagctcccagacggactgggcggcataatagccctcgacgacggcgccgacctgcttcatggcctcctgcacgggtacgccctggccgatgaggataccggcgcggcggttacgggagtgcatggacgtgcaggtgacgatcaggtcgcccacaccggccagaccggcgaaggtctcgcggtgcgcgccgagtgccatgcccagccgggcgacctcggcaaggccgcgcgtcatgagcagggccttggtgttgtcgccatagcccatgccgtcgcagacaccggcgcatagggcaatgacgttcttgagcgccgcgcccagctcgatgccggccgtgtccgggctggtgtaaacgcggaaacggctgcacatgaaggcgttctgcacgcgctcggcaagctcccgctccgggcaggcgacgacaacgcccgtcgggatgccgcggctgacctcctcggcgtgcgaggggccggacagggcgacgacggtgcggccggtctcctgcgagacaagctcggacatgcgatagccggtaccttcctcgatgcccttcgtcacggagacaagcaggggcgtttcggcgaggtacggcgcaaaggcgcgggccgtggtgcgcacggcgaacgacggcgtggcgaacacgaccatctccctgccctgcgcgcaggcggggtctgcagaataatgcagtccctccggcagcgtgacgccggggagatatggattctgatgggtctcggcgagctgcttgctctccgtttcgaaatgcgaccaaagggtgacatcgtgaccgttttcatgcagcagaatggcaagggccgtgccccagccgccgctgccggcgatcgttacctgcatggaagattcctcactttttcttggatttcaaaagataggtttttgtctccgtgccatggagcagacgggcaatattgctgcgatgcatgaagatcgcaaggacggccatagcaatggcgatgctccagatccacggctgcccggggaaaaagatgacaaacagcacggcataggccgtggcggccagaatggagccgagcgagacatagtgcgtcgcaaagacgatgatcagaaacaggctgaagccgatgacaaagatgcgccagtccatcatgatcgccagtgcagcgctcgacaggatgcccttgccgccgcggaagccgtaaaagaccgggaaaatatgacccagctccgtcatcgcgcctgcgatcatcatcccgagctgcgggtttccgggcaggagccagcggccgagcaggcaggcgagcacgaccttacccatatccatcaggacgacgagcagcgttgcccagccgccgaagttccgcagaaaattcgtcaggccggcgtttccgctgccttttttgcggatgtcgtcgtgcatgcaggtgtgcgacacgacgatagcgccattgcagctgccgagcaggtagcccgcagcggcacagcagacgatgcgccaccagtccatgctcagtcctccttatcgcccttctggcggatggtcagccggatgggcgttccctccagaccgaagacaccgcggagctgattctccagatagcgctggtaggagaagtggaacaggcgtgcgtcgttgcagaagatgacaaagtgcggcggcttcacgccgacctgcgtcatataatagatcttcagacggcgtcccttgtccgtgggcggctgcacgcgggccgtggcgtcctcaaggatgctgttgagcatgccggtcgtgatgcgcatggcgctctggttggccacggcgttgatgcgctcatagagcttgccgacgcgctggcccgtcagggcggacagaaagatgatcggcgcgtaggtgagatagctgaggtcgcggcggatctctgccgtcttctcagccatggtgttcgtgtccttgtccacaagatcccacttattcacgacgatgatgctggcctttccggcctcgtgggccagaccggcgatctttgtgtcctgctccgtcacgccctcgacggcgtcgatgaggatcagacagacgtctgcgcgctcaatggcggcgatggagcggaggttggaatatttttcaatggcgtcatcgaccttggacttgcgccgcattccggcggtatcgatgaagcggtatttgccgaattcgttttcaaaatagctgtcgatggcgtcgcgcgtcgttccggcgacattggagacaatgacgcgctcctgcccgaggatgcggttgagcaggctggatttgccgacgttcggcttgccgatgatggcaacgttgatgacctcgccctcgtcctcctgctcggaggaggcggggaagtgcgcaacgcaccagtcgagcaggtcgccggtgccgtggccgtggacggcggagacctcgatggggtcgccgaggccgagcgcatagaattcgtagacgtcggggttcgtggggccgacggagtcgcacttgttcacggcgagacagaccggcttgcggctgcgcagcagcatattggcgacgtcctgatcggcggcggtcacgccggtcttcacgtccgtgaccatgacgatcacgtcggcggcggcgatggccagctcggcctgacggcgcataaactgcagcatctcactgtcggtgttcggctcgatgccgcccgtatccacgagctcgaattcgcggccgttccagtcacagtcgccgtaaatgcggtcgcgggtcacgcccggcgtatcctccacgatggcggcgcgccggccggtcagtttgttgaaaagcatggacttgccgacgttcggccgtccaacgatcgcaaccaagggcttgggcatagcgcaagcctcctctctgcggcagagcgccgcgggttctttttcctattatggcacaaaacgcttcgatttgcaaggcacaaacaaaaatgcccgcaaacaaagcaaaacctgccgggataccaccccggaaggggcgctgtccggcaggctgagagaaaggagcttatcctttcctgctttccttgtgggaacggaattacttcgcctcggcggcaggaagaacctcgcggccattgtaggtaccgcagttcttgcaagctctgtgcggcagacgagcctcaccgcacttcgggcaagcgactacgccggggatggagagcttccagtgggagctgcgtctcttatcccgtcttgccttggaaaccttacacttaggaacagccatgaatgacacctccttggtcagatgctttcgcagaaaataatcatttatccttcaacagctgcccaaggacagccaaacggggatcgatctcagggcggcacgagcatgcgccctcattcagattcttgccgcagcgggggcagatgcccttgcagtccggcttgcaaagcagcttcgaatccatgttcagcacgaacgcggtcgtcaggatctcgtccagatcggccttgtccccctcctgcaggaggaaagtccactcgtctgcctcatcctcccgctcaagcgaacgggtgagcacagcatgcaccggccaggagacgcggcgttcaaacggcgcggcgcagcggtcgcagacagcgtgcagatttgtggagatcacagcctctaaaacgaggacaccggcggtgttgcgcaccgtcccctcggcggagacgggctcctgcacgggaaaactcccgccgaattgcagatcgtgcagatccagcgcggtatggaagggcagaacactgtccggcttttgcatgatttttgataatccaagcagcataatgatcccctgtttcatagtcgtgcaggagatattataacggtttttcgtgattttgtcaaatcctttttcgattttttcataaaaaaccttgacaatccgaacgatctgcggcatagtaaaggaaatccgcaaaaaggagaccacgctcccatgaaagaactgaccatcggccgcaatgacgccgggcagcggctcgaccgctttctggccaaggccgttccgctgctgcccgcctcgctggcgcagaagtatatccgcctcaagcgtatcaagtgcaacaacgcccgcgcgcagcgcgacacgcgcctgcaggagggcgatgtgctgcagctctatatcaacgacgagtttttcgacaagccctccgaggccaacgcctatctgacggtgacggcgccgaagctcaacatcgtctatgaggacgaaaacatcctgcttgtggacaaaaagcccggcgtggccgtgcatccgcacgacggcgcggagtatgggcgcacgctcatcgaccatattcaggcctatctctatgcaaaaggagagtggcggccgcgcgaggagcaggccttcaccccggcgctgtgcaaccgcatcgaccgcaacaccggcggcatcgtcatcgcggccaagacggccgaggctctgcgcatcctgaatcagaaaattcgcgaccgcgagttggacaagcgctatctcgccgtggtggagggaacgccccgcccggagaccggcgtgctgaagggctatctcttcaaggatgcggtcaaaaaccgcgttttcgtcacggatacgccgcagaagggcgcaaagacctgcgaaacgcgctatcgaacgctcacaaagcgcggcggcctgtcgctggtggagtgcgagctgatcacgggccgcacgcaccagatccgcgcgcagtttgcgcacgccgggcaccccctgctgggcgacggcaagtacggcaagctcgatccgcacgctgaccggcgctatcaggcgctgtattcctatcgcctgacgttctgcttcaccacggacgcaggcgtacttgcgtccctgaacggccgcagctttcaggcggcggacgtcgaattcgtgaagacgtatttcccggacttccgcctgccgggaattgcagaataagcaaaccgatcaaaatcgcccccatcggccaaagccgatgggggcgattttataggtatcaggtcagatgcaacaagggcttagtccttgtacatctcgaccagcttgagcaggtgctcatagcgggcctttgcggattcctcgttgcgctcaaacagctcgtttgcacgctccgggaactcgcgggtcaggcggctatagcgcgcctcgttcatcaggaactcctgatagccgcccttcggctgcttggagtcgagggtgaacttgccggtctccttggacgggtcgaagcggaacatgttccagtagccgcagtcgacagccttcttcatctcttcctggcagtgcatcatgccgcccttgatggagtgcatttcgcacggagcatagccgatgatgagggacgggccatgataggcctcggcctcggcaatggccttgagggtctgagcctggttggcgcccattgcgacctgcgcgacgtagatgtagccataggacatggcgatctcggcaaggctcttcttcttggtctccttaccggcagccgcgaactgagcgacctgaccgatgttggaagccttggaggcctgtccgccggtgttggaataaacctcggtatcgaagacgaagatgttgacatcctcgttctgggcaaggacatggtccacgccgccgaagccgatatcgtaggcccagccgtcgccgccgaagatccagacggacttcttgctgaggtaatccttctggctcaggatctcagaggccagcttgcaggcgtcacagtcgcagccgtcgcagatgctctcttcgagggcggcgatgtaagccttggcagcttccttgttggcagcgccgtcttccatggtgtcgagccacttctgagcggcttccttcagctctgcagccgtccagtcgatggcgagcagggcgtgggtcttctcggcgaggttctcgcggatgaccttctgcgcggtgtacatgccgtagccgtgctctgcgttgtcctcgaacagggagttggaccatgcggggccgtggccgttcttatcggtgcagtacggggacgttgcgccaggaccgccccagatggaggagcaaccggtggcgttggagatatacatgcggtcgccgaacagctgggtgatgaggcgtgcataggacgtctcggcgcagcctgcgcaggagccggagaactcgagcatgggctgcttgaactggctgcccttgacgctcaggtcctgaagctcttccttcggcgcgaccttggcgaccatgtagttgaagaccggctgctgatcgagctggctctcctgagcgaccatggtgatggccttcgtcgggcagacgccgacgcagacaccgcagcccatgcagtcgagcggggagacagccatggtgtactgatacttgcccttgcccttgccggccttgaccggacggatcttcgcagcggcgggagcggcagcggcctcttcctcggtcagtgcgaacggacggatcgtggcatgcgggcagacaaatgcgcagctgttgcactggatgcacttgtcggcgtcccactcggggacggtcacggcgacgccgcgcttctcgtaagcggaagcacccagctcgaactggccgtcgacatgatccatgaacgtagagacgggcagggaatcgccgtccatcttgtcgatgggcaggaggatgttcttgaccatcttcacgagctccggcttgccctcgagcacggtggtgtcgggctgatcctcagcctcggcccatgcggcggggacatcgaccttgacgtaggcggtagcgccggcgtcgatggcgttccagttcttttccacaacgtccatgcccttcttggcgtaggaatgctcggcggcgtccttcatgtacttgatggcgtcggcctcgggcatgaccttggcgagggagaagaaggcggactgcaggatggtgttcgtgcgcttgcccatgccgaccttgatggccagatcgatggcgttgatcgtgtagagctggatgttgttcttcgcgatgtagcgcttcgcctcggcgttcaggtggtgctccagctcggccagatcccactggcagttgatgaggaacacgccgcccggcttgacgtcgttgacgatcttgaagcccttggtgatgtaggacgggttatggcaggcgacgaagtcggccttgttgatgtagtacgggctcttgatgggcttgtcgccgaagcggaggtgcgagatggtcacgccgccggtcttcttggagtcgtactggaagtaggcctgcacatacttgtcggtatggtcgccgatgatcttgatggagttcttgtttgcgccgacggtgccgtcgccgccgaggccccagaacttgcactcgatggtgccttccgcagcggtgttcggtgcggcatgctcctcgagggacaggtgagtgacatcgtcgttgatgccgatggtgaagtggcgcttcggctcttccttcgccagctcttcatagacggcgaagacggatgcgggaggcgtatccttggaaccaaggccgtagcggccgccgatgaccgggatcatccggccggcgttggccagagcggtcacgacgtcgaggtagagcggctcgcccagggcgcccggctccttcgtgcggtcgagaacggcgatcttcttgcaggtggccggaatggcctcgagcagacggtcggcgcggaacggacggtacaggcggaccttcacgaggccgaccttctcaccgtgggcgttcatgtagtcgatgacttcctctgcgacgtcgcagatggagcccatggcgatgatgacgcgctctgcgtccggtgcgccatagtagttgaacagcttgtagtcggtgccgagcttggcattgaccttgcccatgtactcctcgacgatctcaggcagagcgtcgtagtagccgttgcaggcttcgcggtgctggaagaacgtgtcgccgttctcgtgagagccgcgcatggcggggcgctcggggttcaggcagtggttgcggaaggcagccactgcgtccatgtcacacatttccttcaggtcatcgtagtcccagatggcgatcttctggatctcatgggacgtgcggaagccgtcgaagaagttgatgaacgggacgcggcccttgatggcggacaggtgcgcgacaggggcgaggtccatgacttcctgcgggttggtctcgcagagcatggcgaagccggtctgacggcaggcgtaaacgtcggaatgatcgccgaagatgttcagcgcatgggtcgcgacggtacgcgcggagacatggaagacggcgggcagcagttcaccggcgatcttatacatgttcgggatcatcagcagaagaccctgcgaagcagtataggtcgtcgtcagagcgccggcggccagagagccgtgaacggtgccggaagcgcctgcctcggactgcatctcgacgaccttgacgcggttgccgaagatgttcttacggccctgcgcagaccactggtcgacatagtcggccatcgggctggagggggtgatggggtagatgccggctacttccgtaaaggcgtagctgacatgggcggcggcggtgttgccgtccatcgtcttgaatttacgtgccaaaataaatacctcctgaaagtatttctttcaaaacatctccattctaacactaaagtccggatttgtaaatcagaaaaacgaaaagaaccgcgaaaatcttggaactgtgccatgtagcgtgcggccattttcggcatattgccgcgaagaacgaaaagatggggaagcggctgcctggcgcttccgcaacaaaagtgc

SEQ ID NO: 11224 - DNA, 1428 bp, Unknown
  gut microbiota DNA sequence
aattctaattcctaacttctcatttctaattcccaactattataaaaaggagcgattatccatgtctgacatgtctgaattctgcaccgagctgatgcactggctggacggcgggcgctcgccgtggcataccgtcgccatggcggaggaggcgctgaccgccgcgggctttgccccgctggagctgggcgcgccgtttgccgtgaagcgcggcggccgctactttgtgagcagcggcacgttcctcgccgccgtcaccgtcggcgcgcgcgatgtgttccgcatcgccgcctcgcatacggactggccctgcatgcgcatcaagccgcagccggagctcgtttccggcggctgctgccgcctgagcgtggagccctacggcggcgcgatcctgaacacctggcttgaccgcccgctcggccttgccggtgtggccctcatccggacggacgaccccatgcgcccggcgcgccgccttgtcgcatgggacgagccgctggccatcatcccgaacgtggccattcatctgaaccgggaggtaaacaagggcgttcccacgaagccgaacgtcgacatgctgccgctgtgccgcacggtgcaggacgcatgggagaaaaagggctatctcgtgggcaagctggccgagcgcctcggtgcagcggcggaggacattctgtcctttgagctgtgcgcctactgccacgagcctgcgcagctcgtcggctttgagcaggacctgctctcctcggcccggctggacaacctgacgtccgtccacgcctgcctgcgcggcctgctggacgccgtcggcgacacgatcaacctcgccgtgctctatgacaacgaggagatcggcagcaacacccgccgcggcgcggacagcagcacgctgacggtcattctcgaaaagctggccggcgccctcggcctgagccgcgcgcagtatctcgacgcctgcgtgaacggcatgctgctctcgtgcgacgccgcgcacgccgtgcacccgaaccacccggagctggccgacgtgacgtgcggcgcgctgctcggccgcggcgtggccctgaagcgcagcccgcgctattcctcggacgccgacacctgcgccgtgatctccggcctgtgcgatgcggcgggcattccgctgcagacctacatgaaccgcgccgatctgcccggcggcagcacggtcggctcgatggcctcgtcgctgctggccatgcccgcagccgatatcggcgtgccgctcctcgcgatgcactccgcccgcgagctgatggccgccgccgatcaggatgcgttcgtccgcctgtgcacggcgttctattctgcaaagtaagatacaaaataagataacaagatatgtgacagcaccgcccgatgggatgaccccaccgggcggtttttcaggtttgtcattgcgcccct

SEQ ID NO: 11225 - DNA, 355 bp, Unknown
  gut microbiota DNA sequence
gttcccttacttgtcattgcgagccttgcgcagcaaggcgtggcaatctcgcagtacccggttggattatggggaagctatcggcgaaatcgcaactgccttcccgagattcccacgtcgcttcgctcctcggaatgacaagtcggaggtgcgtatcgtttgaacaatggcctgtacttatcggcagtgcctgcagggccctctcagtcaccttcggtgacagctctcccagagggagagccaagggcgcttcgcgcctcgcaatgacaaacttgggagccttgcgccgcagaatgtgtgccgcaaagattgccagactgcatggcgctcagggagcgccgctacatttttctct

SEQ ID NO: 11226 - DNA, 3265 bp, Unknown
  gut microbiota DNA sequence
attcccgccgatttccgggtgccggactttgcaccgggcgccgtgatgtaccagatcttccctgaccgctttgcccgcagcggaagctgcgacctgaccggcaagctccagccgttctgggtgcatgaaagccccgatgagctgccggagtaccgccccgatgcgcagggcgaggtgcgcaacaacgattttttcggcggaaatttcgcgggcatccgcgaaaagctgccgtatctgcaggagctgggcgtcggcgttctctacctgaacccgatcttcatggcgtggtcgaatcaccgctatgatacggcggattatcgccgcccggatcccatgctcggcacggaggaggacttccgcaccctgtgtgacgctgcccatgcgcgcggcatgcgcgtcattctcgacggcgtgttctcccacacgggcagcaacagcgtctattttgacgcgaagcatgtgtttggccacggcgcggcgtccgacccgaattcgccgtaccgccgctggtatcgcttccaccattatcccgacgattacgaggcctggtggggcatccgcacgctcccgtgcgtcgaggagctggacgagacgtatctccattatattatcgaggatgaggactccgtcatcgcccactggctgcgcctcggagcggatggcttccggcttgacgtcgtcgacgagctgccggatgaatttgttcgccgcctgcgccgccggatgcggcagatcgatccgcagagcctgctgctcggcgaggtctgggaggacgcgtcgaacaagcgtgcctatggcgtttcccgccgctattttgtcgacggcgagctggattccgtcatgaattacccgtggcgcaacgccattgtggccttcctgacggatgcggatgacggcacggcgctgggcgaaagcctgatgacgctggcggagaattacccgcccgaggtgctctcctgcgtgatgaaccacctcggcacgcatgacacgccgcgcatcctgaccgtgctgggcgagccgttccgcggcacgaaggacgagcgggcgcaccgccgcatgacgccggtgcagcgcaagaccgccctgatgcggctgcgcatggcggccttcctgcagtttaccctgcccggtatgccgtgcatctactacggcgacgaggccgggatggagggctttgaggatccgttctgccgcgtctgctatccgtgggggcacgaggacgaggagctgcgggcctattaccgcatgatgtccgccctgcgcggcagcagcgaggccctgcggcgcggcgacctgcgcgtgctggccgccggaaacggccgcatcgcttttacacgcgccttcggagatgagagcctgatcgtatgcgtgaaccattccatcggggagtgggtcctgcctgcaggccgcgtccgctttgccgaaagcgcggcgccgtcgcccacgggtgaggtcgtcctgatgcgcggcggcttctgcctgctggaaccgtcggatcccgaagcgcatatctctatagagtagaaatatctcccggcgacaccccaaacgatacgaaaggagcgatcccatgaagttttctgcaatgccctattcccgtcccgacctggaagccatgaaggcgaacctgacggcctgcaccgaggccttcctcgccgccgaaagcgcgcaggagcagatcgcgcagtacgaccgcgttacggacctgtccgtggagttcaacacgatgggaagccttgccaatgcccgccacaccatcgacacgcgtgatgcattctatgacgccgagtcaacgttcttcgacgagagctggccccagctgagcgtctatttccagcgcctgaacgaggccatgctggactcgaagttccgcccggagctggaggcccattacggcagcctgctgttcctgaagctcgagatcagccgccgcagcttcaagccggagcttgtggagcttatgcaggaggaaaaccgcctgacgtcccgctatcagaagctctatgccaacatgaccgtggaatttgacggcaagaccatgcccatgccgatgctcggcaagtacaaggtcagcgccgaccgcgccgtacgccgcgccgcttacgaggccgagggcaaggtctttgatgcgaaccgcgcggagctggacgagatctatgacaagctcgtccacaaccgcaatgcgcagggccgcatgcttggctatccgaacttcattcagctcggctatgaccgcctcggccgcaactgctatggacagaaggagctggcggccttccgcgaccagatcgcaaacgatcttgtccccgtcattgcggaggtcaaggaggcccagcgcaagcgcatcggcgtcgaccgcctgcacatttacgacgacaagttccgcttcccggacggcaacccggccccggagggcacggcggaggagatcctcgccgcaggccgcagaatgtatgaggagctcagcccggagacgaaggaattcatcgacttcctctacgacaacgagctgctcgacgtgctctcccgcgagggcaaggcccccggcggctactgtacgatgtttgaaaaatacaaggctccgtttatcttctcgaactttaacggtacagccggagacgtcgacgtgctgactcacgaggccggtcacgccttcgcattttaccgcgcaatgaacagcgatatctacccggacctgcgcgaaccgaccatcgaggcctgcgaatgccactccatgagcatggaatttctgacgcaggattatcataaatatttcttcggcgcgcaaacggcaaaatacgagcttgcccactgtgaagacagcctcgattttatcccctatggctgcatggtggatgaattccagcatttgatgtatgaaaatgaggatctgacgccggatgagcgccacggcgtgtgggagaagctcgagaagaagtaccgcccctggctgagcatggacggcctgcccttctacggccgctacgcccactggcagtggaaaccgcacatttatctcaatccgctgtactatattgattattgtatggcaggtacggtcgcgttccaggtctggacgctctctctgcaggaccgcagggcagcgtgggagaaatatctggcctttgtcgaccaggcgggaacaaagacgttcgctgatttgtgccaaagcgtcggcctgcgtataccgtacgaggacggctgcatccgcgaggtcggctccggtatccgcgactggatccgggaaaacagctctgccgaggcc

SEQ ID NO: 11227 - DNA, 31155 bp, Unknown
  gut microbiota DNA sequence
atcttgtgaacatttcatgaaatcaaaaaaattatccaccggtctgctataaaaattcacagaagattttcaaagggaaaaaaattcgttcttttttgttgattctgcaagggaattgtgctatagtattaccaaacttttcagaaagcatccaagggttgtccgctgcatgcggacacaagtgctctgctcgatattatctgtgaatatcacagcataatatacaaatttttgtaggaggtaacgcaatgaaaaagaatcttctcaagcttctgactctggttctcgctctggtcatggttgtcaccgtgttcgccggctgcaagaaggcagacgaggaaaccgatgcccccacgcagggcagcgaagagactcccactgagacgcaggagcagccggctgacgagtacaagccgtccgctgcacagctcctgaacggcaaggagtggggcaaggatttcaccgagctgtacgatgagatcggcgacaaggtcacgatcgacgacgtgcaggaggatccgaccaccggtctggcttacgtcgagtacgagggcaagacctatgagctcggcatggacttcctgtccatggcaatggtctacaagaccgctgttcccgagaactcccagtacgagaccgaagacgacgtctacgccgcctggtggaagtactacatgacccgttggaactatctcctcccggagatccccctctacagcaacgagtactacgatgtttacaacgcacagatcaagggcgttgacgagcatccgacgaacccgtactggggcccggcaaaggctctgatcgactggacgagtgagaagaccgacaaagacatcatcatcggcaacaccaccgacctgtccggcaagttccgtttttccaacttcggcggctccaaccccggcgcttccgaccttgacgttgacaacctcatcaacggcatggagactgtcgccaccaccaaggaaggcggcttcgaggtcaacaagacggtcgtcaagcagcttgataaggttgagaatgaggatggcaccctcacctacaccatcaccctgaacgacggcctgctcttcagcgacggcacccccgtcaccgcgaagaactatctgtactacaccatggtcttctctaccctcgttgcttctgaggctgagggcaaggatcgccaggccggcctgacggtcgtcggctttgaggaattcaacgcttacgacggcaccaacgagggcgacggcgtctccaagacctttgccggcctgcgcctgctggccgacaaccagttctccgtcaccgttaagcctgagtatgcgaactactactatgccatcagctatgccggcttcaccccgttcgtcaaggagctgtggtgcggcgacttcgacatcgctgacgacggcgaaggctgctacttcaccgacggcttctacaacaagaccggcgacagcttcgacatggctgctcatctcgttgcttcttccaacaacaccgacaccacctatgcgtgctccggcccgtatgtcgtggagtcctacgacgaggccgataagtccgcgatcctgaccctgaatccgaacttccccggcaactacgaaggcgcaaagccctccatcgcgaaggtcatctacaagaaggtcgtttccgctacccagctcgacgatctgaagtccggcggcgttgacgtcctcatgggcatcaccggcggcgctgagaccgacgaggctgtcgctgcctgcgacaactccaacggcgctttcgtttacacccactacagccgcgccggctacggcaagctgcagttccgtaacgactatggccccgctcagttcactgctgtccgtcaggccatcacctactgcctggatcgtgcttcctttgcgaagaccttcaccggcggctacggcggcatcgttgacggcgcttactacgccggctcctggatgtacaaggaagctgctgccaacggcatgctgctgaacgcgtatgacacctctgccgataccgccatcgcagtcctcgaggctgacggctggatctacaacaaggacggcgaggcttacaccgagggcgtccgctacaagaagatcccggctgagtatgccgacgagaacgacaagacctacaagtccatcgacggcgcttatgtgaccacgaaggtcggcgacgattactacatgccgctggtcctcaactggtacggcaccaccgataaccccttctccgatctgctggtcaccgacttcgagcagggcgctaacatcgccgctgccggtatcgtgatccagaagaccacgggcgacttcaatccgatgctcgacgagttctatcagcaggctgtgtacggcttctattccggcaccccgatgtacagctgcttcaactatgcaaccggcttcacctccgctgcatacgactactcttacaactggtccatcgatccctccttctatgagaacaactccgttgcttatctgatggacgaggccgatatctactggctgagctaatggcggcaggccctcaggcctgactgacgcatcaagtatccgagatcacgggatgggggttcgcccccgtcccgtgattgtggattcaaaaccctgtgtatcacggcgcactgtcaaataacttcttttcacagttatcacctctggcgcgcatgtttatccatagggtgtatctgaaagcccgccctgtggttcagcccggtagagtgccgcattcttcccggatccgctcttgtgcagaagcggcttttcagatacaccctatccccgcggcttgcggtcccgccgcagcctgatcctgacccgcgcagaaacagattgccccggcatggcaccgggggcgattcttccaccccgcgctgccaaatctactgtcgtgcgggcgacagactggagagtaccttatgttcaaatacgttctcaagcgaatcggctacatgttcctggtcctgtttatcctgtcgatcgtgattttcatgatctacaacctgaccccgagcaaccgcgcctataccgatgcgaaggctgaccaggtcgccatgaagcagcagctcgccggtatgtccgccgaagcacaggccaagtggttcgaggaacggtacgaaatgtatcagatcagctacggcaccgaaaccaacaacatgatcctccgctatctgcgctgggtcggcctgtatccctatgcggataacccctacactggcaaggaaggcaagctcaacggccttctgcagggcaacttcggctattcctatcagtataaaaaagatgtagttaacgttgtcgccgctccgatgaagaatacgatcttcatcaacatcttcgccacgattctggcgctggccatcaccattccgcttggtatcgcctgcgccgtgcgcaaaaacagcaaattcgaccgcttcacacaggtctttaccatcatcggctacagcttgccgagcttcattatctgtattctgtttatctgggtcttctgcgctctgctcggctggttcccggccagcggcatgaagacaccgggcagcagctacgagggcttcaagtggttcaccgaccgcatgtactatctggccctcccgctcatcaccatgacgttctgctctctgggcagcatgacgcgctacgtccgtgcctccatgatcgatgctctgtccatggactgcatccgtaccgcgcgcgccaagggcgtcaaggaaaagaccgttatctattctcacgcatggcgcaacgccctgatccccatcgttacgatgatcgtcggctggttcaccagcatctttgcgggctccctgatctttgaagacatgttcggtctcaacggcatgggcaagctcatgatctcgtccctgcgtacctcggactacgatgttacgatcctgatgcagttgttctatgtcgtcgtcgcgctgctcggcaaccttgtcatcgacattgtctatggcctggtcgacccgcgcgtcagagtcaacaagtaagggggtaagagcatgagcaagaagaattcctccgcgaagcgcagctggctcggccgcctcttctttggcggcagcaagggcctggccgatgatatcgaggccaagcgcgcagccaaaaacgacgtcgaagagattgtcagcccggtcaagcagatcgtccgcggctttatggagcgcaagctcgccgtcggcgccctctgcgtggtcatcgccatgttcctgctggtcttcatcggcccgctcttcatgacgacctacactgacacctataccgaagtcacgcaggccaacctgccgcccacgatgtccatgctctccgtcccgagcgagctgaagaacgacatcaagatgatcgacagctacggcagcttctccgtcggcctttccaacgcgggcaaggtctatgtctggggcgcaacgggcctcggcacgacgggcattgacatcgccgatatcccggaagaggttcagaatgagaagattgcctgggtcgctgccggtatcgatcacatcgttgctgtcggtgagaacggcaaggtctacgcctggggcgcaaacaagctcggccagtacggctactttgacccggcggtgaaccccaacatcgctcccgagccggacgagctcctcaacggcaccatcgatgcctccaacatcaagaagattacctgcggctatcaggccacggccatcctgatgaacgacggcaccctgtatatgtggggcaacaagaacacctatcagaacttcgacaccgtagccacgctggacggcaagctcacggatatcgacttcacgctgaactatgtcgtcgcggtgacggacggcaactccgtctacaccggcaagcgcggcctgtatgatcagatgcgcgacaacatgggctccgccacggttcccctgcgtgagttcctgaacggccgcaagatcacgagcatctatgccacgagcaagacggtctgcgccctgctcgatgacggcgccgtcggcttcgtcggtgacttcgatacgagcagcaaggcgatgcccaagctgcatgagggcgaggagatcgttaagattgtctccggcacctatcactacacagcgctgaccagcgaggggcgtgtgttctcctggggcagcaacaccctcggccagtgcaaggtccccgacgacgcacagggcgcgtccgacatcttcggcggcgcgttccagagctacgcagtcgattccaaccacgagctcatgggcaagtggggcctgaagggctatctcttcggcacggataactacggcgcgaacgttgccctgcgtatcattcagggcggtaagatgacgatgaccatcggtgcgatcgccgttatcatctccacgatcatcggcatcatcatcggctgtatctccggctacttcggcggcaaggtcgatatgttcctgatgcgcttcaccgagattttcggcgccattccgttcctgccgtttgcgatgatcctgtccgcactcatggcgcagatggacatcagcgagaatgaaaagatcttcatcctcatggtcatccttggcctgctgagctggaccggcctggcccgcctcgtccgcggtcagatccttctcgcccgcgagcaggagtatgtcacggctgccaaggccatgggcctgcgcgagtcccgcatcgcattccgtcatatcctgccgaacattgtctcggtcatcttcgtcacgctgacgctcgactttgcgacctgcatgctgacggagtccacgctgagctacctcggcttcggcgtcacctacccgcgtccgacatggggcaatatgctcaacggcgcaaacaactccaccgtcatcaagaacttctggtggcgctggctgttcccggcgatcttccttgcgatcacctgtatctgcatcaacatcgtcggcgatacgctccgtgacgttatggatccgaagtctgaccgcgataaataagggagggaagagatatggcattacttgaattaaaagatttgcatactttcttccgcacgaagaagggtattgtcaaggcggtcaacggcgtttcctattccgttgaggcaggacgcacgctcggcgtcgtcggcgagtccggttccggcaagagcgtctccgccatgagcatcctgcagctgctcgacggcaacggctatatcgacagcggcgagattctcttcgagggccgtgacctcacgaagctcaccgagaaggaaatgtattccgtccgcggcaatgatatctccgtcatcttccaggagccgatgaccagcctgaacccggtcttcaccgtgtcccgtcaggtcagcgagccgttcattatccatcagggcatgacgaagaagcaggctgccgcaaaggtcattgaaatgctggccgatgtcaagatcccgaatccgcacatcgtcgccaagcagtatccgcatcagctgtccggcggtatgcgtcagcgtgtcatgatcgccatggcgctggcctgcaagccgaagctgctcatcgcggacgagcccaccacggctctggacgttacgatccaggcgcagatcctgaagctcatgaacgatctgaaggaagagcacggcacctcgatcatcttcatcacccatgacctcggtgttatccgccagatcgcggacgacgtggccgttatgtactgcggtcaggtcgtggagatggtgcccgccggtacaatcttcatgggcgctgagttctctcatccctacaccgagggcctgatgaactccattccgcgcctgagcaccccgacgcatacgcgtctggacgccatccccggcgcagtgccgcaccccctcaagctcccgaagggctgcaagttcgccccgcgctgcaaatacgccacggagcgctgcctcaatgaggagcccgagatgattcacgtcagcgagacgcagcaggttcgctgcttctacccgcggaaggaggaccggcatggaaagaaataatgttcttctcaagatcacggacctgcggcagtatttcccggtcggcaaaaagaagggcttgtacgtcaaggcgaacgacggcatcagcctgaatatctacgaaggcgaaacggtcggcctcgtcggcgagtccggctgcggcaagtccacgttcggacgcacgctgctgcagctctaccgtcagaccgacggcaagacgatgtactatggcgcgtcccgtgatgagctggcccccgagtatatcgaaaagaccatccgccatctgccccacggcctgcatgagctggccgcgctcgaaaagaagcgcgacgagatgcagaaggtctatgatgctgccgatgagcagaagcgcctgcacatgcacaacgatctcacggctgcgaagaaggctgcgaacgacgcctatctgaacatcgtgaatgtcatcggcggctttatcaccgccaaggacctcggcccggtcatgaagatcttctccgagcgccatgaccgctgctgcgatctgcacaaggccatcgagaagcgcgcccccgtcaagctcaactatgacgaggaggccttcaagctctccaagctcaatgccggcgagagaggctatgacagccgcaagggcaagcttgacaagctggctgagaaggtcgccgagcatgacaagctcgtcgaggccgcccgtgccgagattgcaaaggtcgacgcccgcatcgacgccatgcgcgcgaagtacgccgccgatcccgagttccagaagcatgaggccctgctcgataacggcatcgaccttgcgcgcctgacctatccggaggtccgtaccctgcgctgccagatgcagtatatcttccaggatccgtattcctccctgaatccccgtatgaccgtcgccaacatcatcggcgagggcctgctggcgcacaagtactgcaagaaggccaacgagcgtatgcatgaggagatcctgcagaccatggaggactgcggcctggctccctacttcctgcatcgctatccgcatcagttctccggcggtcagcgccagagaatcggcattgcccgcagccttgcggtgcatccgaagttcgttgtctgtgacgaggccgtttccgctctggacgtgtccatccagtcgcagatcatcaacctgctgcaggatctgaaggagcagcagcacctgacctacctgttcatcacgcacgatctgtcggtcgttaagtatatctccgaccgcatcggcgttatgtatctgggcaatctcgtcgagcttgccgactcacaggaaatcttcgaccacccgatgcatccgtataccgaggctctgctcgaatccatcccgacgacggaggaaaagcgcgatctggcggtgctcgagggcgatatccccagtccggtcaacccgccgaagggctgcaagttccacacgcgctgcaagtactgcaccgagatctgcacccacgtcgtccctgactgggaggaggtcacgccgaaccactttgtagcctgccaccacaagctgcacaccaatgagtgagcgcaaaacgggcagtggggagcgtcaggatgccgagcagcctgaggccgccgagcagaacgagccgcagggaagaacactgaagtttccggagctgccggagcgccgcagcctgatgggcggcgtgatgttccgcaaaaagctcgcccgggcccgcgccttccagaaggagcgcagcggtgagtccgaggaagcgccggaggaaggcatcccgctggaaaagcacgatgtctccacgatgatcttcagcgccctgtttacgattgttccgatctgtctgggcatcctgctgctgatgggcttcctgctcctgttgatcttccgcgccctctgacaaaattcaacaaaccgctgcaaaatgtgctccattttgcagcggttttttgcgcatttgcggccgtttgcaggttgacacacggctggaattacgctttaataatgtatgaacgcacagaaatgaggaaacagactgcagcctggcagaaaaagatccggaaggacatttttcaacaagctgaaataccctagggaacctctgattcaattgcaagagcggtcagcgagggattttgttccaaattgaggtttggaaattgcaggaatactttgtgtacccgcaaggggcatgccgcatccgtaaggcggcaaagccgccaacggctgcgcaatatttcaagattttcaaaccgataagttggggcgaaagacccgctgagcgccgcatccgatttattcagaggttccctagaaagagagggaaaccatgaaacaacagacccgtttttatgtcagccggaaaaacccgctgacctggatcgccgcggccttgtcgctggcttccatcgttctgcagatcctcgcgctctgcctcggcgagggagccgtgatcagcaccgtgaacatctggttccagaaggtcctgccgatggcggtgagcctcggctttgcgctccagctcgtgctggaaggggagacgcggttctatcgcacgtcgaagcccattttctgggcctgcgtctacttcggacaggcggcgctcgacctgcacctgcacggcggctatgccctgttcggctatatgcgctatgtcgtgatgtgctggatcctgtacctgctgctctacctgatctatcgcctgaccatcaccggcaagatcccggtgtcctatccgctgctgttcacgctgctggtgccgctggcaattctcatctatgatctggcgatggccggctgcacgatccccgtgtggtaccgccttgtcaagatctccaacatcgccatggccggcagcgccgtcgtcgccgtgctcgcgatgcggccgttcacggacggggcttaccacccgacgtggggcgaccgcaaggatggccgccttatccgtacgctcagcccgatgaacatcgtcgcgggctacatcatgcccacacgcaacgatgcctgcaactccatccagacaacgttcgaaatttcgagggtcgagcgctacatccgccagaagcgcgcggagggcatggagtccttcggcctgacgcatgtgctgcttgcggcctatgtccgctgcatcgcaaagtaccccggcgtgaaccgcttcttctccggccagcgcgtctatcagcgcgatgacgacgtccagttcaccatgaccatcaagaaagacatgcgcacggacggcgaggagacgaccatcaagctccacctcaagccgacggacacgacgaaggaggtctatgagaagctgaacgccctcatcgacgaggtcaaaaacaccccccttaacagctcgttcgaccatgtcgcggctctgctggccagtatgccgcgtctcctgctgaagtttgtcgtctggttcctgaagacgctggactacttcggcatgctgccggcgtttctgacggacctcagccccttccatggcacggtcatcttcacgtccatgggctcgcttggcatcccgcccatcgtccaccacctctataacttcggcaaccttcctgtcttcgtcgcctttggccgcaagtaccgcaaggtcgagctcgatctgcagggcaagcccgtcacgcgccgctatgtcgacttcgtcatgaatacggacgagcgtatcgtcgacggcttctattacgcgacggtcatgaagtacttcgaaaagctcctgcgcgagccggagcagctcgatcttccgcccgaggaagtcctgcgcgatattccctgaacccaaatatccaaagctcctgcgtgtgcactgcatgcgcaggagctttttgcgtctccgtgtcacggacagctgtacgcatgtggctgaaatgagagacgaaatgtaagacgaatatacgcagaagtgtaagaatatttgtgagagaaaatagagcgatcagcacaccagaagggaacgaattgtgattagctggcaaataaggacatttaatatggatattccacgacagaaaaacagaaagtcaggcaaatttttccttgcatttccatacagcctgtggcataattagagtcgcagttcattacgcgttagcggagcaaagcgctaacgagcaaaaaggaaaggatgggatatgcaatgcgcaaaaaactgactgcgctgctgctggcctgcctgctgctggtttgcctggtcctgccggtgtccgctgcggacgccccggcgctctatggcacggccaatgccgcggacggcacggtcacagtcacactcagtcttcgcggcggcagcgccgtgcgcagcggagccttcacgctcagctacgacagctcgctgacgctcagcaagaccgaaaagggtctgccgcttgcagtggcaaacacaaaggagaagggaaaggtcgtctgcaattgggtcggcggcgcagccgaggccgatcaggccgtgctgacgctgacgttcacgaacgcagcgacgaagagctataccttcaaggtgtccggcgccaaggtgacggacaagaactatgagacgacgaagatcgctgacttcccgatcaggatctatgtggcctgcaacggtaagaactgcccgtccaagagctacaaggatgtcgatcagacgcagtggtatcacaatgctgtggactatgtcctcggcaatgacctgatgaagggcacgggcaagacgacgttctccccggatgccactctgacgcgcggcatggtcgtcacggtcctcggccgcgccgccggtgtgaagacggccgattatgccggaacgagcttctccgatgtcaaggccggcagctggtatgcgccctatgtgcagtgggccagcaagcagggcctcgtcaagggctatgaagacggcacgttcaagccggagcagaatgtgacccgcgaggagatggtcaccatgttgttccgctgctggcagagcgagggcaacacctggaagacggatgtcaccgcactcaatgcatacaaggattccgcaaaggtctcgagctgggcgcttcccgccatgcgctgggctgctgctaacggcgtcgtcaacggcgtcggcgacagcatgctggagccgcagggccaggcaacgcgcgcacagtttgcgaagatcatcatggtctaccttgagaatctcgcatgaaaggagcgcaggatagaagaatgaagcactggaatctgaaacgggtcctttcgctgctgctggtcgtgtgcatggtcaccggcctgctgtccggcgtctccgccatggcggaggatcagaccgcgaattatcatgagatctccaccgacggcctgacgcttgcaacggaagacaatgccgctgcggacgagaccgaaacggaagaggctccctatgccgacaccgatgtcgtgcgtgtgttcgtcgtgctggaggacaagcccgtcctgcagcagggctacgctacccgcggcatcgccggcaatgctgccgccatggcagcctccaaggcgctcgaagccaagcaggcggcgctggccgcagagatctctgcgaacgtgctgtccggcgagacgctgaacgttcactggaacctgacgctggccgccaacgccatgtccgtcgacctgccctatggcaagatggacgaggtcgaagcgctgaagggcgttaagagcgttatgctcgttccgcagtacagcatcgatccgcgcgagcaggccgatctcaacaccatttcctccggcaatatgatcggcagctacaacgcctggctcgagggctataccggtgcgggcagccgcatcgccattgtcgataccggcctggattcagaccatccgtcgttcaacagcgctgcgttcgattacagcctgctggttacctcgacgaagaacggcaagcagatcgcggattatgatctgctgaccgccgcgaagatcaacgaggtcctgccgcagctgcatgccgcagagcgctatgagggcctgaccggcaatgctctgtatgtcagcagcaagatcgccttcggcttcaactatattgacgccactctcgacatcacgcatgacaacgatcagcagggcgaccacggcacgcacgttgccggtatcgccacggccaaccgctatgtggaaaatgcggacggcacctacacctacgctgacaacggcgtcgtcggcgttgcgcccgatgcgcaggtcgtcgttatgaaggtgttcggcaagaacggcggcgcctatgccgatgactacatcgccgccatcgaggatgccatcgttctggactgcgacagcgtcaacctgtcccttggctccgcggcggtcggcttcacgacccccggcgaggcgtacttcgacaatgtcatggattctctggacgagacggataccgtcgtttgcatgtctgccggtaactccggaaactgggcagaggactccgtcaacggcctgctgtttgccgaggattccaacaccggccgcgtcggctcccccggcgcctatgagaattctctggccgtcgccagtgccgacaacatcgccaacaccgcggagtattttacggtcaacggcgcgaactacacctacgccgacggcgcaggcaagacgttcaccggcggcgcgacctgcaagagcgcagcctttacgacgctcgacaagtccgaggacaagagcggcacggaatatgacttcgtgttcatcggcgatccgaccgacccggacgacaccgtgaagtacggcggcgagaagtccgactttgcgaacacggccggtaagatcgtccttgtctcccgcggcaacggcgttgccttcaccgataagcagatcaatgcggatgccgcgaaggctgccgccattatcgtctataacaatgttgacggcttcgatgccatctatgcggcctgcacgaagaagctcccgttcatcacgatccgccttgaccagatgaaggcgatcctcgcctcggccacgcaggacgaaaacggcgtctggggcggcaagctgaccgtccacggcagcggtgtctacaccgacatgaacgccaccggcggcgttatcaccatgagctccttcagctcctggggcgtacccggcgatctgtctctgaagcccgagatcaccgcccccggcggcaacatctattccacgcgcacggacggcacctacggcctgatgagcggcacgtccatggcgtctccgtctgctgccggtcaggcagccgttgtcgcgcagtacatccgtgagaacggccttgcggaaaaggccggcctgacggcccgcgcgctggcgcagagcctgatgatgggcacagccgttcccatcatggatccggattccgacgtggagtactccccgagaagacagggctccggccttggcaacgtggagaacgccgtgaacagccccgcctatgtgaccattgacggcaatgacgacggcaaggtcaaggtggagttcggcgacgatcccgcccgcaccggtacctacagcttctcgttccatgtcaacaacctgacggacaagcccgtctcctacaggctcagcgccagtgtgcttgcgccggaaacagtcacggatgaagagtccggcacgaagttcatcgccatgaacgatgttgcagtcggcgcaaatgcggtcttcacgaccgatgcggcgggctacgacctcaacggagacggcaagctcgacgacggcgacgtcatggcgatcctgaaccatgccgccggactggagctgcttgcagacgcttctctggccgacctgaacggcgacggcactgccgacgaggtcgatgcgcagatccttaacgacattctcgagggcggctcctatgagggcaagacgcttgagagcctgcagagcaacgacgtcgtgaccgtcccggccaacggcagtgtgcaggtcaaggcaaccctgagcctgaacgaggaaggcaagcagtatatggaggagaacttctccaatggcaactacctcgagggttatgtctacctgaatgccgagaccgatgccgagggcaagcttggcgtcagccagtccatcccgttcctggccttctggggcaactggacggattcctccatgttcgataccagcgtctatgccgaggatctcttcaacgagatgccgcacaagtacctgaatatcgcgcgggagaactactacaatgtgaagaaggcgggcagcggcaataccttcaacctcggtgtgaacctctacgccaacgatgatgcgttccttgctgaccgcacggctgtccgcgcgggcgatacgctcatgaccataaactacaacctgatccgcaatgcgcaggacgtcagctacgtcatccgcaatgcagagaccggcgaggtttatttcagcaaggactacggcaagcagtccggcgccttctactatacgaacggcggctactggtccaacaccgttacgacgaagggcatcagctggcgcttcaccgacaacgagggcaatgcgctcccgaacaacacgaagctcgagctcgttctgactgccgtaccggagtactacaccgccgacgagaacggcaattataccggcctcggcaagggtgcagcgtgggagacgctcgttaccgtcgataacgaggcaccggccgtcacccagatgttcttctccagcgatcctgcgggccgcaagctcatcaacatcgcggcgcaggataaccagtacatctctgccatccagttcctcacgacggacggcaagcttatcggaacgctctctccgaaccagcagacggcaaacgaggcactgagcctttcggtcaacgctgcttccatgaagcaggacaaggtcgttgttgcggtcgtggactatgcgggcaacgcaagagcctatgagctcgagcttggcctcggcggcgacgacggcgacgaagagcccgcagtggagctcaatggcttcttcgccttcaactcgacgaacaacacctgggcgcgctttgagccggatacggccaagaccccggagactgcagcagaggccgatgtccagttcgcttctgcggagtatgtcaacggctacaccgtagcctgcacgacggatggctatctgtacgttatgcagcacggcaagttcgagccgacgcccgtgtgttacctgaacgccattctgatcgacatggcttataacaaggccgacggcaagctgtacgccatggcggtcctcaatgacgagaacggcgagccgcagtacggcaagctcgtcaccgtcgacatgttcactggcgagctgactgaggtcggctcgatcacgagcgacatgatgccctcgtcccgcgacggcgaagtgccgcaggtgctggccatcagcgacgacggtacgttctatgtcatcaacgcctccacgcgcaacacctacctctacagcttccgtctgactgaggacggcaagatcggcgagctgacgaaagtcggcaagaccggcttcaaggcaaactatctgcagtccatggcctttgaccactctaccggcgagctctactgggcacagttcgtgcgagcctccagctgggcacgtccgacctacaagctcgtgaagcttgacctcacgaccggtgccggcacggcactctccgatctgcccggcgaaatgaccggcctgtatatcgttcgcggtcagggcggctccaccggcaagaccgacaagcctgagaaggtccagctcaccacgacgagcgccacgctctacagcggcaacaagaccgccctcgaggccttcgtgaccccgtggaacctgaccgaccgctccatcgtctggtcctcctccgatgagaagatcgccaccgtcgatgcaaacggcgttgtcactgcagtcagcgagggcacggcagtcatcaccgccgcctctaagctcgacggcaccgtcaaagccgagtgcaccatcacggtcatgcagaacaacacgacgctgaccggcatcgttcacaatgcagacggccagagctttgttgccgacatcgatgtcgactctgcaaactacaagtacctcaccggtgcactggagcaggattactattccgtcgttcagacgggcgatatgctgctggcctccggcgacggcaacctttacagccttgatgccgaaaacggctacgcagccaaggagctgtgctacaccggcgacctgtttatgtccgatatggcctacagcccgaaccttgacctcacgctcggcacctatggttactacctgatgctcgtcgatccgaccaccgagaacggctaccgcggcctatggaatctgcagggtgcgttcactgccattgcgggcattgcctatgcgggccatgacagcacctacaactacttctatatgctgtctgcctccggcacgatccacctcatcggcatcgctccgaacggtgacggctacacgctgagcctcctgcacaccatcgtaacggacaagtcccttgctattacgggccagcatatgtatcagtccctgtactatgatatggagaccggctggatctactgggcacgcttcaacggcgaggactcctccagcatcatcgcgatcaacgaggagaccgaggaggtcgtcctccgcggcacgttcgacgaggctgcatggcccgttgtcggcctgttcgcttccaagagcggcgcgatggatctcgaccgcaccggcgatttcaacttcagcgagacctgcacgctggcccagaccgagctgagcagtcaggacgccgtggcgctccccgccgggagcctccccacgctggagcattaagctcagaataggaggaaaccatgaatcaactgatgaaacgggtgctgtccgtcctgctggtcgtgtgcctcctgtgttccgcgctcccctctgccttcgcggcagagagcggcgggttcacggacgtctcaaaggaccactgggcgtatgacgccatcacggaagccgttgccgccggttacttcaagggcgtgagcgacacggcgtttgatcccgagggcacgctgacccgtgccatgcttgtgaccgttctggcgcgcgccgccggtgcggaaacggacgacaatgcctctaccggcttctccgatgtggcagcgggcacctggtacacgggcgctgtcgcatgggccgccgagaacggcgttgtgaccggcgacggcgacggcacgtttgccccggaccgcgcggccacccggcaggagactgccaccatcttcctgcggctgctgaagctgctgaacaagaccctccccgagatcgaggaggttaagaccttcaccgatgcagccgacatcgccgcctgggcggaagaggctgtggagaccatgcagacggcaggtgtcctgaccggctatccggacggcagcttcctgccgcagaaccctctgacccgcgctgaggccgctacgctcctgtgccgcttcctgaaggctgcggaggataagcccgagcccacggagccgacggagaccgaaccgacggagccagagcccactgagcccgagcctaccgaacccgagcccaccgagccgaaggagccgatccacgtcaccttcgtctccgagcacagcgcggcctatgtcgaaggcaaggccgtcacggagctgacgctcccggagaatgtgaactttgtcgagtttatcgcccgcgctgacgagggctatgaggtctatgacgtctccgcaacgagcggccgtctggcgagccacggcagcaactacatcctggccggtctgaccgaggacgtcaccgtcacactgtctgacggcctgatccagcataccgtcacgttcaatgccgtcaacggcacgacaccggtgcaggtcaaggtccagcacggcggcacggtcgaaaagcccaccgatcccgtcaagactgacgataccttcctcggctggcacaccgccagcggcgcggaatgggatttcgcgactccggtcacgaacaacatgacgctctttgcctattggctcaacgacacctatgtcggcgcgacggtctatctggacggtgtcaagggcagcgactccaacgacggcctgtcggaggagaccccggtccgcacgtttgctgcggctgcggctctcatctctccgaaggtcaccgacggtgtcatctgggtcacgcataccgtgaccgtgctcgatgagcagacgtgggacctcaagggccgcgactgcatcgtcaagcgcgctccgtcctgcacgggcaacatgatcgccgtggacggcggcagcctgacgctgtcgaacatcacgatcgacggcaatgccgaggtcttctccggactgtccgcttccgctcccgcgagcaacaccatctatctgctgaactatgcgacgatgacgatgaacaacgccgttgtcacgaattgcttcggcgcacagggcggtgcattctatgtggaagactccaccctggtcctgaacagcggcaagatctcgaacaacacgtccaagttcaccggcggcgcgatctacctcaagtccaacacgaaggacgataagaccgtcttcacgatgaatggcggcgagctgtccgataacgtgggcggctccgttgcgggcgtcatcaacgttatgggcagccatcctgtggaagtgaacctgctcggcggcgcggttgtgaacaactccatgtcgacgacgggcgcgaacatcgcctgcatctctgccacgaatgacggctctaccgtcgtgctcggcgctgtgaagtttgccggcaacacgaacaagaacggcgagacgatcaacgcgctgaccctttcaacccacaacgttaccctcattccgacggaggataccgatttccaggacccgatttacatcaacaacgcctatgggtcctccaaggacgtcgcgattcgcgtgccggagggcctgaccaagctgaagggcaagctccccatcctgctggccaaggaattcgtcggcgcagccaccatctccggtggaacgggcgagggcgctcatgccctgcagccgagcgatatggagaaggtacatgttgtcaacggcatcgacggcgcttattacctcgaggtcaatgagaacaacacggcggtctttgccgaggtcaagacgaacgacatcgtcgtctacctcagcggcaacggcaatgacacgaacgacggcctgaccgttaagacgccggtcaagacgttcgagaaggccaaggagatcctgaaggcccgtgtcgatgccatggaaaccatccccgatgatgcgaactttgtcatttcgctggtctaccgcattcagatcaaggaagactgttcgctgaacttcaacgaattcggcgagaatgccaagcgctgcatggtccgccgtgatgctacgaacacctccggctatatgtttgacatcaaggaagcgaacgtcaccatcgagaacttccgcgtggacggcaacagcaagtatctgaagagcggcgtcaatgcctccttcagtatcggctccggcgcacaggtcactgtgaacgacggctttgagatcgccaacatgatcttcggcgcaggcggcggagtgttcaatctcggcgcaagcaagacggagaccctgctgaccatcaacggcggctggttccatgacctgaccggctacaacggcctgatcgtctatggaaactgcatgtccctgagcacctatgtgcctgcgcgctgcgttgtgaacgactgccttgttgaaaatgtcaccggttcctatggcctgctgcatgccatgaagttcgtgaccatcgagatcaacggcggcaggttccgcaatatcacgatgaagaacgacatcggctatctcgcggctgtcaacggcgacgccacggcgagcatcgttctgaatcccacgcctgcaggccagaccgcggagctgaacggcgatatctacctgctcaactccaagagcgatgaagacggcaatctcagcaagacctccgacggctatgtgaccatcggcggcgcgctcgaccacgacgttgtgatcaccggtaacctcatgatgtggggcacggtggtcgccgccggaacggacgactacaagctgacgcaggctgatctggcccgcatcagcacggacaccggcgatgcccttgtcctgaaggaaaagacgaacaccatcgagatcgctaggacccgctgatgtcccgcacataagaaaatggctgcccggcgcgaaagcgccgggcagtttttcgtgaccgggatagcgccttgtaggggcgaggcacttgcagcccgtacaaaccgccgtcaaaatggttaacgcctccgaattgtcattgcgaggccccgaaggggccgtggcaatctcgcagtacacggacggataacgggagaaccgtcggcgaaatcgcagctgcctgcccgagattgccgcgggatcaacgccggtgtattttgtcagtctccatggcgctcggggagcgccgctgcagacacaattgttgcacgctgttttaatgacggcctgtacgaactgtaagtgccttcccgagattgccacgtcgcttcgctcctcgcaatgacaaatcgggagcgtttgcttttttcatgttccctgtaccgatcggcaggtgcctcacgggacgtcgaggacgccgctcccctacaatgcctcagcacacataaagcggcgcatccggttcgggatgcgccgcatgggagacgatattcaggaaaggtccttgccgaggtcgcaggtatacagccagcggatggcatcaccgtcctgcacggtacagtccgatgcgccgtaattcgggaaaacgccgttcacggcaaacatccagccggaacgcgcgccgcaatccttctcatagaggttgccgaggccctcaatgtaggtggtctgatacaggggcgagacggaatactccatctggatattgtagtcgctcaccacgcgctgcaggacggaaaacacggtgtcgccctcctgcagctcgaccgtcacggtaccgaggatgatgccgttcgacgggacgatggaacgcttggcctctgagagcttgtcccagttgtccaggaccgtcgtgcaggagatggagaccgtgcacgagggagcggcaggctccgtcgcgggcggctccgtcggggcttccgtggcaggctgcgtcgcggcggtcggggcttctgtggcctttgtggcctccgtagacgcttcggtcggagcttctgtggcttccgtcggggcggctgtgggcccctctgtgggagcggctgtttcgggcggctccgtgacgtcctccagcgtttccgtggccagctgcagcccctccgtgccgccggtgggctgcgtgtccccgctgccgccctgcagtacaaagacgagcgtcagaacggctgtcagaacgacgcacaccagcgcgatgagctgccagcgcttccaggaatgaaacagcttcatggcaggaccctcactgcaggtagcgcgtcagcatggccgcggcctgcgctcgcgtcgccgtgccgccgggggccagtctgccgtccatgccgttcagaatgccgcgctccacagcccacgccagcgccgtgctcgcccagtcggagcacgtcccggcatccgggaaggccgcaaggctctgcgtgctcccggggctgccggaggcgcgccagagcataacggcgagctgctcgcgcgtgatgctgtccatcggcgcgaagcggttttcgcccacgccctgcacaatgccgctctgctgcgcccacgaaacggccgtggagtaccactgcccggccgggacgtcggaaaagctgccgccgtctgctgcggggctgccggaagcgcgccagaggatcgtggcgagcatggcacggttcagcgttccctcgggatcgaagcagtcgttgccgacgccattcatgaggccctgctccgtcaccgcgcagacatagggctgcgcccagtggcgggccgtgtcgcggtagcggacgcaggtgtgtgtgccgtaggtcgtgtccgtcatggtgtacagggcgggctggcccgcgaggaaccgctcataggccgcgagggcgtagcccgcctgctctgtggccatgtagtttgccgtgcggttcgtgtggccgaaggcaaggccggtttccgtctgcacgcggaagctcatcagtgcgctgacgagccacgcgccgttcgcacggacaaagcggctgtccttcgccgggtcgatgccgagggcacacagcgccactaggacctgcgagatcgattccgaggacgaggcgccccacgcgtcaaagctgccgtcgtccttctgcatgccgctgagcacgttcagggcgcggtcaatggccgcagagacatccgcctgcgtgcggtagggcgcgagggcctgcagcaccatggcggtctggtcggggtcggccgccttgccggaatagtcccagccgccgcccggcagctcctgcgccagcaggtaggccacgaggcgcgcgcgggagctcgtgccggaggcagcaaagccgtaggacacggagtccatggcgatgagggcaaaggccgcgccgttcacgccctgccagacggtctggtcgtagtttgcaagcggggccgtcaggtcatagcccgcaaagtcgcgggcgttctcgccgcaggccgtcagggcgaggatcgtgcgggaatactgcgtgtaataggatttatccagcacgccgccgcaggcacggagcttttccgccagagaagcaagatagtcctgccgcatggcgtccgtcagattgccgctgcgggccagctgcaggatggaccaatcgctgtaggtcccggcggcctgcatcgcagcggtgcagtaggcggagacgccgtccacggcctcggcgaccgtcatgggaagggccgtgggctccgccgccgcagcggggagcaccaggcaggccagcatggctagaagaaccagcccggagatcagttttttcatcatggctttttcctccaagatccagaatttacgcgccgagccagacccacaggatcttggcgatctgggcgcgggtcgcgccgtcgcgcggacggagccacagcgtgccgtccgaggcggggtcgcccgagatcaggccgcggctgacggcccactgcatggcctcaacggcatagccggagaccgcgtccgcatccgggaaggaggagagccggtcttccgtaacggcctcgccgttgtagcggtagagaatggctgcaatctgctcgcgggtgatggcgtcctccggggcgaacgtcgcggcggacgtgcccttgacgacgccgttggcggctgcccagatgacagccttcgcataccacgcctgcggcgcgacgtccgcaaacggattcgccaggccagtcacgtccggggaaccggcgtggcggtagagaatggtcacgagctgtgcgcgcgtcagcgtgccattcggctcgaacgtcgtggcactcatgccgttcatcatgcccgtttccagcatatagtcgaccggctcatgataccactgcgtgacatcgaggtcggagaaggcctcggacggacagaccttattctgcggctgcgttgtatagcgggtcgtctcgccgtcctgccacgaatagagtgcatagagcgtgaccatggcgcggatgggcgtgtaggtgtccgtgtagaccgtgctcacctgcacggcgtcggccacgggagcgtccgtccagcctgcgaagacatagtcgtgcgcattggccagcggcttgccctccggggcggtgagcgccatctcctcgccgacatagctgcgctgcatcggctgggaagccccctccggcgtggagaatacgacggttgcggggacgcgctggcggaactccaccacgagcgtgcagtccccgcgcacgtcgctgacggtgaagacattgccgtcctgcgcgacggcggctgcgccctcgggctgaagcgaccagccggagacggcggcattctccgcgggctttgcctcaaacatcaggtcgttcagcggaacgattgtgccgagggccgtgttggctgagacggccgtaacggtgaatttcgccttgccgaagagctgccagtcggaatggacctcctgcagggcatcgaccttgcccttaccggggtaggcgtccagcgcggaggagacgatggggaaggcgcagtagttccggcgtgcgctttcaatggtcaggtactccgagcagtaatcccactgtccaatctcagtcttcatctgcgcaacggcctgtgcgacggtgtcgcccgcgcgcagacgggcaaagaagacctcttcccacttgtagtcatagtcgaacgtgacggactgggaatagccgtagaacacgctcacgccctcggcgcgcagcggggcgcacagaccgtccgtcgccatgccgaggcagatggcgctccagatcaggctgtccggggccttgcgcgtcatgtggttggcgatgcaggtgccgtccacggcataatactttatcgtgccgtaggagcccatatactgcgcatgataggtatttccgtccttggcatagtcctccgtcgtcaggccggtgccggtctgcagcaggaggtaggacgttgtcgcgccggagacaaggtcctcctcgttccacgggttctcatagtctgtggagccgtggctgtcgaagatgacaagaccgctcgactcgacggcggcagcaacggcgtcgatcgtggcgcgcgtcgtcttcaggacctgcgagctgccgcccgtggcggcggccagcttctttacctcgttctgatactgctgcgtgaagctggggtccagaccgtaatacggctcgatgagcgtgatatccgcgctcgtcgtcgtggatgtctgcggctcgactgtctctgtctcaacgctgctcccggcggccttgcgggccagctcgcgcaggcgcgggctgtaggcgcacgtcacgcccgtcgtcgtttcaaagctgaactgcgcgccgcgccactgcagcgtgccgtccacatagaggtcggaagccgtcactgcctccgccacggcctgcgccgccgcgagcgcacggtccgggccgtcctgtgcggactgcgtctgcgcgtcctgctccacggcgtccagctcggcccacagggcgtcgatcggcgcgtagtccgcgtccgtcagcgtgcgggccttcggaccggctgcaaaggcgtttccgaacagggccggcagcagtgccagcaccagcagaagcgcgaaaagtcgtttccagttcatatgtatcgattccttcctgttggattgctcctattttaacatagagcccggcgattgtccacgaattttcctcacagcacctgcccgtttgccgcgcccgtaaaggctccgtgcaggatggcaggcgcaccgccgacgaacacggcgtccatgccctcgctctcctgcgcaggctgctcccaggtggcgcgctcgtgcacggcggcgaggtcgaaaacattgacatcagcgtccatcccggcggcgatgcgtcccttgccctgtaggcgtagagcctgcgccggaagggaggtcatgcgctgcacggcctccggcagcgtcaggacatggcgctcgcggacgaacgtctcgagaatgcgcgtgaatgtcccgtagacgcgcgggtggggcaggccctccgtggggtagagcgagtcggagatgacgctggcaaacggcgcgcgcaggatgcggccgatgtcctcgtcgcaggtgatgaagtcgatcatcgtcacgttgcaggcttcctctgccagcacatggcacaggcagtcgaccggctccagcccgagaagccgggccgcctcggcaagcgtcttgcccgtgaggggcagaaattccagccggtgcagcgtcgtcaggcggatattgtcccagccgaccatctgcgcgatgttgtcaaaatcgcggccgtgggcgatgcgctcgcgcaggatgtcccgctgagccgggtcgcgcagccgggcagcaacggcgtccgtcccgcctgccagaaagtcctgcggcagcaggtgcagcagctgcgtcgagcctgcgcagtagggatagacgtcgcacgagacctccagcccctcgtcccgcgcctgcaccagaagcgacagtgcctccgggatgcggcggttccagttgcgcgggcccatggccttgagatggctgatgtgcacgggcgtgttcagcaggcgcgccgcgcggagcatttcgcgcagggcttcacagaccatgtcgccctcctcgcgcatgtgcacgcagacgggaacgccgctgccctgcagcggggccagcgcccggagcagaccgtccggcgtgtagaagcactccggcgcatagccgaggccgagcgagacgccgagggccccgtccgccagcgcgcgctccagccttcggtgcagctccggcagggcctcgtccgcatcgcccggcgcatagccgcagcagtccgcgcgcaccgtcccgccgccgacgagcatgccgacgtgcagcggcagcggccgggcgcgcagtgcgtccagataggccgccatggactccgtggggatggccgggtcgatgtcgcccgtgatcgccccgagatagcgctgcagctccgcccggtgcgccgcgccgaacggcgcgagcgacaggccgcagtttccgttgacgatggaggtcagcccctgccgcagctctgcgcggccgaagccggggcgaaagacggcggcatcgccgtggcggtggatgtccagaaagcccggcgtgacataccgcccggcggcgtccagcgttttcgcggcctcgccgcaggagccgacggccgcgatttttccgctgcggatgccgatatccgcccgaaacggcgcgccgccgcttccgtcgatgaccgtgccgccgcgaatgacccaatccagcatgaaaaacgcctcctttttgctcccatcatagcacacttctgcggaaaatcaacgcgaacggttgatttttgtcgagacgttggatataataaagaaaatccatcttcggaggtaacacccatggctgttaaaattgaaaaagataccatcatcggcgatgtgctcgaccttgcgccggagaccgcgcccctgttccaggccatcggcatgcactgcctgggctgcccggccagccgcggcgagtccgtggaggaagcctgcatggtccacggcgtggatcccgatgccttcctcgcacaggtaaaccacttcatcgaggcagtggaagccaataagtgatccaaaccagacccgctgcagtttatacttgcagcgggccattttttaagggagactccctgacgaacggagaattgttatgacacagaaggaaagaatgcttgccgggcagctctacctcgtggacgaggagctggcggccgagatgcgccgcaccgccggggtgctccggcagttcaacagcgaaccagagccggaggcccgcgccgccctgctgcgcggcctgctgggtgggacggggcgcacgttcaggatcgagccgcccttccgctgcgactacggcagccatatctatctgggcgaaaacttctatgcgaattatgagctcatcgtgctcgatcagtgcgacgtccgcttcggcgacaacgtcatgctcgggccgcgcgtgagcctgttcagcgcgggccatccgctcgatgcggacatccgcaataccggactggagtacggcaggcctatcaccgtcggcagcaacgtctggatgggcggctgtgtgaccgtgaacggcggcgtgaccatcggtgacaatgtcatcatcggctccggctccgtcgtgacgcgcgacattccgtccaacgtcattgcggccgggaatccctgccgcgtgctgcgcccgctgacggacgccgaccgcgcccactggcagcaggaggccgcgcgctggcgcgcggaatgcggccggtgaggctgccggtctccgcgcggctggactgctgtgccgggcttgtgccgcagggcgcgcgcgccgcggatatcggcgcggaccacggctatctcggcatctcgctgcttctgagcgggcgggccgagtttgttcacgcctcggagctgcgagagcagccgctccgccgcgccatggaaaatgccctgcgcttcggcgtggcggaccgcatgcgcttttcccgcgccgacggcctcgatgccatcgacccggacgaggtcgataccatcgtctgcgccgggatgggcggcgatctcatcgcgcagatcctggaccgctgccgctgggtgcgcgacccgcgctataccttgatcttacagccgcagtcctccggcaacgacctgcgccgcaagctggcccggatgggctttgccattgagcaggagcgccttgtgcgcgacggcggctttctctatcaggccatggccgcgcgcttcggcagcgccgcgccggtcacgccggggcaggagtatgtctccgcggccctgctccgttccggcgatccgcttctgccggattattttgaccggctcatcccgtcgctggagcgcactgtcgagggcctgcggcgcggcagcgagccggaacgcctgcaatactacgaaactgcgctgcgggagctgcgcgaaatgagggagctttatgacaacggttgctgatattctggatgtgctcgaggcccttgcgcccaccggcatgaaaatggactgggacaacgtcggcctgctctgcggcagccgcaaaaaggaggtcgagcaggtccttgtcgccctcgacccgttcgaggacgtctgcgatgaggcggtcgaatggggcgcggacgtcatcgtcacacatcacccgctcattttccgccccgtggcgaacgtcacggacgagacgagcgtcggccggatcatcgagcggctgtgctcggcgggcatctgcgccgtcaacgcgcacacgaacctcgactgcgctcccggcggcgtgaacgacgagctggccgccgtgctgggcctgcgggatgtcacggtgctcaacccgagcggaacggacgcccagggccgcccgtggggcctgctgcgcggcggcgagaccgacgagcagccgctggcggaattcctgcagacggtcaagcgggccctcggctgccccggcctgcgctatgtggacggcggcaagcccgtccgccgcgttgccgtgggcggcgggagctgcgccgacgagatgctggaggcggtggcggcgggatgtgacacgttcgtcacggcggacgtgcgctataaccagttctgggacgcgcacgacctcgggctgaatctcatcgacgccgggcatttctacaccgagaaccccgtgacgcgcgtgctggcagatgcgctggcgaaggccttcccggatatttccgtaaaaatctccgaaacccacaccgactgcatgaaatatgcttgatttttggcctgtggaatgctaaaataatctagttatttacagataccactctacgaagggaagaaatattatgtctggacattccaagtggcataacattcagaagacgaagggcgcgcaggacgccaagcgcgcggcagccttcacgaagatcgcgaaggaaatgtatgttgcggtgaaggaaggcggcggctcgaccgaccccagctataactcccgtctggccacggtcatcacgaaggccaaggctgcgaatatgccgaacgacaacatcaagcgcgtgctcgagaaggctgcgaatgccggctccggcgattcctacgaatccatcacctacgaaggctacggcccgagcggcatcgccgtgatcgttgagaccatgaccgacagccgcaaccgcacggcaggcaacgtccgccaccatttcgacaagtacggcggcaagatgggcgctgcgggctgcgtgtcctggaacttcagcaagaagggcgtgctcgtcatcgacaacgaggacggcgactatgaagaggacaacgttatgatggacgccatggactgcggcgcggacgacttcgaggccgacggcgactgcttcacgatctacaccgatccggacgacttcaacgccgttgcggacgcgctgaccaagaagggctataccttcgtttccgcgcagattgagatggtcccgggcgagtataagaagctcgacaaccccgatgacatcacgaatatggaaaaaatgctcgacatcttcgaggacgacgacgacgtccagaacgtctggcataactgggaccgcgactgatcccggaatcagcaaaagccgcgcggcaggaccgacctgccgcgcggcttcttttatggtaggggcggggcatgccccgcccggcggcgtacttgcatcccgtactggccgccattaaaacggtaacggcccccgaattgtcattccgaggagcgaagcgac

SEQ ID NO: 11228 - DNA, 4649 bp, Unknown
  gut microbiota DNA sequence
gtacgaatcggcactgccttcccgagattcccacgtcgcttcgcttcttgcaatgacaattcgggggccggtgcttagccgccacaggctgacttctggttcctgctatttgatcggcggcttgcttttcggcataaaacgaccacctccccggcagaataaccggagaggtggtgcagatgaaaaaagtgctgatcgcgatcctgctgctgggcctgctgccgcatgcgtcggcagactacattcactgggtggacttccggctcagtgcgccggtgctccgcagcgcgctggagctggacatggcctcgcagggcggggagcagccccttgactggatcgatattctggcgctggccgcggcatggcgcggcggcacgggcgtgaccgtggcggacacgcagcgggcggcgcaggcactgcgcggcgatacgccgccggagcggctgcccggcatggcgggacgctacttttcgtattaccgcgaagcctacggcgcggcactcggcggtctggccgggcattttgccatccggcggacagacccgcagaccggcgaagcggagtggatcccggcctacggcctcaaggcgttctcgcccattgcggcgggctatccctggtcgcattacccggacttcggagcgcagcgcagctatggctatgcgcggccgcacctcggcaacgacatccttggcgcgctcggcacgcccatctgcgccgtggagggcggcacggtcgaggcgctcggctggaaccgctacggcggctggcgcatcggcattcgctccgacgaccggaagcgctattattactatgcccatcttcgcaaagacacgccctatgccgagggacttgccgtcgggcagcgcgtgcaggcgggggatgtcatcggctttatgggccgcacgggctattctgcgcaggagaacgtcaacaatatcgagacggtgcacctgcatttcggcctgcagctgatcttcgacgagtcgcagaaggagtgcgacagcgagatctggatcgacgtctatcccattatcgagctgcttgcctcgcattgcagcagcgtggcccgcgacccgcagaccgggaggtgggagcggctgtatccctactgcgatctggatgcggagccgatcagatcagctgctgctcgttgatgatgagcttgaactgcaggccgagcttttcggccgccttgcggcagaggatcatgcgctgcatgaaaatttcaaaatagtccatgacggagccgaaatgcgtgtcgaccgtcagcttcagcttgacgagcgtgcggtcctcgttgatcttcagcgtggactttttcacggagtaattcacgcggtcgtggatgtcgaacgtcgtcgtgtcctgattgcgcacgcggctgcggcgcacgtcggccttgtccgcaaggatgagagccgctgcaacggcgttgaccggcacgccggtgccctcgtcgtggttgccgatggccgtgacgatcgtcgcgacgtcctcggccccgaagccgagcgacgtcaggatctggaacgccatgacggcgccgctctgcgagtgctcgatgcggttgaccagattgccgatgtcgtgcagatagcccgcgatcttcgccagctcgacggtgtgggcgtcgtagccgagcgtttcgagcagatagcccgccatggccgccacatgcgtcacatgggcaaagctgtgctccgtgtagcccagcgccacgagcgattcgtccgccttggagatataggcgcggatcgtttcatttttttcgatctcttcaaaagtcataaatcataccttcttcctgttatctctgtcagtatagcagcttttccggccggaatcaacgaagtttgtgttaaaaattcacagatattgatgcgcaaaaccgggaacttgcttgacaggcccatcgtctcatgataggatggaaatagtaaggaagctctgaataaatcatctgcggcggatgccggatctttttcgtcaatccatcggttcggaaagtttgtggtattgcgcagccattggcggctttgccgccttacggatgcggcatgccccttgcgggtacacaaagtacaactgcactttccgtacctcgacttgcccaaaaatctctcgccatccgcttttgctgatttatccagagcttccttgacaaaccatgataccattattctgacaggaaaacagagaaagggaaaattatgaagtattgtcataactgcggcgcgccgcttgtcgatgacgtgcgcttctgcaccgcctgcggcagcccgctcgacccgccggaaacggaaccggcgatgcccgagtcggccgtaatgcccgaaatgccggagcctgcgccggaaatgccggtcatgcccggagaggccctgccgccggagccgccgaaaaagcgcaaaaagcggatctggctctggatcctgctcccggtcgttgtgctggcgctggccgccggagcgctgtattacttcctcgtgtggaatgcgcccgaggcccgcgtgcagcgcgcgtggcagaaaacggctgcggcgctcgagacggaggtcggccgcccggagaagctgatggcctttgccgagacgctgcggggcccgctgagtgagcagcgcgcgctgacggccacgctcacgtttgaatccaacggcgaaacgctcgcggccgagctccattcgcagcgcgacaatgcgacgcgccgcctcggcggcacggctgagctgaccgtgccgtggggggaagggacgctgcctatttcgttctacggtgatgcggaggagctgcagctcacgctgcccggcatcacggacgaggtctacagcatcccggcgcacggcgttgccgaggcctatgccgattccgccctcggcgaaatgctgggtgagctcggctcgctggaggaccttgatctgttcccggaggagaccgccagagacccggctctgtctgctgatctgcaggataagctccgaaccttcggtgacagcctgaaggtcacgaaggccgggacgtccgtcctgacgctcgacgggcgcagcgtgccggtcacgaattacgacatcgacttcagcaaaaagcagctcacgcgcctgtgtagagccttctgcgatgcctatgagatcgatttcaccgtcaatatgggcgtgaagatgagcacagataccgtgatcggcgagctgatcgacagcgtgcgcacgccgctgcacgtctcggtggacggcgacggcatggtccgcgcctgggagataacggtgcaggagtccggaacggacattacggtcagcatccggctcgccgggacggataatccgtggaaccgggtcgaggcctggtcggccgaggacgatgcggagccggagatcctgtttgtctgcggccttaccggtcagaatggccttctgacgctcgccgtcggcgatgagaccggcagctatggtctgcagcttgtgctggacgatgcggcgcagagcctgacggcccgcctgtcgacgggctttggtgcagagaagctcgacctgctcacgatgaactacggcacggaggacggcggcgcgcagcttggcgtgacgctggacctgccggaccagcttgacgcaaaggcgacgcttgaccttcactggacagcgctcgagacgcagcccgaggccctttcggacagccccgtcggcctgttcgacctctccgaggatgagctgacggcgctggagaagagcatcggcgcacagatcgcgcggcttctctacggggaagacatgacgacgggagagacggatgcggtacttaccgggacctggaaaatgcaggtcgacctgacgccgaacctgctcgatgcgctcaacgatgcgctcggcctggatctgcagatggatgatcccacggtgatgacgatgctcgtcacgttcgaggaggacggcagttatcacatggactatgacgcaaaggcgctccgggaagagctcaatgcgctggaggacgcgctgtgtgagaagtatcccgttcaggaggcgatgctgaaacaggcttttgccggtttgcagctcgatgtggacggctcatccgggacctatacggcctcgaacggcatcctctacctgacgcagagcggggaggactgggaggatatcctctactattccgtggaggacaacaagctctatctgacgccgccgcaggacgaggaaagcggcgactggggcggaatgttcggctcggaatacccgatggtgttcgagcgcgtggactgagaaacaccaatcgcacagtccggtgtaggggagcggacagccggacccggcactgctccgacgcaagaagcgggctatcgtcaaaacggtaaacactctcgatttgtcattgcgaggccccagcggggccgcggcgccctgagcgcgaagcgcgaggaagtgcccttggggtgcaatctcgggaaggcactgccgatgcgaaccagctgccgataaaatggtatgcaccgattgcgtctgtagcggcgctcagcgagcgccatgcagaccggcagtacttgcagcatcgattctatggcataaggctgccggatttgtcattgcaagaaggcgcggcgataagaacggaggtatccttcatgaaaaaagcgatcccgattttactggtcgtat

SEQ ID NO: 11229 - DNA, 16668 bp, Unknown
  gut microbiota DNA sequence
ttatggcacaaggccgccggatttgtcattgcaagaaggcgcggcgataagaacggaggtatccttcatgaaaaaagcgatcccgattttactggtcgtatttctctgcctgcttgtcgctttttccgctgtctgcgaataccggcagcagcacccggtgccggaggagatgctggtttcgtttgagagtcacggaaagtgttggttcaagaatgcagagggagagacgctggagtgcgaagatacgaattacagcggagatatgcaggtcatagatgcgtcgatcggtggtttcagcgcttcatatttttctctgacagttccgtacagcaaaaggctcgaggcttcccttgagaatgcaggtccggattctttcatcagcgtcggcagcgatctgggcgggtgggccgtactcgggagtggggtccaaaggaccatatttaccgactctggcgttgagaccacgggcgagaatatggaatacagcatacggtttttttccatcgaagagttctatctggaggtgaccggcagtggggaaagccatatccgctatgtgcggaaaggcggaaagctgtatctcactgcgcaggacgccgcgtttaccgtggagtttaaaagcttcctcgaagaagggtcgatggactctatggatttctctgccggagagacctgcaccatccgcatccgcgacggcggtatggagttcgtgcgctagatcggaaacggcccacagattgtcattgcgaggccccagcggggccgtggcaatctcgggaaggcagttacgtttttgacgtcaacccgcgcggctcggcagtgccgcgccgggtctgacagccgcactcctgcaagcgaattgcagaacatgaaaaaaacagggcgtgcagctttcgagctgcacgcccttcgcggtttcttcagttctccgagacattcagcacatcggccagcgaggtatcctcaaaataggtgtttgcgttatagaggaacagcacgtccgtgacctgctcgcgggagatgacggactcgacgttgtcataatagtaccgcggatcgatgaggatgatgtggtcgtaatagggatagaggaactgcatgaggcagttggcataggagtccttgaacagcagcagcgtcttgccggtttcggccgtcgtgtagacgtccacgcgggggtagttgccgccgaagaacacggtgtatttgtccttctggtccagcgcgctgcggtcgtagatcgtggcggacgtctctgcggcatcgccgtaggaaacgtagtattccacgtccgtctgcgggacatacagctccacggtgtcataggcggcgtggctgccgctgcgggaggccagcgtgccctcgaacgtggtggagacggtataggtgtcgtaattctgaacgggctgcgggatgccgagctgcgctgccatggcctcaaaggcatagcgcgcgccgaggctcgtccagtggtgatccgtgcggtaatagagctgctcgtccgtgtgagcggaaagtgcagccgagatgtcaaggaacgaaatgccctgcaggctgcccgccagcgcagtcaggtcggcgctctggtcgcggaccggcgcattttttgggagcttgtccgccagaatgcacgcggcgttcggaatgacggccatgttcagccgcaggtccgtgtggcgcgcggcaaaggcattgatggcctccacattgcggctgtcctgcggcggatcggcgggcggctccatgagatagtcgccgctgcagaggtagacgccgttggattccttttgccccgtgagcttcaggaagcggagccgcagcgcgatccagaaatcgcggccggcgaactgatcggccgtgtaggactccagatcggaaaaccagctgccgtccttcacggcggaccagctcagctttgggaactgggccagcttgcggttctcgctgtcggaataggtgcggtccggggtgagcaggctgccgagcgtcaggcagagaatggtcccgagcaggatgacgctcataagaaggccctgctgcagccgggcgcgctggtaggcaagccgccgggagcggcgcggatttctgtgttcttccaaaaccatcgcctccgatcagaactggaaatacaggaaggtggaataggtgtcgttcatcatcagggcgatgcacaacagcagcagcgccaggaacagcaccacggagaaggcctgccaggccttgctgcggcgcagcagattggtgcccacatgcgagacgacggggaacgagccaatcgtgcccgcgagcagcaggggccagcagcctgccagataatacttcgccgtggcgtcgacgagcgcactgccgctgccgaacatccgcccgatccagccgaaggccgcggcgggcgaggacgagaagaagaacacccagccgatgagcacgagcagcagcgtcagcacatggcgcagcaggccgggcaggtgctccagcacacggcgcagcacgaacttttcgaggaggagcagtatgccgtaataaacgccccagagcagaaacgtccagtttgcgccgtgccagatgccggtcagaagccagacgagcagcaggttcgcgatggtgcgtaccgtcccggcgcggctgccgccgcagggaatatagacatagtcgcggaaccacgcgccgagcgagatatgccagcgccgccagaattccgtgatgctctgcgagacatagggatagtcaaaattcttgccgaagcggaagccgaacatcgaggcaaggccgatggccatgtccgaatagccgctgaagtcaaagtagagcatcagcgcgtagcacaccgcgccgagccacgcgctcagcgtggaaagctgcgtcatcggcagggcagagagggcatagaacgtcgtgccgagtgtgttggccagcaggaccttcttcgcaaggccgatgaggaacagacgcgcgcccgagccgaagccctcgcgcgtgacggggtggtcgcgcagctgcggctccatctcggcatactgcacgatggggccggagacgagtttcgggaagaacgtgacatacaggctgaagtccagcacattgcgcgccgcgggcgcgcggtcgcggtagacgtcgaacagataggacagcagcgagaatgtgaagaacgacacgccgatgggcatcggcagctcccgggcgcgcagcgccgtgccgagcagggcgttgagattgtccacaaggaagccgtagtatttgaagaagcccagcagcagaaggttcacggccacggacgagacgagcacgaaccgcccgctccggccgcgcgctttctgaagcgccagctcacggcccgcaaaatagtggaacgcgatgtccagcaccatgaggacgaggtattccggcgtcccccaggcgaagaacacgaggctgcacacaacgagggcggcgtttttcagccgcttcggcagcacaaaatacagaatgaggctgacgggcaggaatacgaacgggaagacgagtgtactgaatgccatagcttcccctccttacagcgcgccgcggaacgcctgctgcacggcagcggcgtccttatggacgacgaacagaacgtagttgccccggatatccagaatggagtgattcgtcagcaggtcatactgctccaggccgtagccgtcgaagctggtcttctgcgtttcgagccgggcctccacggcggcgcggacagcctcctgctgcgacgtatcgcgcagcttgagcagaagcagctcctcggcctccatgtttgtctgcgggtaatagagcaggcagccgtcaaaatcggacggattcaggccgtacaggcgcttgaccatctgcacgctgccctcctgcagagcgctcaggtcgacgctcgccgtgacggcggaggtcacattctcaaaggcggccgagctgaccggctcctgccggaagctcaccacgaggaacacgacggcaagccctgcgcacagccagcgcagcagctcaagcaggatcgttttctgtttcatttgtcgcatcctccgcttctgcggggctgtccagcccggcaaggatcagattggcagcccaataggggtagaattccgggcggacgtggatgccgtccggctgccagaggtcggcataggtctggcagatctcggtattatccgcaaagggaatgccgttttcggcgcaggccgcgccgacggcctcactccactcggggatattgcgccatttcgagctcttctcaaaagcagggtcctgcgcgggcaggatggagctgacgacgaccgtcacgccgggcagggcctccttcaggtcggcgacgacctgcagcagctccgcgacatactcctcctttgtgtcccaatagccaatgctgatgtcgttcagaccgtagcacaggtagacatagtccggctgcagagcgcggatatcgtccatgtgcgcggcgacgtcgcggatggtgtttccgccgtccgccagcacgcggctcttttccagaaaatcgaagtaatagaagccgacggcgcgggaatcgccgaggatgacgtagctgtcgaacatggaccagatgtccagctcaccgctcgtgatctttgcaacgagggcatcgcgctcctccttcttctgctgggccagcagctccgcgcggcgctgcttctcccgctcgcgcagcgtttcggcgatggcggaggcgtcctttgcggccgcgctgtccagataggccgtaccagcggcgacggccgcgccctccttcggggcggcgggcatgctgccgagcacccataccgtgagaagtacggcgcacagcagcgtcaggatccacggcatcagaccgcggctttgtctttgtttcatgctctctgctcctgttcagcggctgtgtccggagagcacagccagagtaattatattctatcgtatagacggatattttgcaaccgaaatcccgtatataagacggcagtgcgtgccggatgtttcacagccagagctggaccgctgcgccaagcaggagctgcacggccagcattacgggcatgccgacggaaaaatggcggtggagcgttttgtggcggaacagctgcatggcgagaacgccgccgagcgcgcccccggccgccgcccagccgagcagtacgcgctcggggatacgcctgcggcggcagcgggcgagatgcttatcccatcccataagaaaaaacgtgacggcactcatgagaagcagccagcacacatagtatttcagcatcaggatcatcctttcggaggtggaacatgaaacggattccatgcattgcaattgcctgcctgattttaacattgagcggctgcgctgtcaagagcgcggcggatgcggagacggtctgtgaccccggttccggcccggagccgccgcagttctgcctgacggccgagctcccgtcagagctgcagcgctcggtggaggactccgcagagggacgcagcgtctatacgcgcgcggacggggcctatgaggtcgtcatcgagacggcagccggggcgcccgatgcggtgctgcggcagctgacgggccgagagacggctgcgctggacccggtctatctggcctggccgcaggcagatcagtaccagttcgcgtggacgggcgcggacgacgagggagagcttgcctgctgcggcacgctgctctatgacggcacgacgtgctacactctgaccatccgctgcgcggcagagctggagaagacctatcatgccgagtttgcccgcattctggcacacacaaggctgacggacgccgcatgaccggcctgcgattcttttttgcttgcgttttcccggcctttgcggtatgatagggcatacggtccgcagaatgcgcgccgatttttgttgttggaggcgctgcctgtgagatctgtttcctgttttctggccattgtcctggccaccttcctgctgtgcgcctgcggcgcgaaggacgagccgagagcctcggtcgagtccgtcgtgcaggagaactggccgcagttttccgatgccgaatatgacgagacggccggaacgctccgcctgacgcaggagagcaccatgacctatgcctccgcgcagaagttcggcggtgaggtctacaaggacgacttgtcgctcgagagctacctcgatatcgtcggcgtcatttcctatgatgtccgcagtgcctgcggtctgcaggagctgacggtcacgctcgagggcgtcagcagcgacggacagacgatttacaccgtcagcagcgatggaacgatcacgtcctgttggcaataaagaaagaagaatccgtatgaaagaaaagctccgaatgctgtttgacgaaaaactgtggaagttcctgctcgtgggcgtgctcaacacgctcgttggcaacggcctgatgttcctgctatataacctcgccgggttttcctactggccggcgacgggcctgagctatgcgcttgcaagcgtgatgagctatttcctcaaccggtatttcacgttcaaatatcagggcagcggctgggagacggccctgcgcttcgcgctgaatattgccgtgtgctacggccttgcctatggccttgccaagccgctcgtgcggctgatcttctccggcctgccgaagaaatgggcggagaatctggccatgctggcgggcatgggcctgtttgtggtgttcaactacttcggccagcgcttttttgccttccgcgagaagaaggcggagtaaggaacgctggtggagggagccagcagattcccgggcattcccgccggccgcacgcgttatgtaggggaggggcatgcccctcccggcgctgtactgtcgacttgtgtaggctctcgttaaaatagggatgactcccgaattgtcattgcgaggaggcgcagccgacgtggcaatctcgcagtgcttggttggataacagggtactcccggcgaaaacgcaactgcctacccgagatcgccgcgtcaggtggtgcggcagtggatcagtgctctcctgcggttgactttatcccggcggtttgctataatctccctattctgttctggaggtggtagcttgctgcgcaggcttctgcataagatcgtcccgccggaaaacagccttccgcttgccatcacgggcctgatgaacctcatcgccttcagcggcccgaagctgctgcaggtcctgggttggagccttcccatgcacgatatgacggcggccttcgaccgtgcgttcccgttttccccggtctgggtcttcgtctatgttgcggcgttcccgttctggatctatcagtattccgtcgtggccaaggagagccgctccttgtgctatcgccttgtggcggccgattttgcggccaaggtgatctgccttctgtttttcgtcctgctgccgacgcacaatgtccgcccaccgctggaaacgggcggctttacgggctgggccatgcggacgatctggctgctggacaccccgacgaatctgtttccctccatccactgctttgtctcgtggctcggtacgcgctatatctatgagtgccgcagccttcgtcatcgcggcctgacgtgcacgctgtgcaccgtcggctccgtgctcgtgttccttgcgacgatgttcacaaagcagcatgtgttctacgatgtcattggcggcgtggctgtggctgagatcggttggcttgtcgcgcgctataccggattaccgcgtctgttcgagcgcctgaacgggcgcttcctccgcacaaaacttgcccaaatgatctgaggcagcgctgcacgattgcatctcgctgaattgtgaggtgttgccttgccgtctccgcgtcaataagagcgcaaaaagcgaaagaagcccgctgcggtcccgcagcgggcgaatattttaattccggaaatacgatccgtcctgccaggcagggcgcggcatgcgtgctccgcaagcagcgtgctgcctccgccgctgcagcccggttcaagcgccgcagagggcggctgcgcggcggaacgcggcgtcatgcgctccgcacttccacccatagaatagcatacggcggcgtaccgtaccagcacgccgccgtgaattctttgttaaatttactttacacggatgatgcactcgaagctctcgccgtagtaggtgacggtcacgcgcgtgacgccgctggccttgcccgtgatcttcgagccgtctgccgtgcagacagtcgtgtccttcacactgtagcttgcgccctcgacgcgctcgtcgttctcatcgagcagccgcaggttgaagctctcgcctacgctgagcgtgacgtccgtcagggagaggtgatagccgccctcggctgtgtcctcgaagctgcagcgcacgatgagctcggccgtcttgccgcccacgtcggcggtgatggtcgtcacgccggggcctttggccgtgacaaggccgtcctcgtccacgatggcgaccttctcgtcctcgctcgaccacttcacggtctttccggcgggcaggttcgtgaccttgacgcggagcgtctcgttgtgcaggctcatggtcacgtcgctgtagttcagctccggcttgaagctggcggatgtcgtcggctcgctcggctccgtggcgtccgtatccggctccgtggaggcgtccgtgggactgccgctgaaatcgcaggtgacggcacaggtcattttccgttcgccgcacgtcacggtgatcgtggcctgcccctcgccgacggcggtgatctgggccagtacctcggtctggtcgtagtccggcgcgctcacaacggggtcgccggagatgcggacgatgctctcatccgagctcttgaacgacacgggctgctcgcagctggcgttgatggcgacctgcagctgcagcgtctcgtccgcagcggagaacgtcagatgatcgggcgtcaaattcaggaaggtgcaggaggaatcgtcctgcgcggcggccgtctcgctcggcgtggtcgcccggagcacatcctccaggccgggccaccagccgatcatgtcgccgatgaagaacagcacgacgagcacggccatcgtcaaaaagaccacggcggcgcgcagataaccgcgcgggatgccgccctgcgtctcgggtgccttggagccgcgctgcttctgcggaacgcggcggcgctcctccagccgggcctgacggtcctcctcgcgtctggcacgctgcgcatcctgctgcgcgcgctgctcctcctgctgggtgcggcggcgggctttgcgctcctcctcggtcaggcggcggcgcggcgcggcgggcgcggcctcggcgcgggtggtgctgccgcagagcgggcacttttcgcgcgaaccgtcatagatcgtgccacagtagtcacaaacaactttattttccatatctcaacgcatatcgtgctatgcttggtctcctttcctccggcatacgacaggaatcgcctccgccggtttttcctatcataccattttccgaagaatatgacaagaatgttcttgcattttttgcaaaaatatcatagtatatactagaaataatttgagttcttgatttaggaggcgaacccgatgtccgaactgaaacttgtctcccctctgctggatcagatgtccgttgaggaggagatcgccgggcacaatggctgtacctgctacgccctccgccacgtccagtcgggcgagcgctttgtcgtaaagcggatctccgtccccgcgtctgacctgcaggtgcgggcgctgatcctctccggcgcttacccggatgacgccgccgtccatgcctattacggcagtgttgccgaggatatcaaaaacgagctcgacaccggcatgcgtctggcagagaacggctattttgcgggcgcgagctcttaccagatcgagccgaaggagagcggcatcggctacgatgtctatatcctctatccgcgcatggtctcgctgcgcgccttcctcgaccacagcgccatgaccggcctgcgcgccgtgaacctcggcatcgacctgtgcgatgcgctcacggcctgccgcgatgcgggctatctgtttgaaaacctcaagccggagaacgtgttcctcacgcagtccgggcggttcctgctcggggacctcggccttgcgccgctggaggacctgcagtatgcctcggtgccggagaattacctcggcccgtattccgcgccggagctttccgccatcacggcgtccccaaaccccacgatcgacctgtatgccgtcggcatgctgctctaccgcatctataacggcaaccacggcccgtttgaagacgaggccacgggcgaggccatggcggacaagctccgcctgaccggcaaggccatgccgacaccgatctatgccgactatgagttggctgccatcatcctgaagacctgcgctccgcgtccggaggatcgcttccagaccccggcggagctgaagcaggcgctggtctattatatgcagcgcaacgaggtgtcggacacgctcatcgtgccgcccatcgtcacgccggaggcgccgctcgcgcccgaggcggagacggacggggaggacgcgcctgcccgcatgacggacgcggagcagctcgacgagaagttccgcacgagctttgccccggacctttccggcgcgggcacggaaaaggacatcgatcccgacgccgtgccggacgcaccgaagccggagcagaaggccgaagaaaagccgcagccgcctgccgagccagaaaaaccggcggagccggtcaaggaggcagagccggtcaaagataccgagccggaagcggacgagcctgcagaagagaccggaccggcggaggaagctggacccgccccggcagagccggaggacgaggatccggaccagatggacttggatgccttcctcgcctcggtgaatgcggccgtcggcgacgtaccgccgcagccggaggaaccggagcaggaagcgtccccggacgagccggagcagtccgccgagccggaggcgacctatgtcgataacgacgcggagagcacgctcccacccgaaccggagaaaaaaccgaagaaaaagcgccgtgccgtcacgatcggcatcgtgactgcgctcatcgtcctgctgggcgcggcggcgtggttcctgctttcgtattactttgtgcgggccgatgccctgcgcgtcgtgcgctgcacgacggaggagctgacggtcgagctggagagcggcgacaaggcggcggacttccgcctgacctgctccgacatgtatggcaattcctatcccgccacggcggccaacggtcagtacgtcttctccggcctgtcggaaaacacgcagtataccatcaccgtcacggcggccgacggccaccgcctgagcagccgcggcgtcagcaccctctccgtcacgacgccggaggccacggagatcacggatctaaccgcctccctcggcgatgccgacggcagcgtggtgctgagcttcagcgccaacggcccgacgcctgcccagtggaccgtgtcctatgcggcgggcgacggccagaagcagtcgcagcagttcaccggcaataccgtcacggtcaccggcctgacgctgcagcagaattacacgttcacgctcgagggaacggataccgtcttcctcaccggcacgacgacgacggagttcacgcccatccccgttgtgaaggtcgataagctgaatgtcagcagcatcgagggaaacaccgtcaccgtgacatgggaaacgggcgaaaacattcccgcaggctggacggtcacctgcgaggcacgtcagttcacgacggtcacgcagaccgtcacggagagcagctgcgtctttgagctgcccgacctcaagcgcgattataccttcaccgtctcggccgagggtatgcccgcgcccgccgtgctcacgctgcccgccaacccgctcgttgtgacgggtctgcaggccacggccaatgaggacggcaccatcaccgcctcgtggcagacggcctccggcgcgcccgccggcggctggtatgtgacctacggcgtgccgacgagcaatcacgagccgcgtctgcaggagtgcacggaaaactccgtcacgctcaagggcctcatccccgatgcggattacacgatctccctgacgcctgcagacggtgcggatgtgttcggcacggtcgaggccagcgccagaacgccgtccggcggccgcttcgaccgctacggcgcaacgccctccacgacctatatttccctgtgggagacgccggcggaggtcaactgggattaccgctccctgacgacgtccaagacctccttctcggcggatgaggacatcgccctgtgcctggagctgacgcgcaaggaggactccgacgacgagatcaccctgctttatgtcattcgcaatgccaacggcgagcccgtgagcgatgcctcggcgcagctcacctgggaccagatgtggcatgagcgccgccataccagcacgatcccgaatccgggcgcggcaggggagtacacgctggaggtctatgtgaaccgccagctgctgaaatccatcgatttcgcgatctcctgattctctttcgttaactatccggccggagcaggaacgccccggccgggagtataaaaattttattaagacggctctgccgtcctaagcgaggaggcaaataatgcaaaactggtttgttgtagtcatgggactggtgacggtgttcgtcgtcctgatcctcatcatcggactgtgctggctgctgggtctggcatgccgcggcagctcgaagaaggaggaactgcaggccgctgccgctgctgcgcctgcacaggaaagcagcattcccaaccgcgcagagtttcttgccgccgtttcggccgccattgccgaagccagcggtacggatgcgtctgcaattcgcattctttccgtcaagaagctgtaaaaacatattgagaaaggtgaacaagaagtatgaaaaagtatcgtgtgaacgtcaatggctccctctatgagatcgagatcgaagaaatggctgctcccgcgaagatgagcgccgccgctcctgctcccgccgctgctcccgccgccgctcccgctcctgccggtgcaggcgctcaggtcaaggctccgatgcccggcaccattctggatgtcaaggtccaggccggtcagtccgtgaagaagggcgacgttctcgtcattctggaagccatgaagatggagaacgagatctgcgctccctccgacggcaagatcaccggtgtgaacgtccgcaagggcgactccgtcgagactcaggctctcctctgcaccatcgcgtaagcgggtaaggagatgccgtatgttcaagaaaaagaataagaacctgcaccgcgcgctcattgcgctcatggtgctggggcttctggtgtgcctgtgctttaccctcgcctccgccgccaccgctgagccggactcctcgtcggccgcggagaccaccgctgtagaggagcagggcgcacagtccaatacggaagcaatgacgaatttcctgaatcaggctggcatcgccaccctgatccacaatgcggactggaaatcgatcgtcatgatcctcatttccttcgtcctgatgtatctggccatcggtaagggctttgagccgctgctgctcctgccgatcgccttcggtatgctgctgacgaacctgcccggcgcaggtatgttccactccgagatcttcgagggcggtcatatccactgggacctcatcaagaacggcgtcacgctctcgaatggtgcgaatgaagccgccggcctcatcgacatcctctacctcggcgtaaagctgggtatctacccctgcctgatcttcatcggtgtcggcgccatgacggacttcggcccgctgatcgccaacccgaagagcctgctgctcggcgctgccgcacagctcggtattttcatcgcttacctcggcgcgctcggcctgagcaagctgggtatcccgggccttgagttcacgcagaagatggctgcctccatcggcatcatcggcggcgcggacggccccaccgcaatctatgtcacgtcccggctggcctccgagctgctcggcccgatcgccattgccgcttattcctacatggcgctcgtcccggtcatccagccgcccatcatgcgcggcctgaccacgaagaaggagcgcatgatccgcatggacgccctgcgtacggtttccaagaaggaaaagatcgttttcccgattgccgtcaccgcgttcgtcgctctgctcgttccgagcgcagctccgctggtcggcagcctgatgctcggcaacctgttccgtgagtgcggcgtggtcgaccgtctgtccaagaccgcgcagaacgagctcatgaacatcgtcgtcattttcctcggcgtctccgtcggcgctacggcgaaggccgagtccttcctcagcccgatgacgctcggcatcctcgccatgggcatcgtcgccttcatgtgcggcacggccggcggcgtcctgcttgccaagttcatgaacattttcctgccggagggcaagaagatcaacccgctcatcggctctgccggtgtgtccgccgttccgatggccgcgcgtgtctcccagaaggaaggccagcgcgaggatcccagcaacttcctgctcatgcacgccatgggcccgaatgtcgccggtgtcatcggctccgccgtcgccgcgggcgtgttcatcgccctgttcggctgataaggaggtatgtccgttatggaaaagaagaatccgctgcgaattacagaaaccatcctccgcgacgcgcaccagtctcaggctgccacgcgcatgcgcatcgaggatatgctccctgcctgcgagctcctggacaatatgggctactggtcgctggagtgctggggcggtgcaacgtttgacgtctgcatgcgcttcctgaacgaggacccgtgggagcgcctgcgcaccctgaaggcccacatgcccaagacgaagctgcagatgctcttccgcggccagaacatcctgggctacaagcactatgccgacgatgtcgtcgaggaattctgccagaagtccatcgaaaacggcatcgacgtcgtccgcgtctttgatgcgctgaacgacatccgcaacctgcgcaaggctgttgagtccgtgaagaagtacggcggctgggccgaggtcgcgctgagctacaccgtcagccctgtgcataacgacgattacttcgtcggcctcgccaaggacctcgagaagatgggcgcagattccatctgcatcaaggatatggcgaacctgctgctgccgctgcacgcctatgacctcgtgcgcaagctgaaggacagcgtctccgtgcccatccacctgcacacgcacaacacggccggtaccggcgacatggtcaacctcatggcctgtcaggccggtgtggacatcgtggactgcgcgctgtccccgctcgccaacggtacgtctcagcccgccaccgagtccctcgtggcgacgctgcagggctccgaccgcgacaccgggctggaccttgccaagctgaacgaggctgccacgcacttccgcaaggtcgccgacaagctgaagaaggaaggcttccttgatccgaaggtcctgcaggtcgatacgaaggccctgatgtatcaggtccccggcggcatgctctcgaacatgctcggccagctcaagcaggccggtcaggaggatcgctattacgacgtgctggccgaggtgccccgcgtccgcaaggacttcggctatcctccgctcgtcaccccgacgagccagatcgtcggcacgcaggccgttatgaacatcgtcgccggtgagcgctacaagatggtcccgaaggaatccaagggtctgctccgcggcgagtacggcaagctgcccggtaaagtaaatgaggaagtccgccgtaagtgcattggcgatgacaaggtcatcacctgccgcccggctgacctgctcaagccggagctgccgcagtaccgcgaggagtccaaggacatcgcccgctgcgaggaggacgttctgtcctacgccctgttcccgcaggtcgcgcgcaagttcatggaagcccgcaacaacccgaagcccgcagagcccgagaagaaggccgccgatcccaatgcggtccgcgagctctatgtcgaggacctcggcagataagccaaacagcaaaagaccctcccgccgcccggcgggagggtcagactgtcaaaaaattgcccagctgaaagtttcggagggaagaaaagtgtgaaaggaaaccgtcagggtgtcctttcacgttaaataacccgccgcagcggcaggattgcaaaataagtactacagaaattcattttgcaatcctgaaagcagcttggcgaaaaatcccgaagggacttttttgacaagctgaagaccctcccgccgcccggcgggagggtttgtttatgtcgtcgtaagagagccggttggctgccggttcttccctgagttgtcattgcgagaaggccaaaggttgacgtggcaccatgagcgcgaagcgcgaggaagtgcccttggggtgcaatctcgggaaggcaccgccgatatacacggagtgccgccgaacgcaatcgctaccaaatttgactgtagcggcgctcagtgagcgccttgtacgggataattcaaccgtagg

SEQ ID NO: 11230 - DNA, 296 bp, Unknown
  gut microbiota DNA sequence
gctgcaagaactactatcacaaacgatgagaaccgccgtcatggtacaggtggactaaatctctacctttcttccagtgcgacaagcagcaactacgccggaatttaccgcagcgcatcgctgaccggtgggaagccctacacgctgtcggcctatttttccgccagttcctatatgaactggaacagcggtgcgaaattggagctgcttgtgcagaacagcagcggcacgacgctggaaacgcatttgctcacggacgccaagccaaacgccgctatggaggacggctggcagcg

SEQ ID NO: 11231 - DNA, 173 bp, Unknown
  gut microbiota DNA sequence
gccactgaatttgtaccgcaaacaacgtcagcctgcatggcgctcagtgagcgccatgggcagttgcagatattgaagtgttaattccgtggcgcaaagccaccagatttgtcattccgaggagcgaagcgacgtgggaatctcgtgcaggcagctgcgttttcgccggggcc

SEQ ID NO: 11232 - DNA, 200 bp, Unknown
  gut microbiota DNA sequence
cgtggcgcaaagccaccagatttgtcattccgaggagcgaagcgacgtgggaatctcgtgcaggcagctgcgttttcgccggggccatcttgttatccggccgggtactgcgagattgccacggcccctttggggcctcgcaatgacaaacttggaagccttgcgccactgaatttgtaccgcaaacaacgtcagcctgc

SEQ ID NO: 11233 - DNA, 2433 bp, Unknown
  gut microbiota DNA sequence
cattttaacgacagcctgttcatttcggcagctctgcgccgggaggggcatgccccgcccctacaacgcacggctggcagccttgcgaaactttccactttccattttctattttccactcgccgcatgccgtccccctacaacgctccatcgatgcccccgccattcccctccgccagctcccacacctgctttgcaagcagcacggcgagaggcaggaggatcatccccgcaagaccgaacaggcgatagccagcatagagcgacaggagcgtcagcagcggcggcaggccgatctgccgcccgagcaggcgcggctcaagagccgagcgggcaaaggccgcggcggcataggtgacggtcaggccgagggcaaggccgccggacccgcgcagcagggagacggccgcccacggcagcagcaccgtcccggagccgaggacgggcagggcatcgaccacggcgatgagcgcgcccaaaagcacggcgtgcggccgccgcagcgcggcgagcaggccgagcgaaacgacgccgaacgtcacgagcaggagctttccctgtgcgaggacatagccccgcagggcagcgcgcagacgcacaaggagctgcccgccgcgcgcccgccattcctccggcacatggcgcgccgcaagggcgcggagcctcggcgcatcgcccgcgaggaaataggcggacagcagggccgtcaggccgaagagcagcagctgaggcatccagccgagcacgcgcgtgacgcagccgaacacgccctgcgacacggagtcggccacgacacttccgcccgcaaacagccggtcgacccactgggctgcggcctctcccatgccgtccggcaggcggctggccagatgcagggccgcggcatgcaggcgctgcagcggttcggccagcgaggagagcaggccaggcagacgggcgcacagggcagcgcagccctgccacagcgcccacccgaggcccgtgagcacggcggccgcggcgaggcacacggccgtcacgctgaggaatgcagccagcccgtgcggcaggcggcgcaggcgcgcggcaagcggccgggccagccgggcaaggccgagaccgagcaggaacggcaggccgacgggcaggaggatgcgcgccgtgagccacaggcccgccagcaccccggcggcgcaggcgcacagctgccagagctttttcatttcctcgactcctttcgaccgcgccgcgcggattgcgcttgcattttcggggcgcttatgttagaatgcacttgttcgggaaacatctgcacatctcttgtgaacaggaggagccatatatggcacagcttccgaaatactatatcgtggaggcccaggcgctgccggaggtttttctcaaggtcgccgaggcaaagtggctgctggagaccggtgaggtcgcaacggtgaatgacgccgcgcgcgccacgggcatcagccgcagtgcattttacaagtatcgcgattccatctcgccgttccagaacctgatggctggccgcattctgaccttccagttgctgctgcgggacatgacgggcctgctttccagcatactcaccatttttgcccaattcggcgcaaatatactgacgatcaatcaggcaattccgacaaacggctgtgcctccgtgacgatctcggccgagacgagcggcatctcgcagggcgttgaggcgctgatgcgcgcgctttctcaggtggacggcgtgcggaaggtcgaggtcctcgcaggctgaaaacagcgcccgatgcgcagcggaaatttttgccggattccatgcgcttgcctcttgcatttccctgttagagcctgtatacttgtagcgggcaattcacaggggggaggtgttatccatggtttttgaaacgatccgcgaatttctttgcgagcagctggcatgcgacgagagccgcgtgacaccagacactgtgatgctggaggatctggagatggagccgtcggatctcggtgatctgatgctttccctggagcaggaattcggcatcgaatggacggatgacgacctgcaggggatccgcacggtgggcgatctgactgcctttgtggaaaatcaggaataaaatcgagcctgcatgtgccaaacggtacatgcaggcttttttcattcggcggggcacagggacacccttgggagcgctttcttcccgtgtcattgcggggagcgaagcgaccttggctctccctctgggagagctgtcaccgaaggtgactgagagggcatggcaggcacttacggattcgccaaaagctttcccgtgttccggctggtgctgcgagattgccacggctcctgcggagcctcgcaatgacaaacttgggagcctgctgcaaccggaaggatgcaatgacaagatggggagacccaccccattcggaggggcatag

SEQ ID NO: 11234 - DNA, 5317 bp, Unknown
  gut microbiota DNA sequence
ggcgaccttggctctccctctgggagagctgtcaccgaaggtgactgagagggcatggcaggcacttacggattcgccaaaagctttcccgtgttccgggcgtgtactgcgagattgccacgccttgctccgcaaggctcgcaatgacaaacttgggagcctgctgcaaccggaaggatgcaatgacaagatggggagacccaccccattcggaggggcatagtgacaaatttgcaagcgcctccctcccgtgtcattgcggggagcgaagcgaccttggctctccctctgggagagctgtcaccgaaggtgactgagagggcatggcaggcacttacggattcgccaaaagctttcccgtgttccggctggtgctgcgagattgccacggctcctgcggagcctcgcaatgacaagcctgaaagcctcttcatccaaaagacgcaaaaagcgaggagccgcagctcctcgcttttttgcattcaactgaacaggttcagattcacggcgctgaggtcaaggtaccagtgcccgccggtttggtagcacacggcgcggacattgagctggccatccagctcgcccgtgaacgaaacgcggaatttgacgagccgtgcctcgtcgacggtcatggtccagtcatactgctggcggaaataatcctcgagcacgcggcatccgctctcggggatgcggcggctgtccagctcctttggcgtgatgtcatagtcgttgctgctgcccttggcgaacgaatcgcgcacattggccagctcaccggcatcgaagccgtccgcattgagcacggcgggggggatggcctcctgcaggcgggtgaaatcgccgtcctgcagggcggcagagtaggtgcggaccggctccatatagggcgcgtcggccaggccgcaggcgccgagcaggagggcagccagcaggcagaggatgcagattcgcttcatatcgggcgctcccttcggctcactttttgagcaggtcgcggatctccgtgagcagctgctcctccttcgtcggctcgggaggcgcggcaggggcctctgcctccttcttgcggtgcttttccccggcctcacgcaggcgattgacggtcttgacgatcaggaacacgacaaaagccatgatgacgaagttgatgaacgcggacaggaagtcgccgaaacgcaggtagtttacgatgacctctccgttttcatccagcttttcgccgaagaactgcggcagccggatcttccactcctcaaagctgaggccgccgaggaacatggacacgaccggcatgatgacgctattcgtcagggcatcgacgaccgtcttgaatgcaccgccgacgatgacgccgactgcaaggtcgagcatattgcccttcatggcaaattccttaaattccttcagaaatccgctctttttcttccccatagtaccctctctccttctcagaagttcttcttttcgagtacttccagaccgccgaggtacttgcgcaggacctccggcacaacgacggagccgtcggcacgctggttctgctcgaccatggcggggaagatgcgggacgtggccagaccggagccgttgagggtgtggacgaattccgtcttgcccgtggcctcgcggcggaagcggatgttgccgcggcgcgcctgatagtcgcgcgcgttcgaaacggaggagacctccttatagccgttcatggacgggatctgaatttcaatgtcatacgtccgcgccatggaggccgagcaatcgcccgcggcaagcttgacggtgcggaagtggaagcccaggcccttgaccaggcgctcggccttgccgaccagctcctcgaaggcctcgtcggacttctcgggcagggtgtactggaacatctcgatcttgttgaactggtgaccgcggaccatgccgcgctcatcggcgcggtgggagcctgcctcgcggcggaagcacggcgtgtaggcgaacagcttgtgcggcaggtcgctctcggcgagaatctcaccgcggtgcagggaggcgagggccgtctcggccgtcgggagcatgaagtgcatgcggtcatccgtcggattctcgatcttatagacctcgtcggcgaacttcgggaactgtcccgcggtttcgccgcactgatactcgagcatcaggggaaggccgaccatctcgtagccgtccttcaggtgctcgtcgatgaagtagttgagcagggcccactcgaggcgcgcgcccatgccgcggtagatccagaagccggagcccgccagacgcgtgccgcgctcatagtcgatgaggccgaggtccgtgcacaggtccacatggtgcttcggctcgaagtcgaagtgatgcggctcgccgtagtagcgcagcggctcattgttctccttgccgcccggcttgaggtcggggtccggcaggttcggcagggacagcatcagcgtgcggtactccgcctcgacgtccgtcagcttctggtcgttctgggcgatctgggccttcagctcggccatgcgctcgaagatcggcgcaacatcctcgcccgccttcttgcgcttcggaatttccttcgagacgcggttctgctcggccttatccgtctccgttgagaggatgagggcgcggcgctgagcgtccagctccagaatgcggtcgacggcagcgtcgcagtcgacctccttggcccgcagaccggccttgaccgcctcgggatcgtccttgattcgtttgatatccagcatattcagtcacctcaataaatcagttctacggaagctctgaatcaatcatctgcggcggatgccggatctttttcgtcaatccatcggtatgaaaaacttgaaatacacaaagtattcctgcgttttccatacctcgccttgccaaaaaactctctcgccatccgctcttgctgattgaatcagagcttccctaagtttttaatcaaagcttttctaaatcagtcgatataggatcgcagggtctcatagagcgcggcgccgtcgtccttcagggcgtcggcataggccccgagcgcctcgagatggctgcggagggcagcataatcgccctgctccagcgcggcctgcgccgagacgagcagctcattggcctgcgcgcggcgggagagcgtgtcgttttccttctgcgcgctctcgagcgttttctcgagcgtctcgcgggccttttcggcctcgctcaggcgggtctcggcgtccgagagcttgtccgccgcctcggaggacgcggcgttggcctcgtcgagctgggtctgcagctctgcggactcggcgcgggcggcgtccagatccttctgcagcagcgcgatgttctcgcgcgcgcccgtgttggccgcctccatctcgcccttcatgtcaatgaccttgatgagcagggagatcgccacgagcaggaaggccgccgcgaacatgatggccatgtattcgagcatggcgcgctttttctttgtggtcagcggctgctccgttgttttttctgccgcttcctgcggctgcttcagttcaggcattcaggcgtttcctccgtttttccgagggcgaggagggcgtcatacaggcgctgcaggtcctcctgcccataaaattccagttcaaagcgtcccttgcgctttccgttgacgatgcggaccttgcggtcaaggcggcgcgtgagggatttttcgcactcggcgacatagtcgaccgtcaggggagcgggcttcggctccggcttttcctcctcctgcagcatccgcttgcacatggcctcggcctgccgcacggacaggcgcagggcgacgatcttctgcgcggccgccttctgcaggcgggccgccgggagcgacaggatagcgcgggcgtgcccagccgagatcgtgccgtcctccacgagggaacggacctcctccggcaggagcagcaggcgcagggcgttggctacggccgggcgggacttgccgacgcgcgcagcggcctcctcctgcgtcaggccgtattccttcatcaggcgctgatagccctcggcctcctccatggggttgaggtcctgccgctgcaggttctcgacgagggccagctccataacggtgcggtcgtcggcctcgagcacgacgacgggcacctcgctcaggcccgccatccgggccgcacgccaacggcgctcgcccgcaatgatctgataaaatccgcctccgcttgcgcggacggccagcggctgcaggatgccgtgggcggcaatggaatccgccagcgcctgcagctcctcctcgtcaaacgtgcggcggggctgatccggattcggctccaccttctgcaggggcagctttgtcaccgcgccgctctcgggttcttccgggaaatcgccgatcagcgcgccgagcccgcggcccagcccacgctgctttgcactcataagcttccgtcctttctgcgaatctcctcggcaacggcgagataggccgccgcaccgcgggagcttcggtcataggcaatgaccggcaggccgtggctcggggcctcggcgaggcggacattgcggggaatggcgttggcatagaccttgccggggaagtgccgccgcacctcctgcgccacctggttggagaagttcgttctcccgtcgtacatggtcagcagcacgccgaatacggaaattttcgggttcagccgccgcttgatggcccggagcgtgcccatcaggtcggacaggccctcgagggcataatactcgcactgcaccggaatgagcacgctgtccgccgcgcagagggcgttgagcgtcagcagctccagcgagggtgggcagtcgatgaagatgtagtcataggccgcgcgcagcggctcgagcgcgtttttcagctggtattcgcgcttgtccacgccgatgagctcgacggtcgcaccggccagctccgcgccggacgggatgacgtcgccataatccgtgtggatgacggccttctcggcgctgatgccgtcgagaatgagatcgtaggatgcgtagggggccttgcgcttgtccacgccgaggccggaggtcgcgttggcctgcggatcgaagtcacacagcagcacccgcgcgccggtcgcggccagcgccgccgtcaggtttacggcagtggtcgtttttcccacgccgcccttctgattgacgatcgcgatgatctgcgccaagctgccacctcctttggttgtcgatacggtgctattctagcacatgcatgggaagattgcaaccgtgcaggagcgttctgtaaaaaattcctgtttcacgtgaaacatttggaaaacggtccgccgttttgcgccatacc

SEQ ID NO: 11235 - DNA, 54550 bp, Unknown
  gut microbiota DNA sequence
gttcccatcccgaacacagaagttaagctcatttgcgccgacaatactttgcgggtgactgcacgggaagataggtaacgccaacataagaacctgccatttggcaggttcttttcatattctacccgtttatatcaaactggatcggaagcgctgcggcgcagaaggaggaagcatggaatatcgtaccttaccccatggtggcgagcggatcggcgtcatcggcatgggctcgtccgtcatcggcgcgcggccggaaagcgagatcatcgggactgtccgcgctgcggtcgagctgggcgtgaattgttttgacatggcaggcggccatgcagcgatcttcggcgcctatggcaaggccctgcaggatctgcgagaccgcgtctacctgcaggttcacttcggcgcggactatacaagcggcgaatacggctggacgaccgaccttgagggcgtgaagcgctccgtcgactggcagcttcggaatctgaagacggactacatcgatttcggctttatccactgcatcgatgaggccagcgacctggttacttacgagaaaaacggcgtgctggactatctgctcgagatgaagcgcagcggtgtcgtgcatcatctgggcctttcctcgcacactccggcgctggtcgaggaaatgctggaccggaagttcattgatgtcgtcatgttcagtgtgaatcccatctacgattatggcaaaggtgactatggcatcggcggcagcgaggaacgcaatgcgatgtacgctcactgccagcgtgacggcgtcggtatcacggtcatgaagccgttctgcggcgggcagctgctcgatgccgcccggtctccgttcggcaaggcgctgacgaaggcgcagtgcatccagtatgcgctcgataagccgggcgtactgacagtcctgcccggctacggcagcgagcaggaattgcgcgaggtgctggacttctttgatacctccgccgaggagcgtgactattcctgcatcagcgcgttcacgccggaggattccaagggcaagtgcgtctactgcaagcactgccagccctgcccggtcgggctggatatcggccttatcaataagtattacgatctggcgcgcctcggcgacggcctcgcgaaggagcactatctgacgcttgagcaccgcgcagaggactgcgtcggctgcgggcactgcgacagccgctgccccttccacgttgcgcagagcgcacgcatgcaggaaattcaggcctatttcggcgcataaggaggatatttttatgaaagagcttcgtgtcctgatgctcaacggcagcccgcgtgcgaacggcaacacgtccatcgctctgcgggaaatggagaaaatttttacggagagcggcgttgcggtcgagaccgtgcaggtcggcaatcaggccgtgcgcggctgcgtggcctgcaacggctgcgccaagctcggcaaatgcgtgtttgacgacgtggtgaatgagctggccccgaaattcgagcaggcggacggcctcgtcgtggcaagccccgtctactatgcgtctgccaatgcgacgcttgtcgcctgccttgatcgcctgttttacagcacttcgtttgataagacgatgaaggtcggcgccagcgtggcctgcgcccgccgaggcggctgctccgcgacgttcgatgagctgaataaatatttcacgatctccggcatgccggtggcttccagccagtactggaacagcatccacggccgcgcggcaggggaggcggagcaggacggcgagggcctgcagaccatgcgcgttctggcccgcaacatgaccttcctgatgcgcagcatcgcgctcggccgcgagcagttcggccttccggagaaggaagcccgcatcgcgacgcatttcatccgataaatccggaataacatggggcggtttcgttcggaaactgccccgttttttgcaggaagggcttgacagatcgggcggaatatggtaacctgcgcatagaatgcaaatccagattgaaatttgatacagaaaggcggaacctccatgaacccgaaggaaaaaatcctccgcacggagcttgtctcggcgggcgctgctctgctttgctgtctgctgctctgtatcgcctgtttcctgctcgcgggcttgccatccgccagcctgatcctgcttgcagccgctctgccgctttccctcgtgatcctgccctgtgcgctgacctggtacagcggccgcttctgctgggctgctccgatcttcctgacgttgggctttatcctgatccccagctattttctccggggctattttctggagatcggtttggccggtctggcgtccggcctgtttgcggctgccgtgcaggggttccatcttgcggcacggcgggagatgccatgcacggcgtgggcggcctatggcggtctaaccgtcctgtacctgtttgtcagtttgctcgatctgctgcatgacgcgctgttcacaggcggcccgatggcgggcatctggatcgcagcgacggtgtgctgcctcggcatcacgctgctcgtgttccgcgccggacgacgtgtgacgttctacccggcggcatggatggtcatgctgtttgcgctgcagttcggcatgacctactggacgctgccgttcgacctcggccgggacgcgctgcattttgcggtcgtactcgttccgcagctgctcctgacgcttgttctgctgctgcgcaggccgcgtgcggtgcaggcgtccgaatgagatttcccttgtaatttcccgaattctctattataatagaatcaaattttgagctgcgctgcggcgcggcatcggaagtggagttgagaagatgcgccatatttcctgctgaacgttgggctgacaagacaaagcggcgaagcggccgcttggctttgctatgccctgatgcaggaatatgcgggtccctcaactgcgcgtgaccggtctgccctctggcgacggatgcacaatggctgcgggatgctttcctgcggccatttttacgtcatggagggcacacaatgtcactgatccacgtcaaaaatctgacgtttacctatgatggaagctacgagcctgtttttgagaatgccagcttccagatcgacaccggctggagactcggccttatcggacgcaacgggcgcggaaaaacaacgctgcttcgcctgctgtgcgggacatatccctatcagggaacgatctccgcgagcacgccggtttcctatttcccttatttgatccgtcgtccggaggcaccggccatcgacgccgtctcggaaatggagccggattatgagctctggcggctgcagtgcgagatggaaaagctgcggctcgacgagtcgatcctgctccggtcctatgccacgctcagcggaggcgagcagacaaagctgcagcttgcggtcctgttttcgtcggagcagcactatttgctgatcgacgagccgacaaaccatcttgatctgccggggcgcgagctagtaagccgttatctcagccggaagcgcggatttcttctcgtttctcacgaccgggcatttctggacggatgcgtcgaccacatcctctcgatcaaccgggcggatattcaggtctgcagggggaatttttccacatggatggagaaccgggagcggcaggacgcctttgagcagcggaaaaacgagaagctcctgcgggagatcgcccgcctgcaggatacggcgcgcgaaaaaacccagtgggcgggaagggcggaggcccggaagatcggcagcgcgcctgcggaccggccggataattaccgctcctatcagggagcaaaggcggagcgcacgatggcgcgcgccaaggccatcgagaagcggcgcgaagccgcgctggaggagaaaaagctgctcctgaaaaatctggagcggcgggaggaactgaagctcgtccagcttccgttttatacagagcggctcgcagagctgcggaacatccgcatcgcatatggggcacggactgtctgcgattcgttcggcctttcggtgcgggcaggggagcggatcgcactgcaggggccgaacggctgcggcaaaagcagtatccttcatttgctgtgcggcatggacgtcccgcatggaggcgaggtccggcgtggcagcggcctgcgcatttcctttgtcgggcagaacacgtcggggctctgcggcagcgcggcagagctgatccgcgaaaaagagatcgatgaaagccgcttctattccatcctgaacaaactggatgtgccgaaggcccagctggagcgcgacctgcggctgctcagcgagggacagcggaaaaaggtgctgctggcggcttcgctctgtgagcaggcgcacctgcatgtctgggatgagccgctcaactatatcgatgtgatctcacgcatccagatcgaggagctcctgctccggttccggccgaccatcgtgtttgtggagcatgataaagcgttctgtgagcacgtcgcaacgcggatcgtatcgatgcagaaggcataaatgcaatttttcgcaaaaaagacaccctgcagatcactctgcagggtgtttgttctgctgtaagatcagtctgcgacgtagggcagaagagcgatctgacgggcgcgcttgatggcgacggtcagctgacgctgatgctcggcgcaggtgccggtcgtgcggcggggcaggatcttgccgcgctcggacgtgtagcggcgaagcttggcagcatccttgaaatcaatgctcgtaaccttgtctacgcagaagttacaaacctttctgcgcttacggggccgagttctatcattggccatgatgaaatcctccttcttgcaatctcagggaaaaagctcaatcaaaacgggagctggctgtcgtcgtcctcgatcatcgagaagtcggaagccggcgcgggggcagcgggtgcggcgtagccgtgggagctgcccgcagcaggcgcagccggtgcgctgtagccataggacggcgcgggggaatacccgccgttgtcgcctgcggcatcgcgcttggagtcgccgaagtagacattgtctgccacgacctctgcgctgcggcgcttgttgccctctttatcggtccagttgcggatctggagccgaccggagaccaccgccatgcggcccttggtgaaatacttgctgacgaattccgccgtattgcgccatgccacgatgtcgatgaagtccgtttccttctcgccgttgttcgcgctgctgccgaaatcacggtcaaccgcgagggagaaggatgcgaccgcgatgccggaaccggtacggcgcagctcggggtcacgggtgagacggcccatgagaacgatatggttcagcatgaggagtcccccttacgcttcgacagcgacgatgatggagcgcaggataccgtcggtgatcttgaacacacggtccagctcagcagggagctcgggcttgcattcgcagttcatcaggacatagtagccttcgggcaggtcgttgatcgggtaggccagccggcgcttgccccactcctcgatgctcgtgagagtaccttctgcctcaaccatcgccttgaacttttccacgagagcggcaataccctcttcgccctgagcggggtcgatgatatagacgatctcatacttaccggaaatcttagccattgttgtttgcacctccttttggacttgtggccgccgcgctgcggcggcaaggattgcctgaaattcacaggcctatctattttaccgttccgtgcggcaaaagtcaagcattttccaaacttttttgtggagaaattccgcgtgttccggggagagcaccggaaaacaggatcacagtcccagaatcgtgactacgagtccggcaatgcccagcaggatcatgatcgccccgccgatgcgtgtgccgatcagaaaagaccgggtcggctcgccgtttgcttcattttgctgggagttcacgatctcaaagatatcctccgggaagaacagcatgaaaaaaccgatcagcgggaaaaagaatataccgatgaacatcattgcggatacccccttgtgaactcatgataatagcacaggagcagcaccgcgtgataacagcttcgtcgttcacaggggactgctttgcaaatgactttcctgtatcaggtggtgctgccccgagactgtcggtgatcagacaaacaggcgcaggatcagcgctgcaagcgttgcgatgccgatcagcatcaggatcacgcccgcggtgcgcgaacagatcagccagaggcgggtaggctcgccgttcgcctcattgcgcaggtcattgagaatctcgaaaatctgctccggaaaaacagcagaaagaaaccaatcagcgggaaaaagaacgctttgataaataacatattgattacacgatctgcaaaggaccggacagcggagtggggagataagcggtccgagtgtatgcgccatcgcaacactctatatcgaaagaatacatatatccgtagcaaccaccttcgttgagatacgatgcgatggcaggaagaatggcgttatagttttctgcgactacggtagcagttttgttatcggagtatgttttcggtgtggaattgacaacggatgcaccatggatattgacggcaatggaaaatttatttgcgtaaaaactaagctcataatagtcgtcgcttttggatgattctttaacatatgaaaatgcaatcgttgaaacgcaacgataagttacataacaactactgaaagcgttgcttgtagactcggctgggcccaataattcataaggaagccactggattactttgagtaatccaattgctttttgagcataaattacaagtaaattagctattagctttccgagaatcggtttgtttgaaaagaacttgtaattgtcttctccggttacgagtgtgccgccaggattgttaccaacagcaactaatcgctgcacatcatatttttttccaccgtaggagttggaaatatagttatatacgtaccattttgtcgtatttgtgtcggctggtttggaggcctgcggagctacgggagaatgaacggattcacggttcaatatctcggctagctcatcgccttcgacttgccgaacacctaactcggcaagctgctcgtcgatatcggcgaggtcttcttgaacggcggcctgactggaaacggaagattcgtcagcgattgcttcgttgagaagagacaaagcaaggttttctgtcatttcgtcgaaaagtgccgatatctgctcctcacgatttgcaacatcggcattttcgagagcacttacctggccaactgaggccagcacaatggacatgcacaatacaacactgcaaacaatagaaattactttacgcatggtttaacctccttcacacttcataaattctgagacggacggtcggactgcgttttctgtattttcatttgccccctttcctttaggatgtttcgagcatatcacaatagtagattaattgcaagataaaacgaaaaaatcgtgaatattctcccgtttccacaaatcccgcagcgcgaaaacgtttccaaagcggccccgcttgtggatttttcccacgcgggatgcatcctgcgtgaaaacagcttgcatttttgcccggaaaatgctattctttatgggtacaaggctgtaaattttgacgcagacaggaggaacgcagaatgaaaaagctaaccggttccatcgtcgcgctggtcactccgttccatgaggacggcagcgttgattttgcccgccttcgggagctgtgtgactggcacatcgccaacggtacggacgcgatccttgcgctcggcaccacgggcgagacggcgtccacctcgctggaggaggatatcaaaacactggaatgcgtgatcgatcacgtcaacggccgcgtccccgtcatcgcgggcgcaggctcgaactccagtgagatgcagaagcacaagagcgtcatctattcccagatgggcgcggctgcgctgctgtgcatcagcccctattatgtcaagacgaatgaagagggcatgtaccgccacttcatgatgtcggcggatgcggctaccgcgccgatcatcctctataacgtccccggccgtaccggctgcaaaatatcgccggacgtcgtgcggcggctctccgtccacccgaacgtcatggccatcaaggaggccagcggcgatatcggctatgccatgaaggtcgcgcgttacctgagcgacgacttcacgatgtacagcggcaacgacgacatcaccatcccgctgatgtccctcggcgcgtccggcgtcatctccgtgtgggcgaacgtcatgccgcgcaccgtgcacgacatggtcacggactatctggcgggccgccacgaaaaggccctgcagacgcagctgcgctatcttgacctcatcaacgccctgttcatggaggtcaaccccatccccgtgaagacggccatgaacctgatgggcctgcaggccgggcatttccgtatgccgatgtatcccatggccccggagaatctgggccgtctgaagcgcattatgcgcgaggccgggctccctgtgcaggaggctgcggaatgaaggtatttctgagcggatacggcaaaatgggccgaatgctcgaggagctggcgctggagcgcggctgggaggtcgtcggccatgccgacatcacctgccccgaggcctatgaaacggcccccggcgcggacgtctgcctcgatttttccggcgtcggcgcgctgcagcccctgctcggctacctgcaccgcacgaagaccgcccttgtcagcggcacgaccggcctgatggagccggacctcgatgccctgcaggagctgggccgcgagctgcctgtcatctggacggcgaactacagcacgggcatcgccgtgttccgccggatgctgcatgattatgcgggcgtccttgcgggctgggacaaggagatcgtggaaatccaccacaatcagaaggctgatgcgccgagcggcacggcaaagctcctgctgcaggagctggacccagagggcacggcgacggtccttcacggccgcgagggcctctgcggcaagcgcaagccggaggagatcggcgtgttctcgctgcgcggcggaacggtcgcgggcgagcataccgtctatttcttcggcgaggatgagacgctgcagatcacgcacagagctgcgagccgcagaatttttgcggcgggcgctttgcgcgctgcgcaggccatctgcgggcggggcccgggcttctatacgctcgacgagctgctgtttgaaaactgaccgatatcaatataaggaagaacgactatggaaaaactgaaaccccgcacgctctccggctttatggagctgctgcctgcgccgcagcagaagttcgagcgtatgctggagatcctgcggaagaacttcgccctctacggcttcacgcccatcgacacgcccatcatcgagtcggccgaaatcctgctggccaagggcggcggtgagacggaaaagcagatttaccgcttccagaagggcgactccgatttggccctgcgcttcgaccacaccgtcccgctggcaaaatacgtcgccctgcatgagaatgagctctgcttcccgttccggcgctatgccattggcaaggtttaccgcggcgagcgcgcccagcgcggccgcttccgcgaattctatcaggccgatatcgacatcatcggcgacggcaagctctccgtcgtcaacgaggcggaaattccgtccattatttataaggtattctcggagttcggcctgaagcgcttctgcatcagcgtgaacaaccgcaaaattctcaacggcttctatgccatgctcggcctgacggaaaagtccggcgatatcatgcgcacggtggacaagcttgacaagatcggcccggacaaggtccgcgtcatcctcgtcgaggacatcggcctttcggagcaggatgccggcgaaattctccgcttcatcgccatccgcggcacgaatgccgaggtgctcgagcgcctcgaagcctaccgcggccgcgacgaggcctttgacaccggcctcgacgagctgacgaccgtgacgaagtatctggcggccttcggcgtgccggaggagaactttgccgttgacctgaccatcgcccgcgggctggactactacaccggcaccgtctatgagacgcgcatgctcgaccatcctgagatcggcgcgatctgcgcaggcggccgctatgacaatttggcggagtattactccgaccgcagcctgcccggcgtcggcgtggccatcggcctgacgcgcctgttctatgtgctcgacgagcagggcatgctcaatccggacctgctcacggccccggccgatgtgctgctgctgcccatgacggacgactttaccgccgccgtcgagctggcgacgcgcttccgcaatgcgggcctgcgcacgcagatctattccgagcagaagaagttcaaggcgaaaatgacgtatgccgacaagctgggcatcccgtatgtcgtcttcctcggcgaggacgagatcgcgcagggcacctgctccgtcaaggacctgcgcaccggtcagcaggtcagcctgaagccggacgaggcggtcgagctgatccgcaagggaatttccgagctgaacaagggctccgtgattttagagaaataatttttgggggaattgatccatgacgcaatcgagaacgcacaactgcggcgagcttcgtctcgccgacgccggcaagaccgtcacactggcgggctggctggaaaatatgcgcgaggtcggcagcaatctggcctttgtcgtcctgcgcgacttctacggcacgacgcaggtcgtcattgagtcggaggagatgatgcaggccttcaagcccatcaaccgcgaatccacgatctccgtgaccggcgtggtacgcgagcgcaccagcaagaacccgaagcagcccacgggtgagatcgaggtcgtgccggagagcgtctccgtgcttggccgctgccgctacaatgcgctgcccttcgagatcaaccgctcgaaggaggctgacgaaaatcagcgcctgaagtaccgctatctggacctgcgcaatccggaggtcaagaagaacatcatcctgcgctcgaatgtcgtggcggacctgcgccgcagcatgacggagcgcggcttcctcgagatcaccacgccgatcctgacgagctcctcgcccgaaggcgcgcgcgactatctcgtcccggcccgcaaccatcccggcaagttctatgccctgccgcaggctccgcagcagttcaagcagctgctcatgacctccggctttgaccgctatttccagatcgcgccgtgcttccgcgatgaggacgcccgcgccgaccgcagccccggcgagttctatcagctggatatggagatggccttcgctacgcaggacgacgtctttgccgtccttgaggatgtgctgcccccggtgttcacgaagtacggcaagtacaaggcggcctccgcggcgccgttccgccgcatttcgttccgcgagtccatggaccgctacggttccgacaagcccgatctgcgcatcgaccttgagctgaccgacgccgcctgcctgcaggactgcggctttgagccgtttgccgggcagaccgtcaaggccgtcgtcgtgccggacttccacaagacccgcaagttcatcgacaagctctgcgccgaggccgagatgctctccggcggcaaggcctactggttccgtctggacgaaaacggcgagctggtcggcggcatctccaagtttgtcgccgaaaagaaggacgaggtcatcgaaaagctcggcctgacgaagaacagcttcgtcgcgctggccgccggcaagtacggcgcggccgtcaagaccgcaggcgtactgcgcaagctgctcggcgcgcaggtcgagggccatatggatgccgagcgctatgagttctgctggatcgtcgacttcccgatgtatgagatcggcgaggagtccggcgagctggagttctgtcataatccgttctccatgccgcagggcggtctggaggcgcttgagcgcgcgcatcgcggcgagatcgacccgctgacgatcaacgcctatcagtacgatctggtctgcaacggcgtggagctgtcctccggcgccgtccggaaccacgaccccgagatcatgatccgcgcctttgagctcgtgggcctcggcgaagccgatgtcaaggccaagttcccggccatgtacaatgcgttctgctacggtgcgcccccccatgccggtatcgctccgggcgtggaccgcatggtcatgctgctggccggtgaggactccatccgcgaggtcatcccgttcccgatgaacaagaatgcgcaggacctgatgatggacgccccgtccgccgtcgatccgaagcagcttgccgatgtgcacatcgccatcgtcgaagacaaataagcaaaacaatgaccctgctgcgagtttgcagcagggtcattgctttaaggctgtttctctggcggattttcctgcacataggcatcgaacagggcggcggcgctttcacatagcccggcgcagggacgtttggcgtaatactgcgccgtgcgggcctccggcgcgccgccgggcgtcgtctctaccccggccagaaggtcccggcagagataggagccatgggcggactgaaagcggtgggccagctcctgcacgcgggcgtaatgcgcctgcttgcgctcgtgcgtcgggatgtccgtatccgcatacagcagcccggccagcaggaccatggcgctgaccgcgccgcagacctcgcggagccgcccgatgccgccgccgagggaggctccgagcttcatggccgtctcgcgcggcagcagctccggataggcgcacaggacggcctgcgcgcagttgcagcccgtttcaaaattcgcgcgggcgagcgcggcgtggcccgtcatcgcggagcctccggcagcctgatgccgttgaagcggatgagatagcggatggggtagtagtggtcgagataattttcggcgtaccactcgaacgtcgcctgcggcagatgcacaagctccggcgcttcgcagcggaacagctcaaacgtcttgcggtcgccgctgagcagggcggccatcagctccttctggtcctcgcttgccagacggtcgaggcaggcgtccatcacggccgagcagatcagctcctcccgcgtggcgcggctctccagcccggccagccattccagcagggcctccggcgggaaggccttgcgcgtggtgacgagcgcgagcttctggaattccttgtccgcgttgcgctgcagcacgtcgatgagatagcgcagcagatcctcgtccagactgcagcagtccagcagcacggagtaaacgctgcggggatcgtccggctcctcgatgacggggggatcgggttccttcggcccctcgaggtcctcaagagcctcgggcggtgtctgcgtcggcgcggggtcgcgggccagcgcggcgagcagattctccggcttcagggcctccagctcgtcctcgtccagctcggttccgtcctgcgcggcacagcggcggaggaactccggcagccccatgccctggatctgctgctgcagctcaatggcgcggggcagcggctcctgctgcgacagagagatgccctccggcggcttgcgcgtcccctcggagagctcctgcaggagcgtcatatagtattccggcactttcatggcgcggcctccctttgagagatcaagaacgatcccgaatttctttgactttagtatactatatcgcgcgcaggaatgcaaccgcgccggaggatgcttttttgcccggcgagttcttgacaggtttttttttacaggatataataaacagtaataccgcaaaattctgcagaatgggagaaacctatgaaaatcaagatcacgtccgacagtacctgcgatctctcgccggagcttctgcgcgagaatgacatcgagcttttccccctgtttatcaacaagggcgacgagagcttccgcgacggcgtcgatatccagcccgccgatatttttgctcatgttgcagcgggcggcgcgctgtgcagcacggcagccgtgccggtcggcgtgttccacgaccgctttgccgagctggcaaaggaatatgacgccgtgttccatgtgaacatcggctccggcttctccgcatcgcatcagaacgctgttctcgctgcagaggacctgccgaatgtctacgttatcgattcccgcaacctctccaccggtcagggccatgttgtgctcgaggcctgccgccttgcaaagaccgccacggaccctgaggagatgtaccggcagctcaatgcgtttgccccaacggtcgacgccagcttcctgctcgaccggctggattacatggtcaagggcggccgctgctcgtcggtcgtggctctcggtgcgaacctgctgcgcttgaagccgtgcatcgaggttgtggacaacaagatgatcgtcggcaaaaagtaccgcggcagctatgtcaagtgcatggagcactatgtccgcgaccgtctggagaactgcgacgacctgctgtacgacacgatcttcatcacgcacacgcccgtcccgcaggagatcctcgacaccgtgaaccgcaccgtgcgcgagtgcggcagtttcaagcatatctatgagacaaacgcgggctgcacgatctcgtgccactgcggcgagggcacactcggcgtgctgtacctgcacaagcccaggaactgatattcgtaccatattttatgaattttggcaaaagcctgtcgaagaggcccaagggacttcttgacaggcttttgcatacctgtccgccctgccgcatagcctgtatcacgagactgtgggggaggctgtgataatgagcaatctttacgccgacattgccagaagaacgggcggagacatctacatcggcgtggtgggaccggtgcgcacgggaaaatccacgctgatcaagcgcatcatggaggaactggtgatccccaatatcgaggatctctatcagcgcgagcgggcgcgcgacgagctgccgcagagcggctccggccggacgatcatgacggcggagccgaaattcgtgccggaggaggccgtggagatcacgccggacggcacggcgcgcctgtccgtgcggctcatcgattccgtgggctatcttgtggacggggccatcggcgcgacggaaaacggccagccgcgcatggtcacgacgccgtgggccgacacggagcttcccatggaggaggcggccgagctcggcacgcgcaaggtcatggaggagcacagcacggtcggccttgtcgtcacaacggacgggtccatcacggacatcccgcgtgcagactaccgggaggccgaggcgcgggccatccgggatatgcaggcaacggggaagccgttccttgtgattgtgaattctgccgcgccgaacggcgggcaggcacaggcgctgcgccgcgagctggaggagacgtatggcgtgcatgccgtgacggcggactgccagtccctgcacgaggcagagctgggcgagctgctgcgggcgctgctctacacgttcccgatgcgggaggtgcgcgtgtttctcccggcgtgggtacgggcgctcgagctggagcacccgctcaaggcggcgctctatgccgccctgcgggagaacgcggcgggtatcgcctgcctcgcggatgccgagccggcgctgcgccgcgcctgtgagctggagcaggtctgcggctgccgcattgcagacgtcgacctcggcagcgggaccgtcacctgtgagctggagttccgcgaggggctgttttaccagatcctcagcgagcgcaccggcttctccgtggagaacgacggccagctcctgcgcctgctgacggagcttgcggccatgaagcgggagtatgacaaaatttctgctgcgctggacgaggtgcgcgccacgggctacggcatcgtcatgcctgcagcggaggagatgcatctcgaagcgccggagatcgtccgtaagggcggggcctacggcgtgaagctgcgcgcgagcgcgccgtccatccatatgctgcgcgctgacatccagacggagatcagccccatggtcggcaacgagcagcagtccgaggaccttgtgcagtatctgctcggcggctatgagtccgatccggaaaagctctgggagagcaatattttcggccgctccgtctttgagctggtgaacgagggcctgaacacgaagctcaagcgtatgccggaggacgccagattcaagctgaaggatgccctgacgaagatcatcaacgagggtgcgaacggcctcatctgcctgatgttctgagggcaggctgccaaatacgaacaggctgccgctcaaacgtcaagtggcagctgctaatttccgtataccggggagcggacagccgggcccggcgctgcgcggccggccagtgcagtttgacggtaaaacggtaatagcccccgaattgtcattgcgaggccccaacggggccgtggcgccctgagcgcgaagcgcgaggaagtgcccttggggtgcaatctcgggaaggcagttgcgatttcgccgatggctttcccacgattcagccggatactgcgagattgccacgtcggccttcggcctcctcgcaatgacaaactcgggggacttgcggcacagaatgtgctgcaatcattgccgacctgcaaggcgctcgctacccgtaaagggcacgccgccaacggctgcgcagtgagcgccactgcagaggcaattggtgccgctgttctaacgattgcccgtgcctcctgctggcgcgtcgccgggcagggcatgccctgcccctacaactttatatgaacaaaccgggagcagcctgctatctggctgctcccggcagttgtattgtcttattttgtgctgtcctgcggctggacggcctcttcaatctgctgcttcgcggcaaggagctgctcatacagctcatcggagacccgctgatagtagttgttctcatacagccggacggcgtccgcagcatcgaggacctgatagcgtggtgtggtccctgcgccgcagtccgccgtggccagcggggtgcagcgcacgttgctgatgacagtcgattccccggtgcgggtgaattccacggtcagcgccagcgaggcgttcgtttcgccctcccgcgcggcgcagtagtcgccgaggccgtaggcaagcacaacgtccttctgcacgccgtcgtctgttgtgatgctgcggcgctctacggggccgacgcggtgggagtgcgagccgacgatgacatctacaccgcggcggaacatcaggtcggcaatcttctcctgtgtgtcgctgatgtcgctcacgtcctcgcttccccaatgcagggcggcgacgatgatgtccggcgacagggcgcgcgcggcgacgatggcgtcggtgatgccgtccgtgtcgatgtgggaataattggaatcatagtccgtgtagagcaggttcgtgcagtattccgcgccgctcggcaggcgcatgccgttcatgccctttgtaaaggccacgacggcgatccggatgccgtttgcctccacaagaacggcgcgattctgcgcgcggtcctctgcactctcataggtgccgacgggcgtgagcccggcgctgcgcaggacagtctgcgtgcgctccaatccgctcaggccgttttgaatggtgtaggagtttgcggtctgcacgagcgagaagcccgtgctgcgcagggctgtggccagcgcatccggcgcactgccgtcgttatacggctcgccggagagggtcgtctccagattgccgattgcaacatcggccgcgccgacaacggcagtcgtgccgcgcagaatgtcagaaaaatcatagctgccgccctgtcgggctgcctgcagcagttcgtcggtgatgcggatgtcgccgacggcgcagagcgtcgccactgccgtgtcgctgcgcggcgttttggactctgtgggcatgtcgctgccgctgcagccgaacagcgggagcgcaaggcaaagcgtcaggagcgccgctgcgcccctgcgaagaaaacgggtcaagatgaaatcctccaatcaaaatgacaagatgcagcttgtcaaagaagtcccttcgggcctttttgccaagctgcttccagaattgccaaatcaatttttgtatcatgattttgcaattctgccgctgcggcgggtgattgaacgcgaaaggacaccctgacggtttcctttcacacttttcttccctccgaaactttcggcttggcgggtttttgacagtctgaagatgatcaaatgtatgcgcctattctacaatactttgcccgcggcggcaagtccgaatttcgaaaaacggcggctcttgccgcgggttgacgaatgtggtatactgtaggcacgacagaaaaccgccctcggcgacccgaaaggacagggatatgacaaagaaaaaccgaaaacacagtgcaggcatcgtgctgcgcgatattttgctggcgctgctgctcgtcgccgtggtcgcggcatccgccattctcgtttaccgccgcttttttgagagcggaccggccacaccggacgagaagcagaacattgccaagaatcactatgacgccgattcgttttatgaggagaacggcatgctgcgctatgcaaaaagcgcacatctgaccggcgtggacgtttcggagcatcaggagaagatcgactgggctgccgtccgtgcagcgggcgtggattttgccattctccgcattggctaccgcggctataccgagggctcgctccgtgaggacagctggtttgccgagaactatacggccgcacgggctgcgggcgtgcagatcggcgtgtatttcttctcgcaggccacgacgctcgaggaggcccgcgaggaggccgattacacgctggagctgcttgacggccgcacgctggagcttcccgtgttctatgactgggagacggtcgcaggctccacgcgcatcccctcgccggatggcctgccgctgacgcagtgcgcagctgccttctgccagacggtggaggccgccgggtatacggcgggcgtttacttcaaccagacgtatggatatacatactttgatctgggctatttgcaggactatgttctctggcttgcggagtacggcacgacaccggaatttctttatcacttcgactgcctgcaatattccagcaccggggtggtcgatggcattaccggcgacgtggatctcaatctgtttctgatgccggagaaggcaaaaatgacggactgattctgaaaaatgcagcgcgggccgcttcgcaattcgaagcggcccgcgctgtttgcatatatttcgacggtgcttcctggcgcacaacatattaacagtagcatatggaaggaaaaatgtcaatagagaacggaaataaatgaacaaattgagaacgatttgtgaatgccgttgcttttttgacatgcaaaattgcaaaaatatggaattgttgcgggattgacagatgcaggcgcggagagtaaactatttgcatatttattctctctgcgcggagaacccggcaagggaataaaaattacaaggaggaaagatatgaaaacgttggcgaaaaagctgatggcgcttgtcctttgcctggcaatggcgctcggccttctcggtgtgacctctgccggtgcagtacagagcgctccgaaggcggaggagtcggccagcaaggtcatctatgccacggacagcaagaccacctacgtcccggcgggctatacctatgtataccagtccaccgatggacggatctacacgcgcaaggcaacgcaggatacctatatttccggccgcaccctcagcgcaacggaggctaaggcgctggcatcgctgtcctatggcgcggaaagcaccatcacgacagacgacggtcagacactggtctgccgcgaatatgacgcgaaggaagcggcggcctattccgatgccgtgaaggcgatcctgagcggcgaggattacagcgacggcgacaaggtcactgttgtgagcgaggcccacgagaagaatgacaaggtcaaggtcattatctcgctcgaggccccggccgtctgtgagatggacggcatgtccgttgagctgggcaagggcctcggcaaggcagagctggccgccgtgcagagcgtgaagaacggccagtcctccgtcctttccgccgcaaagaagaagctgggccacagcattgaggtcacgggccagttctcccttgtgacgaacgccattgcggcgacggtctcctacagcgatatgaagaccctcagcaagctgcccggcgtcaagaaggtcttcctctctccgtgctattccgtgccggagatcaacgccgtggagacggatgcctccgagatcagcacgaacatgaagttcgcggccgccggtatgggcgcgaacgccgcatgggacgcgggctatgacggcaccggcatgagcgtcgccgtcatcgacaccggcctgtgcttcgagaacccgacgttctccaaggaacccatcgatccggacgccgttgcctacagcaaggatgacatcgcggccatcctcgacagcaagaccctgcatgccgaagagctggataagtccacggcgcttgacaccatttattacagcagcaaggtcccgtttggcttcaactatgccgacggcgaggccaacttcggctccgatgacgacactatgatgggccacggcacacacgttgccggtatcattgcgggcaacctgaccgaagcggatcaggagcagttcaatatgacgtccctcggcatcgcgccggaggcacagcttgtcatcatgaaggtctttgaccagggcggcaactgctatttcgattatctcatcgctgccattgaagacgccatcaccctcggcgtcgactgtgcgaacctctccctcggcctttccagcggcccgtattactacgagggcgtgaccgaggtctatgacgccgccaccgcagcgggtatcagcgtctgcgtctccgccggcaacgatggctttaccggcaccgagagcctctggggcgatgagcagatcaagtccacgagcgtctccagcggcacgctgggcatgcccggcacgttcgactccgtcctgaccgtcgccagcgccgaaaacgaaggcgtgaagtggctcaacgataccggcgttctcggctggtacaacaagggcatggggtctgaccagtacatgtccgtgagtgagatcgaaaatgtccccgagggcaagggcttctatgagaacctgcgtccgacggaagacctcgtaggcggcacctatggctacaccgagtctatcaagaattccaacggccagatcgtctacgtcccgtttgagggcggcaacggcgactccattattgcggcggcaaaggccgcaggcgcagccggcgtcgtgttctacgacccgactcccaccgaggaagaaaagtgggactatgtggatgttgagctgaccagctttgatgtccccgctgcccgcgcgaacctgaccgagttcgaatggatgaaggtcaacaatgacaccggcaccgtctctgtaaaggccgactggaaccgcagcaactttgcgggcgagatgtcctcgttctcgtcctggggcccgacggaaggcctctccctgaagccggagatcaccggcatcggcggtaacgtcttctccgcatactatggcgagtatttcgccgttgcctccggcacctcaatgtcttctccggccgtcgccgcctctatggcgctgctgcggcagtatctgaagacgacctccatcccggaagaggactatgccaaggtcgctaactgcctgcttatgagcacggcaacgccgatcgtcgatgaagcaaacggcacctattacttcgtccgccgtcagggtgcaggccttgccaacatcggcaacgccgtgaagtccggtgcttacatcaccgtcgagggcaccgacaaggcaaagcttgagctgggcgacgatgccgagaagaccggcaagtacgagatgaagttcagcgtcgtcaacttctccaaggaagccaagacctatgcgctcagcctgcagggcctcggccaggctgcagagggcggcctcgtcaagggcggcaaggtcacctatctcacgcagaactatgcaaagaagctcgacgcgacctataccaccagcctgaacggcaacgagctgacggttcccgccggtgcgactgcacaggtcaccgtgaccctgcagctgaccgacgcgcagaaggcctactatgacgagcgcttcccgaacggcgcatatgtcgagggctttgtccagctcacgagcaaggacgccgtcaccctgtccgtcccgttcctcgcgttctacggcgacttcggcgcggctcccgttgccgagaccggcagctacgcgaccattctgggcggtgcgcgctcctacaacacggccgatcaggtcaccagcggtatctacagctaccgccccatcagcgacagtgatgctctttcctggatgaccgagaagtcctggctgggcgatacggccgcccccggcatgtccatgctcccgatggacgagttcaatttctccacgatgttcgcggcctataagggctttgtgccggagacggcgggcatctctccgaacggcgacaattcgctcgatgcgttctacatgcagatcggcctgctgcgcaacgtcgataacatccactacaccgtcacgaacctgacgacgggcgaggtcctgtccgagcaggataccgaattcctgcagaagagctacgcgggcggcgtttacgccggcagcgaggccggagacttcgacatgagctggttctacgccaagggcgtggacgaggacggcgaggaatatattgattattccaagtgcagccagccggagaactccctcatctccgtcaaggcggagatcactccggagtgcaagaccgccaagacccagacgctcgagtatacgttctatatcgatacgaccggcccgaacagcaagaagccgacgttcagctacaagacggaagactggggctggggcccggagtccatgtacacgatctccgtggaatcggacgaggcctggtatcaggactacgacatgagcatcaccatcgaatatgatgaagagaccggcgagttctttgcttccgccttcacctccacctatttcccgaccgcgcagccgaacggcgagggcgtccacggcatgagcgaatccggcagcatgatgtacaccgactcgcgtaccgatatcttcctcggctatgactacgcaggcaactgctccgcctataccattaccggttcgcagctcgatgacaacatcagcctctctgcggaaacggactcgatctacattggcgaggaagtgaccatccagaataccgatgtcgacgactatgccatgctcctgaactgggaggtctccgatcccgagatcgccgagatcgtctccagtgacaacagcagcgtgaccatcaagggcctgaagcgcggcgacgtggctgtgaccgcctccgtcggcgacttcaaaaagtccgtcacgatccacgtcctggacaagaactatgaggatctgaagggcaagttccaggatatctccggccactgggccgaggagaccatccttgaggctgtctaccgcggcctgttcaacggcgtgagcagcgacctgttcgatccggacagtgccatcacccgcgccatgttcgtcacagtgctctaccgtatggagggtcagcccgcagtcgaccagaaggcaggcttcacggatgtggcagagggcagctactacgccgccgccgtggattgggccgcaaagaacggcatcgtcaacggcgtctccgagacgtccttcgatccggatgccgccatcacccgtgagcagatggcagcgatcctgtatcgctacgccgcctattgggagcttgacgtgagcgcagaggccgacctcagtgcctatgcggatgcttcctccgtgagcggctatgcacaggctgccatgcagtgggccgtggcaaacggcgtgatcaacggcacgtccgccacgacgctcgagcccgccggtacggcgacccgcgcgcaggccgcgacggttctggttcgctttcagaacagtatgaagagctgacgtttcaaaaccgacgctttcctttccttggcgcccccctttcgcttcggcgggaggggggcgttgaccgtttgacaggcggctgcatttatggtacaatcccggcggaaggtgagattatgcgtgtgatttcccgcccggccgcaggggatgcgatccggcgcctgcttctggcgtggctgctgaccggagccatacaatatacctgtctgcccgcgcccgaacgggtgctgagcggcttttccgccctgacggggcagtcgttcccgctgctgctcgtggggacggcggcctcctttgccctgcttacgctggcgggccttcgctggcgcacggcgcactgggagcgcgcggccctgctgctgtgcttcggctggcagctcgtgctgggcctgtgcgcctcgtggtccgtgccgctgctgtgcgccgggcttgtcgtgctggcccttctgctcgtctacgccgcctatggcgcgcggatggacggagagagcctgacagctgcgccggcgtgcaccggccgccgcgcgggacttgtgatcgccgcggccgccgcagccgtgtttcttgtggccgtgctggcgctgacggtgttccgcgtgctgagctatgccgcaccgacctatgatttcggcattttctcccagatgtttcacagtatgcgcacgacgggcctgcccgtgacgacctgcgagcgcgaccgcgtgctgtcgcactttgccgtgcatgtttcgccgatctactatctgttcctgccgttttacgccctgttcccgtcgcccgtgacgctcgaggtgctgcaggccctgctgctggcctcggcggtcatcccgctctggcgcattgcgcggcggcacggtctgtccggcgtgacggccggtctgctgtgcgccctgctgctgctctggcctgcctatgcgggcggcacgagctatgacgtgcatgaaaacaaattcctcacgccgctgctgctgtggctgttcgacttcctcgaccgccgctgcgtgtggggcgttgccctgttctccgtgctgacctgcatggtcaaggaggacgcgcccgtctatgtcgcggtcattgcgctgtgggtggtcctgcgggctctgacccgcaccggggcggagcggcgctggggcctgctcacgggcggtgcgatgctcgtcggcgcagtgggctatttcctcggcgtgacggcctggctcgctgccgacggcgacggcgttatgtcctatcgctacagcaatttcctctatgacggctcggattcgctgttcacggtcatcaaggctgtgctgctctcgccggtgcggacgctccgggagtgcttcgagggcgagaagatcgcgttcttcttcctgacgatggggccgctgctgttcctgccgctgtgcacgcggcgctatgagcggctcgtgctgctcatcccgttcctgcttgtgaacctgatgtcggattatacctatcagcacagcatcttcttccagtacacctacggctctgcggcctgcctgttctacctgacggccgtgaatctggcggagctgccgcgcgtctggaaccgcccggcgctggcggctacggcggccctgctggcgggcgtgtgcttctgcgggaacatcctgccgctctccgagaattatgtcaaccgctatttcgactaccgcgcggtctggcaggagacggacgccgtgctggaccgcatcccggacgatgcgagcgtcacggccacgacgttccttgtggtgccgctgtcgcggcgcgccgtgctctatgacctgcgctactgctcgcaggagcacctgctcagcacggactatgtcgttgtggaaacgacggacagcggcagcctgaagccctatgccgtggatggggaggacgggctggagggcctgacggccctgttgcgcgctgcgggctatgcgcagctgccggataccggaagccgcctgcagctctggaaaaggccgtagaggccggaatatgcagcagatcgacctgtggaaccgttttgatgcggaacaccacaggtcgatttttggtacatttgccgtcttgtaaaattgggggggactgatatactggaagcgtaagaaaggactttacaggccggacaggaggcggcacagaatgaaacagagtggaagaaggatcgcggcggtcgtgctggcgctggtgctggctgccgccgggatggcgggctgcaggatcagccggacgcgagccatgacggacagggaacgcatggcctgcgaggcctacaccatttcgttcccggaggatgtcctcggggataagacccttgcggagaccatcctgtcgctctgcacggcgcaggaggagaccgagcatgggaccgtctatgacggaacggccctgcagccgtatctctatcagtgcagcgaggtcacggaggtcgtttccagcatggaccggccgatgcatctgaatgtgagctacaaaacgcaggacgacatcgaggcttcgctcgagatcgactatgacgtgatcgtgctgcgctcggtctattatccggaggaggatgcatatgcgctcgagcagatgggagaggcaacgtggacgacgcacttccggtatggaagctaggagggcggaatggaagagtctgaactcagaaatactgtcccggaatttgacccaaagccctgcccgctctgcggcaggaccatgcggcgcgggctgattcaaagcggcggtgtcctgtatttcaccgatgaggagaagtactggatcaactggccgctgaagtcccgcggggacatcccgctgctgggcggaaagctctttccgaccttcccggatgacggcgcgacgaagctcgcccagatctgcacggactgcgagattgttctcttctactacggcaagaagtgggacgaccggcgctggaacagataaaaactgccgggaaagcccttagggctttcccggcacagcttgtcaaaagtcccttcgggcttttttcgccaagcggacctccaccggctgtgcggtggaggccatttttttgcgcatcaggtgttgaagaagtagaagccctccgtcggggtggggatggtgccgtccacaatgccgttcacggcgtagacgaagaggatgatatagagaatcagccacagcaccgagacgatcagcccgatgatggacatgatgcggcccttgcggttgcgcggcaggtcaaagcccgcgcggcggcgcgagagggacgcgaacacgagtccggcgatgccgaactggatgccgacgaaaagcgtgacgagggaacagatgccgcagacgaaggcgacgatggaaaacgcctttgcggttccgggaaccgggcgctgcggctcgggggcggcagggatgacgtcctgctgcggatcataattctgcatgagggggatctcctttctgatcgttgggttcggggtgggtatcgagccactgccgccagccgtccagatcgtccggctccggcgtggtatcttctgcgttttcgggcgtttcggcttctgccggggcctccggcaggctatccggcagcagggcgaattccgtcacgggcggcacgtccgcctcgccgccgaacagcgggcggcggcgcaggagcagcgccagcagcacgaacaggccgaggctcacgccggagatgatcgcgccggtcttcaggccgggcgcggtgtagcgcagctcgacggtgtgctgcccggccgtcagcgggaaggctatgacggcgtccgtcagccggacgctctcggacgaggcgctggccgtctgcgccagcgggacctcaacgccgtccacataggcgcgccagccgttctcgtagggaatggacgtgtagaacaggccgtcctctgcggcgtccaccgtgccggacaggcgcgtgtccgtgtcctccgtcacgttccagacgctccgggacaggcgggaaagtcccgcgtcgaacacggcgtcattctgctcggccacgtccagcgagatcgtgccctccttaccctcggcgacggggtaggtcagggtgacggtgtcgcccgcctcgaagcagccgaggctgaacaggcagcgaaccttgatattgcgcgtgaacagccgttcaccgttgcggtagacggtcaggtcgtagttgccggacgacttcgtcgtggcgacgagcaggccgtcctgcggcacgacgtaggagatgctcagctcgctctgcccgtcggcgtcctgcgtggaatagctgtactgcgtgccgctcgtgccgctggcgcgcagatcgcaggcctccggcgcttcgagcgtgtcatatttcaggtgggtatagagcgcgtcgtccagccccgtggccatgcggaacatttcctcctgctccttgatggggttatagacgttctgctctgccacaaagctgcccagcgcagggtccgccacaaagccgaggccgagataggcgcggctgcgcagcagcaggacattgccggactgcgcggcgacggtcgtgtaggacgtgtcgcgctgctggccgtcgcggtcaatgaggtattcgaggccgcacatcaggttcgtgaacgggctgctctcataatagaggtagcggttgcttgcgggccacgaggccagaccgagcgaacggctgaagcggttgaagcggacgtttgccgacgaggtgaagatggaaataccacggtagccgttgagcgcggcgtcattgagcgtctggtaggacgtgacctccacgcggccgctgccctcgggcacggcctgcaggacggcctgcacatcctcagactcgcgcggataggacgagcgggacgtgagcgagacctttgccacgcccatggcgatgctgcagaccatttccgccccgatgacggcaaacagcagcaccatgctgaggagctgccgcctgcgcaccgggcgatacagcacgagcgcaaggcatacaatggccagcgccagcgcgctcaggagcatccggcgcatgctgccctccagccccaatccgcacaggatgatgccgagacatacgggaaggatgacgaacagatatcgcttgcggaagcagtccagcagtgtccacgcccggtaggccatgacgatgagcacgaagctgaacaggaagctgaagcgataggggagcatattggggaaatgcccgccgtgccagtaataatccagcgtgcggaacaggaagctcagcaggaagaaggcgagaaggccgacgctcaggagcttttcccgcaggcggacctttttacagcacaggaagaatacggccagcgccacggcggcaaagccgcagtagacgttcggcaggccctccatttttgtcggctccgtcgaggtgagcagattggccagcacgcggcgcgcgccgtaggcgaggccgggcagcgtctgctccttcagcaggtccagcgtgctctggccctccgcggccttgccggaggcgtcctctgcgatgttcagcgccagcagctccggcgcttcgtttccggcggagtgggtgttctgcaggccgtagagcgtcggcagcagcagaacggctgccatgccgacgccgagcagcgtgcacagcgcgatgcggcagaagcggcggaaaaagcgcttccagccgtcccagcggcagatgcaccagacaaaaaagctcagcccgacaaagatgcagcagaaaaacgaaagatagtagttgcacagcagcgagagtgccagcgccagcgtatacaggcggaagcggccctcgcgcagcaggctgaccatgcccgccagcatcagcggcaggagggccagcgcatcgagccagatgatgttccaatagtagcccgccacaaaggagcacagggcgtacatcatggaaaacggcacgagcgcaggctcgttccggcggaacgccgtccgcaggaagacggcgaagaacagaccggccagtccgatcttcgtcagaacgagcagcgcgaagaattcccgcagcagcgacgccgggaccagcacggacagcaggtacaggggactggagagatagtaggcatacagcggcaggtagccgatgcccatgcctgcctcgcgcaggtactgcagcgaaccgccggaacggagcttttcccggaacgagacgaagaagggataatattgatgccacatgtcgtgcgccagcacctgccggtcgccgaacggccaaaggccgccaagtatgaagcacagcagcatcacgccgaatggcacgaagaacgacaggacgagatagcggcgcttccgccgcgtgcggtcaattttctgcatgggagggcctcctttgcgccatgcggcggagaagttggggaatagttgcctcgaagctcacgccgtaccagcgggcgtccggttcgcgccgggtctcggcgatggtgtccgcaacgtaggcggaggccagctccatggcatcgtgcacgctccagccgagcgtcagcgcgcctgcgcaggtgctggcgaacaggtcgcccgtgccgtagaacacggcgggaacatatggtgcgctgcactgcgacaccgcgcccgcggcatccatgcacgccacgccgacgcggcccggctccgtccggacgccggtcaggatggccgtgcgcgctccgagcgcgagcagccgctccaggagcgtgcggatgtagctgtcgtcatgcgtctcacggtattccagcccggtcagcaggcaggcctccgtgatgttcggcgtgatgaggtcagcctgcgcgcagagcgtgcggagcacggcggggaagtccggctccagcccggcatacagcgcgccgtggtcggccatgacagggtccacgagccgcatggcggggaagcgcgtgaagaagtcgagcgcctgatccacctgagccctgccgccgagatagccggtgtagatcatgtcgaactgcaggccgagctgctgccagtggtccgcgaccggcgtgagcgagagcggctcatagcggaagccctcgaaggcggtgtgcgccgagaggacggccgtcggcagcacggcgcattccagccccatggcggagagcaccggcagcgcaacggtcagcgagcattttccgatgcaggacaggtcctgcatggtgacgattcgtttcataatcatgactccagagcgtaagttcatattcattataacgcgcttttgccggaaaggaaagccctgctgcgaaaaaaggcattccggcccgttaaaaagttttttggaaaatattgtggttaggacttgaaataaccacaagatatagtataataggggtgcgtgaacgacgaccggatgctgcactgcctcaaaaaaatgcgcagcaggaaacggctgggatcgttctgaaaggatcgagaattcggagtaacacagagaaacgggcaaagcccagggagagaataccatgaagatcatcaagagaaacggagcggaagagacgttccgcatcgaaaaaatcatcgtggccatcacaaaggccaacaatgcggccgaggaggccgagcgcctgacgccgctgcagatcgaccgcatcgcgcaggccgtcgagatccgctgcgaggaaatgaaccgcagcctgtccgtcgaggagatccaggatctcgtcgaggaccagatcatggcgcacggggccttcgaggtcgccaagcgctatatcacctatcgctatacccgcagccttgtccgccagtccaacacgacggacgaccgcatcctgtccctcatcgagtgcaacaacgaggaggtcaagcaggagaacgccaacaaaaatccgaccatcaacgccgtgcagcgcgactatatggcgggcgaggtctcgaaggacatcacgcgccgcatcctgctgccgcgcgacatcgtcgaggcgcatgaggccggtatcatccacttccacgatgcggattactatgcccagcatatgcacaactgcgacctcgtcaatctcgaggacatgctgcagaacggcacggtcatctccggcacgctcatcgaaaagccgcattccttctctacggcctgcaacatcgccacgcagatcatcgcgcagatcgcctcgaaccagtatggcggccagtccatctctctgacgcatctggccccgttcgtggacgtcagccgccggaagatccgcgagagtgtggtgcgcgagatccgtgagctcggggccgaggccgcggaggagcgtatttccaagatcgtcgaggagcgcctgcgcgaggagatcaagcgcggcgtgcagaccatccagtatcaggtcgtcacgctcatgacaacgaatggccaggcaccgttcatcacggtgttcatgtacctcggcgaggcgcgcaatccgcaggagaagcacgatcttgccatcatcatcgaggagacgctccgtcagcgctatcagggcgtgaagaatgagaagggcgtgtggatcaccccggccttcccgaagctcatctatgtgctcgaggaggacaacatccacgaggattcgaagtatttctacctgacgcggctggctgcggagtgcacggcgcgccgcatggtgccggactatatctccgagaagaaaatgcgcgagctcaagctctcaaagggcgagacgccgggcaacggcgatgtctacacctgcatgggctgccgcagcttcctgacgccggattcctccggcaacggctgggacaacgtggccaatgccgggaactatgagccgggcaagccgaagtattacggccgcttcaaccagggcgtcgtgacgctgaaccttgtcgatgtggcgctgtcctccggcaaggaaatggacaagttctggaagatttttgacgagcgtctggatctgtgctaccgcgcgctgatgtgccgtcacgagcgcctgaagggcacgctgtccgacgcagcccccatcctgtggcagtatggcgcgctggcgcgcctgccgaagggcgagcccattgacaagctcctctacaacggctattcgaccatctcgctcggctatgcgggcctgtatgagtgcgtgaagtatatgacgggcaagtcccacaccgatccctcggcgacgccgtttgcgctggatgttatgcgctatctgaacgcggcctgcgccaagtggcgcgcggagacgcacatcgacttcagcctctacggcacgccgctggaatccacgacctacaaatttgccaagtgcctgcagaagcgctttggcatcgtccccggcgtgacggacaagagctatatcacgaactcctatcacatccatgtgacggagaagatcaacgccttcgacaagctggcctttgagtcgcagttccaggccctttcgcccggcggcgccatcagctatgtcgaggtgccggatatgcagaacaacatcgatgccgtgctcgaggtcatgaagttcatctacgacaacatcatgtatgccgagctgaacacaaagtccgattattgccaggtctgcggctatgacggcgagatcgaggtgctggaggacgcggacggcaagctcgtctggacctgcccgaactgcggcaacaccgatcagagcaagatgaatgtcgcccgccgcacctgcggctacatcggcacgcagttctggaatcagggcagaacgcaggagatcaaggaacgcgtgctgcacctgtaagacgtgcttctgtgcccaaagttccaatattccaggtggggctgctgttaacggcagccccaccgcagtctgtcgaaaaaccttcccagctgaaggcaaaggaaatcgtcagagtttcctcagtttgtataaagagcctcgcagagtttgcgctcgcaagcgcaaagaaaataggaatcattttctccggcggcgtgtacgtcggagaaaataccgctcggctcgcaaacgtgcgaagggtgtgcccttcgtgcgctgccgcgagccgcagccttttcaaacgagagcccagtgaaacgggtctcgtttgagagcgtgtcgaaaaggctttttcgacacgctcgggtagggctgctgttaacggcagccccaccgatatttcgggaggaaaaaccatgttcggcgatctgcatatccatatgatcctcgacggcgtgtattatcgcgctgccatcgacgcgcagaaggagcatccgcttgacggcctcgtccgcgcgcggctgtctgattatcaggcgcgcggggtctgcctcctgcgcgacggcggggacgcctggggcgtcagcctgcgggcgcgggagctggcgggggaatacggcatcgattaccgcagtccagcctttcccatctaccgccgcgggcactatggggccttcatcggccgcggcttcgacacggaggacgaataccgcgccctgctggacgaggcaggggagaagcgggcggacttcatcaagctcatgatctccggcctcatcgattttgcccacttcggcgtcctgacggagccgggcccggagccgcaggacatccgccggatgatcgagctggcccatgcggctggatttgccgttatggcgcatgcgaacggcgaccgcgccgttacagcggccctgcaggcgagggtggactccatcgagcacggggcctacctctctgagagcgtactgctccgtatggcgcagcagcgcacgctgtgggtgccgacgctctcgaccatcggaaacctgatcggcagcgggcgctatcccgacgccgtgctgaagcgcctgctcgcccagcagcaggaggccgtccgctttgtcgccgcgcacggcggccgcatcggcctcggcagcgatgccggggcgtggcatgtgatgcacggacaggccattccggacgagctcggttatctcactgcagcgctcggcccgcgcacggagccgcttctgctggaggccgaagcgtacgcttctgttacattctgccgaaagtgaccgttgatttgccaaaatttctccgatataataattaaggaacctctgaataaatcgactgcggcgctcagcgggtctttcgccccaacttatcggtttgaaaatcttgaaatattgcgcagccgttggcggctttgccgccttacggatgcggcatgccccttgcgggtacacaaagtattcctgcaattttcaaacctcaatttggaacaaaatccctcgctgaccgctcttgcaatttaatcagaggttccttaaaaatgccaaaaggagagagaacggtatgcaatacgtgctttttaatccgcaggccggaaacggcagcggtgcgcagcaggcacgcgctctggacgcgcgcttcccggaggagacgttttcctataccgatatgacaacgatcagcgactatgcggcctggctcggcacgctcccggcggatgcgtcccttatcatcgcgggcggcgacggcacgctgaaccgctttctcaacgacacgaacggcatggccctcccggagaagctctattatttcgccaccggcagcggaaacgacttcctgcatgaccttggcctcgagaagggcgcggacccggtccccgtggcgcagcatctgcgcgatctgcccacggtcacggtgaacggaaagcactggcgcttcctcaacggcatcggctacggcattgacggctactgctgcgaggtcggcgacgctctgcgcggcaagtccgacaagcccgtgaattatacggccatcgccatcaagggcctgctgtttcacttccacccggctaacgccgaggtcacggtcgatggcaagacgaagcgctatcgccgcgtctggctcgcgccgacgatgaacggccgcttttacggcggcggcatgatggtcacgccggaccagcatcgcggcaatgctcagggcaaggtcagcgtgtgcgtcatgcacggcagcggcaagatcaagacattggcggtattcccgtccattttcaagggcggccatgtgaagcacacggaaatggtcgagatcctgacaggccatgacatcgaggtgcgctttgaccgtccctgtgcgctgcagatcgacggcgagaccatccggaatgtgacttcctacagcgtccacgcgggcgtccctgcgcgggtctgacagaaaaaaacggccggagtatgtattcctccagccgacggtgtgtccaaaaagcctcgcagagttcgccgcccgcaggcggcgaatcaaatcggatcattttctccggcggcgtgtacgtcggagaaaatactgcgcagtccgccagtgtgcggatcgtccggcaaaggcggacgatcgtgcgcgcagcggactgtagtccttttgtttggaaagcccaaagggctctttccaaacagttaattggccggagcgctcagcgctccggccgttttatgtgggttttactgcttcgtgaagaccatggggaacagatcgcccagcatctcgctgagagactgcaggtccatcgcgtcgcccgtgacggacgtgaaggtcagcttgccgccctcgagcgtgtaggaaacatagtcctcttcggagaagtcggcttcctgctcctcaaaatagagcttgccgtcagctgccttgtagacgccggactcctcgtcctcttccagagagctcagcagggactcttcgtcgagctggctgatctgttcggcgacatagtccgaaacgctggagccggtgctctgctcgaaggccgcgtcgaagtcctcgcgggacagtccggattcctcggcggtcttgtagagcgccgcctcaatggcggagccgcagccctgcagataggtgtgcagcgcggtaacggtggcttccttgtcggcctgcatggaataggtgccgtcttcgcccagcgtcagagtgtagggaacgggcagggtcaggtcggccagatcctcttcggcaaggccgagctgggtcatggcggagttcagggcaggggccagatcgagatcgatcttgtaggtaccgggcaggtcggacttgccgccgccgcagccggcgagcgcaaggacaagggccagcgccagcaggcacagtgcgagagactttacatgtttcatgattttcttcctttcttctttgcaaagaatgcaagttgattatagcataacaggatgtgggtgtcaatccatcgggcggccgtttagaacggtttctgccagccggtcgccctcgtagcggagcttcagcgaaaaaaacggcgcatgctcccgcataaggcgcaggaaaatgcggtccccctcccactgcggcagggcggcgaactgtgtctccgggatccacgccagctcgccctcgtcgcagtcccgcaggctcccgcggcaggccgaggcgtggaacaggtgcatgtattcgccctcccagcagtcgctgacgaaggtcacgatgccgcagtagcggtactccgtcagctccagccccgtttcctcgcggaattcgcggcggacgcagtcgtccgggctttcgttttcttcaaattttccgccgatgccgatccacttgtcgtgattcggatcgtttttctttttgttgcggtgcagcaggagccaactcccgtcctgctccagatagcaaagcgtggtattcttcatagcgatctcccgaaaaaagcccctgcaatcgcatgacggttgcaggggccggttttattctgcggcgctgggattggtggcggggttcacgatgactttcacggcgttgtgcaggttctctgcgacgcagtgcgcctgtcccttggcctgctcgccgtcgagcgtccaatccatgtcggcgggggcgtcgatctccagatggctggcgctcgtgaacgtcagcatgggcgtgtggtaatcctgcgtcgtcagggccagcacgcagtcgctcagctccatcaggctctgcggtttgcgcacgagcagcagctcgaacacgccgtcgttcatgtccacgatctccggggagagcgtcagaatgcccgcaacggatgtggagttgctgatggcgccgaagatatagtcgtcctcgagcacggtctcgtggtcgagcagaaagcgcacatggcggctgcggatggacggcagctccttgatgccgccgagcacataggccagatggcccagcgcattttttacgctctgcgacgtggcgtaggatgcgcgggtgaacgcgccgaacgaggcgacataggagaagcagcggccgttgaagctgccgaggtccagtgtgcgcggctcgccctcgacgatgtcgcgcgcggcctgcagcaggttgcgcgacaggtgcatgctgctggcaaagtcgttcgtgctgcctgcggggatgtagccgatgggcgtgtcgcttccggccgcatagacaccggagacgacctcgttgaacgtgccgtcgccgcctgcgcagaccacgcagtcgaattcgcggcagcgggatgctgcgacctgcgttgcgtcgccgcgggcagctgtagtatagaccgtgacgtcgtagccgccgcggttgaaaatgctgacgatctccgccagcgcgcggttcgcacgcttttttcccgagcaggggttcagaatgagcagcagcctcttcatcgcacgatcctcatgcggaaacgcacccagacaaagatgcagcctgcggcgatcacaaggccgatgccgagcagcgcccactgctccttggagcgcggcttgcggatatggaacggcatcacaaagctggcgccagtcagcgccataataacgagcagcgccccatgcaggatcgcggcacgctggaaaatatcgaggaagcagaagaaaaacgggaaaatgagcgcggctgaggtgatgggaaggcccgtgtaggtcttgcggcactcgtccgtctcctgctggcgcagctcctccgtcacgttgaaataggcaaggcgaatgagcccggcgagcacatagagcgccgcgatcagcacggcataccagacagagccgcacacgacgatcgtgatgacggcgggcaggatgccgaaggcaacgatgtcgcacagagagtcaatctgaatgccgaagcccttctgctccgccgtgcggttcttcttcgtgcgggcgacgcggccgtcaaacatatcgcaaaggccgctgaacatcaaacagaggattgccagcagcgggtggcgggcgacggccagcccgatgccggtcacggcagacagcaggctgaggtaggtcagaatgaccgtgtaatcatagaaaccaatcataaataactccttctgccgcaggacggcaccggaaaacggacgtcggatagacgaatcatagtcgtcttgttattatcccacattttcggcgattcgtcaagtcccggtattttccgacagaatgcggcagagcaggacggaaaaggcgtggtcctgcgcgggcttccgggcagccgtacggtgcaggcggacaccgccgcggcgcaggcgggcggactcggcgcgaacggtgagcagagcgtcgatattgtcctttgtgtaggcatggcccgccggatgcagggcctgcgcgctgcgcgcaaggcacagggcggcaaggccgtagtcctgcgtgatcacaacgtcgccggggcgcaggtgcgacagcagcagatagtccgtgctgtcgtgcccgcagtccgcaacaaagacctccacgccgggaatggaaaagacatgcgccgtgtcgcagaacagcagacacggcacatggaaggcggcgcattgccgcacggtctcgcggacgacggggcagccgtccgcatcgatcagaacgcgcataggcttcagtggcggggcgtcagcaggccgcgcttgtcgtggatgacattgcgcgggcaggccatggcgcacatgccgcaggagaggcacttatccgcgtagataaaggcgcggttttccgaaacaacgatggctccggccggacaggtgcgctcgcacaggccgcagccgatgcagctcacggcgcagacatcgcggcagcgggcgtccttgttcgagcagaggacgacaatggggttgtcctcgagccgcaggtggatgacgcgctgcgggcaggcctgatagcacgcgccgcagccgatgcagcggctctcgtcgacctcggccacgccgtaggagttcagcgagatcgcgccgaagcggcagacctccatgcacgcaccgcagccggtgcagccgtagaggcaaagatcgtagccctccgggctctggttggcgcggcagccgccgttgcagtggacgcaggcaaccttggacgggaacttctttctgactttcatctcatgcaacctccccgttatttgcgtgcatagggcgtgccggtcagcggcagactggtgcgcggctcgccgtcgagccggtaataggcgtccgcaatggccggtgcggtggggatcgaggtgatctcaccgatgccgatcgcgccgcaggccacgttcaggcccggcttgtcgatgacaatggccttgatctccggcacctgatgggcacggaacaggccgagcgtgccgaagcgcgccgtcgggcggcagttttcgtcgatgggatactgctccgtcagggcatagcccatggacatgacgacgccgccctcgatctggccctcgcaggagagcgggttgatggccttgccgacgtcgtgcgcagctatcattttgcggatgaggccggtcttctcgtcgaggatgcagacctgcgtggcgtagccgtaggcgacgtgggaaaccgggttcggcacgtccgcgccgagcgggtcggtcttcgcgaggtattcgccgtagaattctttcccgatgaggtcgctgagcgactttccggccagcgcctcgtggagctgcaggcaggcgcggcggcaggcctcgccggtcacaagcgtctggcgggagccggacgtgtcgccggagtccggggcaatccaggtgttggaacgctcatagacaatgtcgtcgcgggagaggttcgtgtttgagcagaccatctgcaccagcacggtgccgaggccctgcccgatgcacgaagcgccggaatagatatggaccttggaatcgccctcgacgatgagcttgcagcggccccagtccggcaggccgacgccgaggccggcattcttcatggcgcaggcgatgcccttgatcttggcgttgtcgtattcgtcctttacggcaaggagcgtctccacaaggccggtagagtcatcgacgatctgcccgttcggcagcacaccgccgggacggatagcgttgcggtagcggatctcccacggggagatgccgacaaggtcggcagcgcggttcagcagcgtctccacggcgaagcacgtctgcgtgacgccaaagccgcggaacgcaccggcaggcggattgttcgtatagtaggcatagccgtcgatctcgaagttttcgtaggcatagggaccggcggcgtgcgtgcaggcgcgctcgagcaccgggccgcccagcgaggcgtaggcgccagtgtcagagacgaccttggccttcacaccctggatgataccgttttcgtccacgcccatggtgaagtccatctcgaagggatggcgcttcgggtggatgagcagggactcggcgcgcgtcagcttgcacttgacggcgcggccggtcttgtaggcgatgagcgcggccagcggctggacggtcatgtcctccttgccgccgaagccgccgccgacgagggcattctgaattttgaccttctcgggcggcaggccgagggccatcgtgacctcgtgcagcgtggtgtgggcgctctggtccgtcgtgtagaggcggatgccgtctccgtccggcacggccacggcgcattccggctcaaggaaggcgtgctccgtgaacggggtggagaagtgatcctgcacgacaaatttcgagtgggcaatggcctcctcggcattgccgcgggaaacgtgcttatgcgtcagcaggttgcccttgcggtggacgagcggcgcatagggcgcggcggcctcctcggggttgtgcacggcgggcaaaatctcatattccaccttgacgagctttttggccttttccagaatctccggcgtctcggctgcgacaagggccagcgcgtcgccgaggaagtggacgacaccgccgacggggaccatgacgtcccagtcgtggacgatgtgtccgatgatgttctcgcccggcacatccgctgcggtcagcacgcagataacgccgggcagcgcggccgccttggacgtgtcgatggacagcacgcgggcgcgcggatatttgctgcgcacggcggagccgtagcacattttttcggggtagtaatcgtcggggtatttgccggtgccgaggaccttctcctcgacgtccagacgctggacgcgggagccgatcttccagtccgtcgtggcgggcagggggatcttcttttcgcgcaggatcttcccggccagacggatggcctcgacgatcttgacatagccggtgcagcggcagtagttgttgcggatggcccagcggatctgctcctccgtcgggtccggcgtgcggtcgagtagggccttggcgcacagcaccataccggggatgcagaagccgcactgcacggcgccagcctcgccgaaggcgaaggtgtaggcagccttttcaaagtcggaaagaccctcgaccgtcaggatgtgcttgccgtcgagccgctcggtgtccggaacgcaggcgcggcagggctcgccattgatgagcacggtgcatgcgccgcaggcgccctcgctgcagccgtcttttacggaggtgagatgcagctcatcgcgcaggtagcgcagcagcttctgctttttggcgacggtaacttcggcaccgtttatgtaaaatgttgccatggaaacaggtcccctttgtaaaataatccggtcgcagccggtggacgggctcgtatcactcagattatactataaatagagaaagcctgcaaggcagagactaactttttttgcgatttttttctgaattttgacttataacaataaaaaactacaaggaaatcgcgatttttctatcgataagctaaaactttttttgtacccggcaaaaaatgcgggaaaggattgaaaatcgggtgtggatttggtacactatctaagaaatgaaaatgcggagtttcggcttttttgcgccgcatgcgccgcatgggtaatatagcagactgtcaaaaaacctgccaagccaaaagtttcggagggaagaaaagtgtgaaaggaaaccgtcagggtgtcctttcgcgttccataacccgccgcagcggcagaattgcaaaatcatgcttcaaaatttattttgcaattccagaagcagcttggcgaaaaagccctggagggacttttttgacaagctgaatataggtaggggaactggtatggaaacgacaaagacatttcaggagctcggtgtcagcgaggagatcctccgtgcgctggaaaagaagggcgtcgcaatgccgacgcgcgtgcaggaggaggccatcccgccgctgctggcgtggcgcgacgtcatcgccaaggcgccgacgggaacgggcaagacgtttgcctttggcatcccgatgatcgagcacatcgatccgcagtccgacgatctgcagggcctgatcctggccccgacgcgcgagctggccatccagatcgccgacgagctgcgcggcttgctcacattttataaggatatccgtgtgacggtcgtctatggcggccagcggcttgagccgcagatccgcagcctgcagcagcatccgcagatcgtcgtggcgacgcccggtcgcctcatggaccactataaccgcaagaacctgcgcctcgaccgcatcaagaccgtcattctcgacgaggcggaccgcatgctggacatgggcttcttcgacgatgtgacaaaaattctcgaccgcatcaagaatcgcacgaacctcggcctgttctccgcgacgatctcgcaggaggtcatgactgtcagctggatgtaccagcgcgacgaggtggagatcaccgtcgccccgacggaggagagtaagcctgatatcgatcagtattccatcacggtcccgcggctggagaaggaagaggctatgctgcgtatcctgcgctccggcgcgcttgagcgcgtgatcgtgttctgcaacacgaaggtcatgtgccagcgcctgagcgacgacctgcgccgcgcgggcatccgcgccgactgcctgcatggcgacatcaagcaggccacgcgcgaaaagaccatggccgatttccgccatggcaagctcccggtcctcatcgcgacggacgttgcctcccgcggcatcgacgtggacgacgtcgacggcgtcatcaactatgacgtccccgaggagaacgaatactatatccaccgcatcggccgcacgggccgcgcccggaaaaagggcatctccttcacgctgctcggctcgttcccggagaaggccaagctggacgagatcgcaaaatttgcgggcttccgcatcgttccgatgatctttgatgaatacggctgtctggtgcccgcacctgcagaggaaaagcacccgacatcccgcaggcgcttctgatgcgcccggcggaggagggcctgctcctgctgtgctgcgcgctcggcacgcaggatgtgccgctgaccccggcgcagtaccgcacgcttgcccggcgcgtccggcagacctgtcaggccggagacggcgaggtgacgcctgcctatcttcgggcgctcggctatccggaggcggccgccctgcagatcacggcgctgctcgaccggacggacacgctgcaccgctatctcgaggccgctgccgcgcagggcatcacggtcctgacgcgcctttcggacggcttcccggcgcgcctgcgccgcatgggcgagactgagtgcccgcccgccctgttctgccgcggcgacacggccctgctcggcacgcgctgcgttgcgctcgtcggctcgcggcagctccggccggataaccgccgctttgctgtgcaggccggaaagctcgctgcggccgagggctttacgcttgtctccggcggggctgccggtgcggacaccgccgcgcaggaggcctgccttgcagcgggcggccgggtgatctgctttgtgccggacagtctgctggatcatcctgcgcggcaaaacgtgctgtattgcagcgcgggcggctatgagctgccgttttccacgccgcgcgccctggcccgcaactgcctcatccatgccatgggcgaaaagactcttgtggcccagtgcgccgagggaacgggcgggacctggtccggttcgcagtggaacctgcgccgcggcatgtcggagctttacgtctttgacgacggatcggcggcaagcgcggcactgcagtcctgcggagcggagaggttgccggatattccggcgtctctcgccctgttacggcccttccaattgtccattttcgatgggaaatcggacgaaaagcggaaaaagtaaattttcagttgattttgacaaagcaatcgtgtataatctccgtacgacaccgaagatcatggatctgacctgacgtatggaggttatttttatgtgtggaattgttggttatgccggttcgaagcaggcagctcccattttgctggacggcctttcccgtctggagtatcgcggctatgattccgctggactgtgtgttttttcggaaggggagctgaagctcgccaagtccaagggccgtctggccgtcctgcgcacaaagacggaaaacggcgcgacgctccccggctatctcggcatcggccatacccgctgggcgacgcacggcgcaccctcggacgagaatgcgcatccgcagctgtccacgaacggcagcatctgcatcgtgcacaacggcatcattgagaatttcctgccgctgaaggagttcttgctgaagcagggcaagacgttccgctccgagacggacacggaggtcatcgccaatctgctggaatactattatgaacaggaaaacgacctgatgaaggccgtccgcctgacactcggccggatcgagggcagctatgcgctcggcatcctctgcgccgaccggccggattccatgatcgccgtcaagaaggacagtccgctgatcttcggcttcggcgagggagagaacttcattgcctcggatgtcccggccatcctgccgtatacgcgcagcgtcgtgtatctcaacgacggcgatatggtcgtgttcacgaagaatgccgcgcagttctatgacgcaaacggtacgcccgtgcgcaaggcccctgagcacatcgagtgggagatgtccgctgcgcagaagggcggctatccgcacttcatgctcaaggaaatttacgaccagcctaaggccctgcgcgatacgatcaatccacggatccgcaacggccgcgtcgtgctggacgatgtgaagctcgatgagggctatctgcgcggcctgcgccgcatctatatggtcgcctgcggctcggcgtcctatgtcggcaatcacgccaagtatatcctcgagcgcacgacgcgcatccaggtcgagccggtgctcgcctcagagttccgctattccgagccggtgctcggcgacgatacgctcgttatcatcatcagccagtccggcgaaacggccgacacactggccgccctgcgtgaggccaacgcccgcggcgcgcggacgcttgccattgtcaacgtggtcggcagcgccatttccaaggcggcgcacgacgtcatctacacctgtgccggccccgagatcgccgttgccacgacgaaggcctattccacacagctggccgtcatctatctgctggccatgtatatcggcgaaaagctcggcacgcttgcgccggagtgctatgccgccatgctcgagggcctgcagcgcctgccggaccaggtggcgcagatccttgtgccggagaatctggcaaagatcgaggaggctgcggaggccttcagccacaaccacgacgtgtttttcatcggccgcaacctcgacagcgcgacctgcctcgagggaagtctgaagctcaaggagatcgcctatgtccattccgaggcctatcctgcaggtgagctgaagcacggccccatctccctcatcgaggaggagacgctcgttgtggcccttgccaccgtcgagaagctctttgataagaccatggccaatgtccgcgaggtcaaggcgcgcggcgcacacgtcctcggcgtgacgacggaggactttgccggggagatcgaaaagtatgtcgaccgcagcctcatcgtgccgaagacgcacccgctgctgcagccgagcctgacggtcatcccgctgcaggcctttgcctactatatcgcactggcccgcggctgcgatgtcgatatgccgcgcaatctggccaagtccgtcacggtcgaataattcaaaattttagatttctgcggaggctgccatatggcggcctccgccttcgtttgcagtctgctgcgcgcacgaactgcccgccaagggcggacaattcgcacactggccgactgagcggtattttctccgacgtacgcgctgccggagaaaatgatctcaccttcttcgccgactgcgggcggcgaacgctgcgaggctttttcctgcattgcggagcggagcagagagaccgctgcttgttattttgcgggatctatggtaaaatatctttatcctatccccaaattctatgaaagtggtgaaactatgttgaactttcgccccatctgcctggaggaccgcgcatggatcgaacccgtgatgcaggctgcggctgggcatggcagcgagttttcctttgtgaatctcttcctgtggggggaccagcgcgtagcgtcggtggacggcacgcccgtgttcctcagcaatttttccgggagcctgacgtacccgtggcccgtgggctgccgggacctgccgggcacgctggagctgctgcggcaggacgcatgtgagcgcggcatcccgctgcgcctgttcggcctgctgcccgaggagcgcgaccggctcgaggcactgtatcccggccgctttcgcttccacagcgtgcgcgacagcgcggactatgtctacgagacggagcagcttgcccagctgcacggcaagaagctgcaggccaagcgtaaccactgcaaccgctttgaggcggcctacccggattatcgcgtcctgccgctgactgcggaccagctgccgcgctgccgcgcctttacggacgagtggtatcgcctgcattttctggagaacgaccccgcggactacgcgttggagcagcgcgccatcgggctggcattcgaccatttcgatgcgctcggcatgacgggtcttgtgctggaggtcgaggacgaggtcgtcgccttcgccatgggcaaccccatccggccggatatgtttgacgtgaactttgaaaaggcccgcgccgatatgaacggcccctatccgatgatcaaccgcgaatttgcccgccggatcgcagagacgccctaccgctttctgaaccgcgaggacgacatgggcctcgagggcctgcgccgcgcgaaggaaagctatatcccggacctcctgctggagaagctgctggcagaggagctgcccgcatgagggcggcgcgacgcgacctgcccgccctgacgcggctgtggcaggcctgcttcggcgataccgaggcggaggtgcgcgcgttctggcaggcgctgttcgactgcacgcccgtctatctgcgccgcgcgccggacggcagccccgctgccatgctgtgcgcgctcccggcggagctggtcggcgacgacggagacgctgtccctgctgcctatctctacgccgtctgcacggccccggccctgcgcgggcgcggcaactgccgcttgctcctgcaggaggcggagcaggacctcaaaaggcagggcatccgcgcggccgtgctcgtcccggcggaggagagcctgtttgggttctatgcccgcttcggctaccggaccgtgttcacctgccggactgagacggtcccggcggcgcgcggcgactgcagcatcacgccgctcacgccggatggctggcagagcctgcgcgagctgcagctctatgacagccatctgtcctatccgccggagttgctgcgctggcaggaaacgatctcccgcagcagcggggctggcctttaccgcatcgagacgggcgatgccgtctgctgcgccgcggcggagcgggacggcgaaacgctgctcgtgcgcgagctgctgccggactgcccggaggccgccgccgcgctggcggacaagctcggatgccgggaggcgtccttccgcacggctggcggcacgcagcccttcggcatggcaaaatcgctcgacggaacgccgctcccgcagcgggcctacctcggcccggcgtttgagtaaggcggaacatgtaccggcccccaaatttgacggtagcggcggtcagtgaccgccatgcagactggcaatatttgctgcaaatgttctgtggcgcgaggccaccggatttgtcattgcgaggaggccggaggccgacgtggcaatctcgggcaggcagttacgatttcgccgattgctttcccgcgatccgggtcctgcgagattgccgcgtcgctttcgctcctcgcaatgacacgtcaggggagtgcggcggtgcaccagtgccctcctgcggttaaatcccccctgactgggcggtcactgaccgccgctacaggctaactttatttttcggcagcctgcacgaactgcgggcgtacagccggtcgggacatgccccgacccgataacatacgaaataaatgacataaaaactggaggaatttatcatgaaacgttggctttctctgatccttgcggcggcgctggccgtctgcgtctttgctgcctgcagcaaggacgacaacacgtccggctcggccggaaagcaccatgtggagatcgaggtgcaggattacggcaccatcgccgtggagctggacggcgacgccgcccccatcacggttgataacttcctgaagctggcaaaagagggcttctatgacggcctgaccttccaccgcatcatcgacggcttcatgatccagggcggcgaccccgagggcaccggcatgggcggctcggatgagacgatcaagggcgaattctctgccaacggtgtggaaaataacctgtcgcatacgcgcggcgcgatctccatggcccgcaacagcgtcagcatggacagcgccagctcgcagttcttcatcgtgcagagcgattcgacctttctggacggccagtatgcctgcttcggctatgtgacgtccggcatggacatcgtcgaccagatctgcaaggacgcgcagccgacggacggcaacggcacgatccccgcagcggagcagccggtcatcacggccgtccgcgtcatcgactgatgggcagacagctcgttctggcggagaagccctccgtcggccgggagctggcgcgcgtgctcggctgcaggcgcggcggcgagggctatctggaaggcgaccgctatgttgtcacctgggcgctcgggcatctggtcacgctggccgacccggacgtctatgagaaaaagtgggagaagtgggacatggccgacctgccgatgctcccgcagcataggaagctcgtcgtcatcccgcagacggcgcggcagttccgcgtggtgcagggcctgatgaagcgcagcgacatcaccggcctcatcatcgccacggatgccgggcgcgagggtgagctcgttgcgcgctggatcatggccaaggcgggctggaacaagcctgcaaagcggctttggatctcgtcccagacagacaaggccatccgcgacggctttgcagatctgcgcccggcggcggactatgaaaatctgttccgctccgcgcaggcgcgcagcgaggccgactggctcgtcggcctgaacgtgacgcgcgccctgacgtgcaaatacaatgcgcagctctcggccgggcgcgtgcagacaccgacgctggcccttatcgccgcgcgggagcaggaaatccgcggctttgtgccgaaggaattctacggcgtccggctgaagctcgcgggcttcacggccgtctggcgcgatgcaaacggaaacagccgtacatttgaccgcgcgctggccgagcggatcgccgaggcctgccgcacagggacctgcaccatccggcaggtacgccggatgcgccgcatgacgccgccgcctgcggcctatgacctgacggagctgcagcgcgatgcaaataaaaaatacgcctattccgcaaaggaaacgctgaatcttatgcaggccctctatgagcagcacaagctgctgacctatccgcgcacggactcgcgctatatctccgacgacgtcgttctgacgctgccagaccgcctgcgtgccgtgatgacaggggactacaagccctttgcgcaggagctgatgcgccgccgcccgctttcgaccagatatctggtgaacaatgccaaggtcacggatcatcacgccatcatccccacggaggaggccccggatctgtggcagctttccgggccggagcggaatatttatgacctcgtcgtgcgccgcttccttgcggtgctgatgccgccgtgtgcctatgaggaggtcgagctgacgctgcgcgccggggaccatgacttcacggccaagggctgcattgtctcggagccgggctggcgcagggtctatgaccgcagcttccggctggatgacgaggaagaggacgagccgcagacgctcccggcgctggagcaggggcagaggctgccgatcctcggcgcgtccgttgcggtgggcaagacgccgcctccaccgcgctatacggaggcgacgctgctgacggccatggagcatccgcaggcgcaggtcacagacaaggccctgcagaagatcctggcggagacaagcggccttggcacgcctgccacgcgcgcggacatcatcgaaaagctgttctctgcattttatatcgagcggcgcggtaaggagctcgtcccgacgtccaagggcatgcagcttgtggagctggccccggaggatctccgctcggctgcgctcacggcacagtgggaggaccgccttgcccggatcgcaaagggacaggagcgcgacgcaaaattcgtcgaggaaatgcgcgcctatgcgtcgcgtctcgttgcggccgtcaaggcgagcgatgcaaaatacacccacgacaaccagacgcgcaagacctgcccggactgcggcaagttcctgctgctcgtcaagggaaagcgcggcgagatgctcgtctgcccggaccgcgagtgcggctatcgcaaaagcgtcacgcaggtgacgaacgcacgctgcccgaactgcttcaagaaaatggagctgcgcggcgagggtgagaatcagatgttcgcctgcgtctgcggctaccgggaaaagctctccgccttccaggagcggcgcaaaagcgccggggcgggcaagcgcgatgtggcaaagtatctgcagcagcagaaggatgacaagcctgtgaacagcggcatggccgacgcactggccaagtggcttgagaaaaatcaaaagtagggcattcttaacaaaaatcacggagctgcacggcgaaattcgtgcggctccgttctgtaccgggaattgacaccggcggggatgtctgctacaataattcccgtgagaatatgggacagcaggagcggtggagtctgtcatagggtcgtggggccctattcctgctggatcggctgtgccgtgcttctgtgcggcacacggatcggacaggactgccgtcctgtctttttttatgccgcggtatgcggcgaaaggggattatcgctatgaggaaaacaaagatcgtctgtaccatcggcccggccagcagtgacccggccgtgtttgccgatatgtgccgcgcgggcatgaatgtggcccgcctgaatttttcgcacggcacccatgccgagcatcaggccaagatcgacatgatcaagcaggtgcgcgaggagcttggcctgccgatcgccatcatgctcgatacgaagggcccggagtatcgcattggcacatttgccgcggggcatatcgagctgcatgacggcgatgcctttacgttcacaacgcgcccggtcgagggcgacgagacgatcgtcagcgtgaattacgccggcctgccgcatgatctggccgtgggcgaccgcgtgctcgtgaacaacggtcttgtgatcttcgaggtgcaggacctcacggagacggacgtgcactgccgcgtcgtcgtgggcggcgagctttccaaccgcaagagcatgagcttcccaaacaaggtcctgcatcagatctatctcagcgagcaggacaaggacgaccttctgttcggcatccgcaacggcgtggattttgtcgcggcctcgtttgtctcgtgcaagcaggacctgctcgatctgcgcggcttcctgcacgccaacggcggcgaggacatcgacatcatcgccaagatcgagaatcgcgcgggcgtggacaacattgaggagatcagtgaggtctgtgacggcatcatggtcgcacgcggcgacctcggtgtggaggtcccgttcacggagctgcctgccattcagaaatacctcatcacgaagtgccgcctgctcggcaagcgcgtcatcacggccacggaaatgcttgaatctatgatccacaatccgcgcccgacgcgtgcggagatctccgatgtggccaacgccgtctatgacggcacgagcgccgtcatgctttccggcgagtcagccgcgggcaagtatccggtggagaccgtgcggaccatggcggagatcgctgaggagacggagcgccacatcgactacgccaagcgcttccgcacgaacgaatttgtcatccacgaccgcgtggacgccatttcccacgcaacgtgcggcatggccatcgacatcggggccaaggtcatcgttgtgacgtctatgtccggcatgacggtccggatggtctcgcgcttccgtgcaccgacggacatcgtcggtatggcgacgaacaagcgcgtgtggtataagctctcgctgtcgtggggcgtgctgccggtgctgagcgagcagttcaactccacggacgtgctgttctatcatgcactgcgcgccgcccgcgacacgatgcacctgcagccgggcgacaatgttgttatgaccggcggcatcacgaacggtaagtccggcaacaccaatcttatcaagatcgaggcggtctgacggccggaagagagcatggatgatcgaaattcacgaaattgatgcggcacatcaggcggatatctgcctgccgagcgagccgttcccactgaccgcgca

SEQ ID NO: 11236 - DNA, 35741 bp, Unknown
  gut microbiota DNA sequence
tagcggcggtcagtgaccgccttgtacagggtaattgaactgtgtaagggtgctgatgtaccacggcacttgcctgaattggcattgcgaggccccggaggggccgcggcaatctcggaaaggcggctacgatatcgccgatggtttccctggtatccaagcgggtactgcgagattgccacgtcggctgcgcctcctcgcaatgacaattcagggaaatgcggcggcgcacctgtgcccttttgcgattgaattgtcctctgctgggcgctcagggaacaccgctgcatgctctagctgccccagatgaaaaaattcggacgcacccgcgcgggtgcgtccgttttcgtcaattattccgatataatctgcgccactcggactccggcaggagctcgagcgcggcattgtgcagacggtaaacgcggctgcacagcgacagcacgctcggccggtgggtgctgaggatgcacgtcttgccgggcagggcggcgatgttctcaagcacgcgctgctccgtctccagatcaagcgccgacgtcacctcgtcgagcagcaggataggagcatcggccagaatggcgcgcgcaatggccagccgctggttctgcccctcggacagcgagccgccgcgttcgcgcagcgggcagtccagcccgccgggcaggctgcggacgaaatcctcggcgcaggcggcgcgcagcgcggcccacagggcctcctccggggcgtccggccgcacaaggcggagcgtctcggccacggtgccggagaagatcacgttgtcctgcggcacataggcaaagcagcagcgcgtggagggggagacgtccagcgcctcgccgccgccggtcagcacggcgctgccgcccgtcgggcggagcaggccaagcagcaggcggaacagcgtcgtcttgccgctgccggacgggccgacgatggcgatcatctcatgcggctgcacctgcagatccagctgcttcagaacgggcgcgcggccctgatacgcgaactccagctcctgcagcgacagcgtcagcggaacgccctcgcggacgagccgctgcgcgcgctccgggtggtcgagccgctcccgcggcagctccagcacggacatgatgcgccgcgcggagacggaggcctcgatggcggaggggaccagatggatgagcgcgctgagcgacgaggagagataggacgccagctgcaggaacagcaccatcgtgccgaagtcgatccggccctgccacaggcggtaagcaccccagccgaggcagaggtagcttacgagcatgccgcacgacgagaggaacgacgaggtcagaatggagaagcgctgaaacgcgatgccggtgtcataataccgctcctgcacgcgatcgagcctctcgcggaaggtatcgacgagatggaatgccttgatggcggggatgttctgcagcgtctcctcctgaaaggccgtcatttcgctgccgacggcgcgcatatcgcggttgaagctgcgcatttttcccacaagcggccgcgacagcagcagcgtcacgggcgcgctcagcagggccagcactgccatggtcgggtcgtagaccagaatgacggccagcgaggccagaaactgcgtcagccgcaggataagggacgggatccagccaagcacgctgcccgccacattcgagacgtccgtgttgatgcggctgagcagatcgccggagtggaactgctgcagggattcccagtccgtgttcaggaacatgccgaagacctcggcgcgcagctcattgccgatgcggaggttgatctttgcactgaaacggctgacaagagcattgagcacgatggtcgagcctgccagcagcacgacggtgacgccgcagaacagcacgcgccgtccgccgccctgcagatagacgatggcgttgatgagctcacgcgaggagagactcgacagcaggctcagcgcaatggaggcgatgccgagcagtacataggccgcgatagagcggcggtagcgcttgctgtggtgcaggacccagcgcgtttcgacccagaggtcgtgcagcgttgcgccctgcaggcggtcgcggagctttcgaatcagagacatgcccgccctcctcagcgccggtcgcctgcgtcggagctgtagtggctatagtggctgtagtggctgctgtagccgtactgatagccgtagcggtagccatagcgatagcccgagcgcgtcgttccggcctgcgtgcagttcagcacgcagccatacagcggcacggcgccggagagcgactggacggagttgacgatctggacggagtttgccatatcctgccgcacgacgtaaatagcgccgtcggcatatttggccagcgctgcagcgtcggacagaacgcctgcaggcggcgtatcgatgaggatgtagtcgagcttctgccgcagcagctccagaatctggcccatgcgcggcgagccgagcaggcgctgcggctgggcgacagtgccgtcgccggagagcagcagcaggccggaatccggaacgggcagcaggcggaagttcttcgccttgccgctgagcacctcgacaaggccgtcggagtgcgcgccaatgccgaacagcggcttgagcgactgcttgcgcaggtcgccgtcgatgaggatgacgcgcttgccctcggcggccagcgccagcgcgaggttcgaggcaacggtcgttttgccctcgccggggacggtgctcgtgatgagaacgacctttgcgccgtgcttcgaggtgatacgctgcagcttcaggctgaggttgcgcatggcctcggagaagtcggagccggtgcccgcatgcgtcagcagaagcgagggagcctcgcggcgggtgcgctttccgcggcgcacagcggggatggaggagaggcaggacagactgatgaggcggtgcaggtcctcggcagagtggacggtgcggcgcgtcagggagagcagcgccacaaggacgaggccgaggaccagcccgacgacgccgcggcggatgccggtctgcagagccgtgttggcgttgatgggcgcagcggacggctcgaccggctggtcaatgacctggatctgcgtgtcgcccagaatggtggtcgccgcagcggggtagacctcgatggcggccagcagcgtgtcatagacggcctgcgggtcgctgcccgttgccgtcagcgtgaacagggcggcatccgccacagagctggccgacaggctgacgggagcacgctgatcgcccagctcctgctggagcagcagctgcatgcgatcgctctgcaggacataggggaacgtggctgagagctgcgcggcggcgttgctgtcaagataggtgctgtggctgaggatatccgtcgaggacgagaagcccgcgctgacggagaacacggcggagctctgatagaccggggcatagctgcgcgcggcgcgcagccagctcacgccgccgagcagcagaccgagcacgatcgggacccagaaaaagtgctgcagggtgcggcggaaattgtgcaggaaaacggaaaggtcaattccttgcgtcgtctgttcttccatgagcaacctcctttccttgcttgctgccgtagccgtaatagccgtattttccgccgtagctgccatagccgtagccgtagccatagccgccgagacggctgccgaagtggaacgactgataattattgagcacgcagccaagcagcgcggcgtgggcggcgttcagatcgtcgatggtgtcgtttacgacggcggcggggacgaggtcctgccggacgacgaggatcgcggcatcggctgcatcggccagcacctcggcatcggcgaagaagctgaagggtggcgtgtcgatgagaatgtaggaatagctctcgcgcagcgcatcgagcagcggacggaatgaatccgggctgagcgcctcgctctggctgcgccgcagcggcgcggcatagagatgggacaggccggtcgcttcatcgcggacaatggccttttccagcgcctcgcggtccgggcggtgcgtgatgagatagccaaggtccgtgccgggggcaggcgaggccgaaaagatcagcgactgcgcaggcttgcgcaggtcggcgtccagcagcagcacacgctgatgcttctgcgccagtgacagggcaagattggctgcgacggtggatttgccctcgttctctgcgcagctcgtgatgaggaagacctgccggccatccttttcatgtgcccgctccacctgcgcgcggagctgatggaccgtttcggtgtaatagaagctgcaggtcgggtccgagatgagcagggcggattttttatttcgcagcagcgcgccgcgcttgcgctcgtggcgcagggtggcgagcagcttcgtatcgagctgatcgcgcgcgccggggacggtctgcaccgtctcctgcgagacggcgagaagcagcaggactgcgatcatggccaacgcgccgatgggtccagccagcctgagcagacggtcgcgcgaggcctgcgcgctgggctgcgacgggagcgtcgggccgttgatggggttcagcacggccgaggcgaggatgaagtccgcataggcttcatagcagtccatcacggccagcgccccgcggaaggcaagctccggcgtcggggcagtgatggtcagaatgaggatgttcgtgttctccggcacatcgacgctgcacgtccccgggaaggcgttcaggcccatttcggcggcagcggcggtgcggacggggttgctctgcagcagctcgccgaactggctcgccacggagtccgtcacggcgatgctgccggaggctgtggcggaggcgctgcggctcgtcacggcgaaggtgacctggctgtcatagctcggcttggacacgagcgtctgcagcaggtagaccgccataacgcagatgagcccggccagaacggtcatccagagattgcgcagcacatggcgcgcaaggcacagcggattgaagttggaccatttggtcgttttctgttctttcatggctgcccccttactccacgacgacggtcagaatgacggagctctccagaccggcgtcgttcgtataggagaagagcacgtcatagctgcccggatgctcgtggtcgatcttcccggagatctcgaccttcgacggatcgacgctcgctccgtgctccgactgcagcacggaggtgatcaggctgcggtaatcctccggtgtctcatctcccgtggcatagacgaggtaatccgaaagcgtgatgacgggatgccgggccgtgcggttgcggatcatcacggtcagggagagcatggacgtgtcgcccgcactgtttgtgacctgcacacggatgcggtagtcgccctcggtgccgacggacaggttcacgagcgtcaggcgcatcttgtccgtgagatcgccgtcaagcacatcctcggccttcagacggtcgagcagagtgacggtgttgccgacgccgtagacgagcggctgcgacagggagaagcgcggcttgtgataatccgtgtagtagatcggccgcgtgaaggtgcagaagttcgaggcgctgtcaaacacggtgtaggtcgcctgcgcgctgttcgcgcccgtgagctgcgagacgcggcggacgatgatgcggtcggtgaggtcgccgtcgcggtcgtccgctgcggtcagaccggcgcagagctcggcgtccgtagcattgacgctgacctccagcggaacgccgtccgagacgatgcggggcgcggtatgatcggccgtcaggcggtcgtgcaggaacacggcgcagaatgcaatggcaacggccagaaacagggcaatcagggtgatctgtaatttcctcatgaaaagcctcctgcgggtcagtcggattgaagcggcggaatggggatcggttcatcgcgcaggatcctgcgaggattgccgtgcaggagcagcgcgatataatcggggtggcatatgggctcgagcaccggcagaagcgaccggaagcccgttgtgcggaagcggtcgtcgtgggcgtcgctcgcgatgagatgcgccagaccgtgcgagagcaggtgcagggcggtgtcctctgcacggctgccgagcagaccgagcaggctgcccttgttcagctgcagcagcatcccgcgggaaaagcaccatgcggcaaggccggggtcgcgctgcacggcgtcatagcgctccggatgggccacaacgggcacaaggccgcgctgcgcgatggcctcgagcgtccgcagcagcacggagccgggcagtccaaagtcaaattctacgagcagataccgtgagccgccgagcgtgatgagctcatgctgctcaatgagcgtgcggatgttcgaggggtccgcaaacacctccgcgccggagtacagccgcagcggaatgttttcctgcgtcagcagctcgcgcaggtcgttcagctgcctgcggtagtccgggccgcggtaattgcggcggaagccgggcaggttgcagtgcggcgtgacggcaatggccgtgacgccgctctcggcggcgtggcgcgccatggaaagcgagatctccgcgtcgggagagccgtcgtccacgccggggagaatatgacaatgcaggtcgatcatggcccgtcctttccgcgtcggggcacagcaggcagactgtgggaccgacagatgatttcttaaatagaatagcatatttctcgggagaattcaactttttcgtttggattctgcggaaaaagcctgcgataaagaaaaaatcatgcttgacatcacggcacttccgtgctaaaatagttccgcaaaacgaagaaggccggcagccccgacctcaccccaagcgaaggcaaaggggtctgatatcgagtttcgctgcgctttgggcgcggtgtgttcggttgcgggtgctgcggcatccgcaattttttgtttggaggtgctttaccatcggcaaattagatcatcagctcaatgaggagatccgggataaggagattcgcctgatcgcagcggacggcaccatgctcggcatcgtctccgcacaggaggcgctggcccaggcagaggagcaggagctcgaccttgtgaagatctcgcccaacgccgttccccccgtgtgcaagatcatggactacggcaagttccgctttgaccagctcaagaaggaaaaggaagcccggaagaatcagcgcgtcgtcgagatcaaggagatccgcatgtccccgggcatcgacacgaacgacctgaatgtgaaaatgcgcaacgcgatgaaattcctgaaggaaggcaaccgcgtgaaggtcacggtgcgcttccgcgggcgtgaaatggcgcataccgacatcggcgagcagcttttgatccggtttggcgagggatgcgccgaagtcgcaaacgtggataaaaaacccaagctcgacggccggttcatgacgctgttcctgtcgccgaagaatgcaaaataatcacaaaggagaagaatcatgccgaaactcaaaacccacagcggtgcgaagaagagattcaatctcaccaagaccggtaaggtcaagagagcgcacgcgttcaagagccatatcctcaccaagaaggacaccaagcgcggccgtcgcctgagaagcacgacctacgcggatgtcaccaatgtcgagagcatcaaaaagatgatcccgtacaaataatcggataggaggattcaaaagatggcaagagtaaaaggcgcgatgatgacgcgcaagagaagaaataagaccctgaagcttgcgaagtcctactggggctccaagtccacccatttcaagatggccaagcaggccgtcaagaagtccggcgtttatgcctacatcggccgtaagcagaagaagagagatttccgccgcctgtggatcgctcgtatctccgccgctgtcaagccctacggcatgaactattcccgcttcatgaacggcctgaagaaggccggcatcgagatgaaccgcaagagcctctccgagctcgcgatcacggatgccgttgcgttcggcgctctcgtcgagactgccaagaaggcccagtaatagcttttccaaaatcactccgctccggcggggtgatttttttcggaaaagcccgccgggcttttccgacgtggagatcgcagtccgctgcgcgcacggatcgtccgccaaaagcggacgccccgcacactggcggactgagcggtatttttccgacgtacacgccgccggaaaaaatgatttcaattgattcgccgcctgcgggcggcgaactctgcgaggctttttgatgcacggaacagactgtcaaaaaatctgctcagccgaaggtttccctgacgaaaaatcccggagggaatttttcgtcaaggtgatttttttgcaatttttattcctgcattttgcatttttgcgcattgtgtgctatactatttctatcagactgtcgaaaacctgccaggacagagggaacttattcggcagtctgtatgtaaaagaacggggggaaaccgtcatgaagaatatcattacgatcagccgtgaattcggcagcggcggccgcagcatcggcaagcaggtcgcagagaagctcggctatgcgttctatgaccgcgagctggtcgatgaggtcgcaaagcgcagcggctttgcgccggagtacatcgaggagcacggcgaatatgccaacgcccgcaacagcctgctgttctatctggccacggccgagcgctacagccacgacaacctctccatgcacgatcagctctatatcacgcagagcaagatcatcgaggagctggcggaaaagggcaagtgcgtcatcgtcggccgctgcgcggactatatcctgcgcgaccggaaggactgtctgcatgtgttcatctgttccgacatggccagccgcgcccgccgcatcgtcgagcgctacggccagacgcagaaggcaccggagaagcgtctcgccgagaaggaccagaagcgcaaggtctattataagaactacacgggccgcgtctgggggcaggcgcagaattatgatatctgcctcaacagcggcgcgctcggcgtggacacctgcgccgatatgatcgtacagctctgcaaataaggaacataacaaagcggccgcccagaaatgcgggtggtcgtaagacagtttcagtcccggcagtaatgtctgccgggactgttcttgcacatattaaagccatatgatagaattaaataaagcaataaatcggaatgataaggtaggtaaggtataacatgccaacaattcagttaaaggcgatgacgcgagaactatgtcacgaactgtacaagcattggacgaatgatgcgtctatctatatggatatgcacctgtttcagccctatgtttatgacgaagctgcggtaaatcgatattttgatatgaaggggcaggatgcttcacgcagactgtttgcgatcatgcttggagataaggtgattggggaattgcaattgaagcagattgaccatgataaaaaagaatgttccctgagtatccatatgcaaaacgacgcggtgaagggaaaaggatatggaacgcaggcagaacgtttggcagtaaaaaccgcctttgacgagtttggaatggctgcggtaaacgcagataccatcaggaaaaatacccggagtcagcatgtgctggaaaaggtaggctttcgctttgttggagaagatgaaacattcaaatactaccgtatcgagcggtaaacttaatttgccgaactgataaagggcgcacttctatacacctttcggtgtaccgtgcgagcatcccttgcctctccctttgggagaggtggccgagcatagcgaggacggagagggcaaaccatgacaataccaaaagacaacacccaattagaaaatgcccgacggcttcgcagggagatgacaccccacgagcgtaagctctggtatctttttctccgcagatatccagtaaaaatttacaaacagcggattatcggcagattcatcgtggacttttactgtgcttcggccagactggtcattgaattggatggctctcagcattatgaacctcaggggcttgcttatgatgcggaacgttctcaattcctgatgtctcttgggttggagattctgcgattctccaaccgggatatcgacagggattttcgtggtgtgtgcacacaaattgatcttatcattcgaaaaaggctgcagggccctctcagtcacctgcggtgacagctctcccaaagggagagccaagggactgtaccccattacatagtatgttgatatgagaaatggagcgtatctgtatcgatacgctccattgactgttttatgaacacccatctaaatgggcggccgcttcgatttcaatcggcgcttgggagccgcgttctgcaggccgggcagtgaggacggaggcagggtttctctcgggaacagcggcgtgctgtacacaggcataaaaagagccgcccaggtgcttcggtcgctgggctaccgaagcggtagcccagacggtttgcacaagagcggctatattggaagtatagcatacgacgccggcggagtcaagatatccggaggataattacaagtgtgatcgggccgctgcagaaaaaagacagagcaaccggaaaatcaagactagttccgccgtttccgacgggtgggctagtactccggatgctctgtcagagaaaaaatagcacgaatagaggggaatgtcaagcagaaatcgtcaagcagatcgcaaagtagccggaggtcaaggcggcgagccttgtggacaaacgggagaataaaacttcgatatacaagagcagagagtataacacccttgcgaatgcggtcaacattggcctgcaggattctgcacgggctacggcagcttctcgagcagctccggcaggctcaggcccgtctcacgggcgatgcgtgccagatcgtcgaattcatactttttgcgggaaacgccatagccgcccgcctgcttgcagcggaccggcccccatgggctgtcggtctcgctgacgctgcgctgcagcgccgtccggctgcagcggtgctcccgcacgccgagcgttgtcgtgtcgcgcaggaatacgtccagcacagcctgccgcttttccaggcggcacagcgcgcgcagcagtacgccggggcgcgattttttcatgccgatgggcgtcgtccatgcgtcgagcgcccctgcctccagcaggcgctccagcgcaaagccgatggcctccggcgtcatgtcatccagattgcaggcaagctccagcacgtcctctgcgctgtcctccgtctcgcccagcagggcgcggacgcagttggcggcggggaagtccttgcggcccatgccatagccgatgcgctctacgcgcatgggcggcatatcgccgaagcgcgcggcaaactgcgtcagcagggcagcgccggtcggcgtgcacagctcgcctgcgatgtgcccgccgtaaatgggaacgccgcgcagcagaatggcagtcgccggggcgggaacggggagaatgccgtgagcgcagcggacgtggccgctgccaacatgcacgggcgagacgatgatctgctccggcgcgagccgctcaagcagcaggcacacggccgtgatgtccgcaagcgcgtccatcgtgccgacctcgtggaagtggatctggtcgaccggcctgccgtgggcctcgctctctgctgcggccagacggccatagacggcgaggatattgtcccgcacacgctgcgggaccggcagggccgcaatgcgcgcgcggatgtccgctatgccggtgtgggaatgagggtgttcatgggcatgttcatgctcatggtcatgctcgtgaacatgactgcatgcatgtgtgtgcgccagcgggacgtcctcactctcctcctccgcgccgttcacggtcacggagagctgcgtgccgcagatgccgcacttttcggtgcgcacggccgtggtgacaacgccggggatgcccagcgcattgagctcctgcagaaatgccttcggctccggcagcagctcgagcagcgccgccgtgagcatatcgcccgcagcgcccatgccgcagtcaagatacagtgttttcatggtttggcccccatatgattgatcatgctggcaagatagcccgcgccgaagccgttgtcgatgttcacgacggaaacgccgctggcgcaggaattcagcatggaaagcagcgcggcaacaccgccgaacgacgcaccatagccaacgctcgtcggcacggcaatgacggggcagtcgaccagtccgccgatgacgctggcaagcgcgccctccatcccggcgatggcgatgatggcgcgtgcgcccatcagctcgtccagactggcgagcagacggtgcagcccggccacaccgacgtcatacagccgcacgacgcggtttccgagcacctcggctgtgagcgctgcctcctcggcgacgggaatgtcgctcgtgccgccggtcgcgacgacgatttttccgtcgccgtccggctccggcagcggcccgacgatgccgatacgggaggctgcgtcataggtgagcgctgcgcgctcctgcagataggctgcggcctccggcttcatgcgcgtgatgagcacggtcttctgcccgctgcgctgcagggaatcgacgatgccagcgatctgctccggcgttttgcccgcgccgtagatgacctcggccgcgccctgccgcagacggcggtgatggtcgacgcgcgcatagccgaggtcctcaaacggagcctcgcgcagctgcagggccgcgtccgcgacggagatgcttccgtcgcgcacctgcgtgagcagggcggtgagagaattatgcatggcgcgcctccaaatcgagcagaactgcccggtaatcgggcttcagggccgcgacgatctcgtcgtgctgggccagcgcccgggaaagctgatctgccgggaactgcaggcgggcgcagccgtccagcaggcggacgcggaagtccgtgtagccctgcgagaacagccagccctcggcgcgctccgtggcggccagcagctccggcgtgatgcgcgtgccggtggggacgcgcgtggcaaggcaggcataggcgggcttgtcccaggtgaacagcccggcctcgtgcgacagacggcgaatttccgccttcgtcaggccgcattcgcgcagaggcgagcggacgtccatctcgcgcagggcgcgcataccggggcggtccccggcgtcgtccgaggcattcgtgccgtcgaggatgagcgtgaacccgtcctcggctgccgcgcgcttcagatttccgaaaatattttgcttgcagtaatagcagcggttcgccggattgcgcgccacatcctcggaggacagggcatccagctccagcacggtcagttttgcgccgacgctctcggccagccgccgcgcgtcgtccagctcaaattgtggctggaacgccgtcttggcaaagtaagcgtgcacgtctgcaccgcactgcaccgcagcatacagcagatacgacgaatccacgccgcccgaaaacgcgatggcagcgcgcgtgtttttcgcaaaaaattcctgtagggtcatgatggggtgtctcctttctgctccgggcacggcgtgagccgcgcgcggaaagaaatgcgccgcggggtcggcagtccgtcaaagcggatgagccaggcctgctttgcctcgtcgagctccagcatggtgcccgtgccgagaatgctgtgccgcacgcgctggccgggccggaaggcggcggtgtccgcgctgccgcgcagcgtgcgttcgcttatggcaatgtagctgcgggcgttatccagcagcatgtcatcgcgctcgccgctctgctccagaaggccggggtcgatgtcgagcagaaagcgcgagggatagcggtcggttccgtcaaaattgcgtccggcggcctcggagaagtacagcccctgctccgcgcgcgtcattgcgacgaaggccagccgccgctcctcctccatggcggggagggtccggatctttttcgaggggaacagtccctcgttcatcgcgcacaggaacacatgggggaattccagccccttggccgtgtgcacggtcatcagcttcacgcggtcgcggctgtcgcccgcgtcggcgtttgtaaacagggccacatgggccagatagtgctcgagcgtgcattcctcgccgcacgtcgtctcatattcatagacggactgcttcagctcggccagattgtccagccgctcctgactgccctccgtgcggagcatggcctcatagccgctttcgtgcaggatggcggacaggacctccgagacggaccggccggagcagtcggacgaaaaggcatcgatgagcgagacgaagcgtgccgcacccgtgccgcggaaggcctccgtgccgacactgcggcgcagggccgtgaacagcgaacagccttcctgtgcggcctgctcctgcagcagcctgcggcggcgctcgccgatgttgcgtttcggctggttgacgatgcgcaggaacgacaggtcgtcctgacaggcaatcatgcgcaggtaggacaaggcgtccttgatctcggcgcggccgaaaaactgcacgccgctgtagatggtgtaggggattttctcccgctggagcacctcctcgaccgtccgcgtgagataatgcgcgcggtagagcacggtcatgtcgcggtagggcgttccgccgtcgtgcagggcctgcatctgcgccgccatccacgcggcctcgtccgccgcgctgcgcgcgtggtgcagacggaccggtgcgccgtccggcagggtggggagcagggatttttccatgcggtccgtgttttttgcgatgagcgaatttgccacggacaggatctgcggcgtggagcggtaattttccatcatcaggatcgtgcgcgtaccgggaaagacctgatcgaagtccagcagataccggatgttcgctccgcgccaggtatagatcgtctggtcgggatcgcccacgacgaagaggttgtggtgatagccgcacagcacctgcatcagcgtgtactgcggctcgtcgatgtcctgaaattcgtcgaccatgatgtattccagccgctgctgccacttgagccggatgtccgcatcctgctcgaagatatagagcgtgaatttcagcagatcgttgtagtccagcccgaagcatttcttctgctggtagagatagccatagaaaatgatgtcgtccggggcttcggcctgcagatatttctgctgcagcgtctcgagcgacagcgtgatgagatcgagataatactgcggctccttcttgagcttgcggagctcgatcatgtcccgcgccgcgctgaaggtcatggcgcgcagcgtcagcccgcgctcctcgtagatgatgcggagcatggcgtcgatatcgctgttgtcgagcacgagaaagcgccgcggatactgcacggcgtggctgtcctcctgcaggacggtcacgcagaagctgtggaacgtacagatgtagcccgtgtcctcgtcgcccgtcagggcgtggatgcgctggcgcatctcggcagcagacttgttcgtgaacgtcacgcacaggatgttgccgggcagcgtgccgacctcgttcacaagataggcgaagcgccgcgccagtgcgcgcgtcttgccggagcctgcgcccgcgatgacgcggacatagccctctgtggccgtgacggcctcccgctgggccgcgttcagcccgctcagcagatcgtccatgcgtgttcgccccctttcccgaaaaataatagcacaaaattgggcgaaatacaagcgcgagccgggcgggcttgcacaatgcctaccaatatgctacaataacaaacaataattatgaacaccgccgcaaaggcggggaggggagagcgctatgccgcgtttttttgttccgcgcgcggagctgggtgagaattttctggtcctgacgggggagaatgccgcgcatgcgcgtgtgctgcgcctgaaaaacggagatgccgtcacggtgtgcgacggcgagggcgaggagtggcactgcgttgtctcggacatggctccggggcaggtcagccttgtcgtgcaggagcacacggccgcaaagagcgaggcggccgtattctgcagcgtgtatatggcctttgccaaggcggataaatttgagcatgtgatccagaaggcgacggagctgggcgcggcggagctggtcgcgttcccgagcgcgcgctgcgtctcccggccggatgaacgctcacttgccaaaaagctcgagcgctggcagaagatcgccgcctcggccgcagagcagtccgggcgcggccgcatcccgcaggtgctggcgctgccgtcgtatgaggcggcgctgcagcgggctgcgcaggcggagcttgccgtctgcttttatgagaacgaggagcagcgcacattccgcgccgccatcgagtccgcgccgttccgcacggcggccctgctgacgggaccggagggcggtctggagcgcagcgaggtggagcaggcgcagagggccggcctgcagatctgcacgctcggcagccgcatcctgcgctgcgagacggccccactgtgcgccctgtctgccctgatgtatgcagcgggtgaattctgagcgaaagtgagggttaatgaatgaaaacgtgtgtgatctccttcagcagccgggcggatgggaactgcgctgccattgccggctgtgtgcaggaaacgctcggggcggagggtctgacccgcttcgatttttccggactttcggtgcatggctgcggcgcctgccattgtgagtgcttccggcagcgcgaggcctgcccctattttgcggacgatgcgttccgcctgaacgaggcggcggcactggcggaccgcgccgtgttcatcgtgccgaattactgcgattttccgtgctccaattttttcctgttcaacgagcggagccagtgctgcttcaacgggcatgccgagctggcggaccgctatcttgccgtgccgaagaaattcatcgttgtcagcaatacgggccgggagaattttctggcggcgttccgggaccatgtgctgcccggaacggagccggatgtctgcttcctgcgcgcggcggcctatcatcgcatcagcctcgacggcgacctgatgacctgtgagcctgcccgtgcagccgtccgggacttcttgcgggactggtaatgcagcggcctgagcgccatgcaggcaggcaatgattgcggcacaaattcattgacgcagtgccttcaagtttgtcattgcgaggccccgaaggggccgtggcaatctcctgcaacgtccggcggatttgccaaggctttcctgtgatccggccgggtactgcgagattcccacgtcgcttcgctcctcggaatgacaattcgggtgcgtttaccgttttaacgatggcctttgccgttcgtgagttccgcgccggtcggggcatgtcccgatcctgcaacgccccaatgatagccgatctgatccccccggaaacaggcatgtttccgggggagttttgatatattggacaggggaggtgagggcatggagcggaacgactccattctgggcggcgcgctgcttttaacagcggcgaatctgctgctgcggctcatctccatcgcatttcaggtcttcctctccgtgcgcatcggcgcggcggggcttggactgatgcagctcatctcgaccatcggcgtttttgccatgctggccgggacggccggggtacgcgtaacggccatgtatctggcggcggaggaattcggccaccggcgcttgagcggcgtgcgcgcggccatgcgcgcctgtctgcaatacggcatcttcgtgagcgccgtctccggcgcggcactgttcttcctgtcggactttttcgcaatggagtggctgcgcgacctgcgcgctgggccgagcctgcgggtcatgggcctgctgctgccgttttcctgcctgtgcgggatcatgacggggtattacacggcctgctcccgcatccgccagctcgtcggcatcgagatcgcggagcggctggtgtccgtcgggctgacggtcaccctgctgtacctctgggccggggacgatctggcgcgggcgtgctgcgccatcacgttcggcagctccgccgggtgcatttttgacttcacactgctgtatctgcgctaccggcgcgatatgcggcgggtcccgcgcgagcacatcccgatgcgaaagcgcctgctgcgcctgagcgtcccgctggcgctgaacgacgccctgcgcgccgggctgaacacggccgagcagctgctcatccccatcggccttgcgcgctacggcggctcgacggaggaggctatggcgggctatgggacgatccacggcatggtgttccccatcctgatgttcccggctgccatcctctattccgtctccgatctgctggtgccggagctttcgcgctgccgggccatgggacgcgccctgcgcgtgcgtgacctgagcgggaagtgtatccgcatgaccatactgtttgccgcagccgtggcgggcttcttcttcgtctgcgcggaggagctgggccagtgtgtctatcacagcgcggatgcggggcgctacctgcgcatttttgcgccgatggtgctgatgctctatctcgatgccattgtcgacggcatgctcaagggcctcgccgagcagctgagctgcgtgcgctataacacgctgacatccgttctggacgtcgtattcctctatgtcctgctgccgcgccatggcgttgcgggctatgtggcggtgtttgccgtgacgcatgccatcaacctgtatttgagcatccggcggctgctcgttgtgacggagcacaggccgcgcacggcggattttgctctgccgctgctgagcctcggccttgccctgctgctgacgcttccgttcccggcggcgggcggacagatcatgcggcttatgtgccgcggcggctggttcctgacggttttgctcgcggcctttgtgctgctgcaggccctgacgcagcaggacggcagctggctgcggcgcgtgctgcgccggacgcttgacaatcggggcggcgcgggctacaatgagggcagcttatagggaaagctctgattgattcagaacttctccggatcaggaggccacttttcatgccgcagacgcccatgccgcaggtgcatcccatccccccgctgtttgacgcggagtcccgcgtgcttattctcggctcattcccgtcgatcaagtcgcgggaggccatgtttttctatggccatccgcagaaccgcttctggccgctgctcgccctgctgaccggcgagccgacaccgcagaccgtggaggagaagcgcgcgcttgccctgcgccaccattttgcgctgtgggactccattgggcagtgcaccatcaccggctcgtccgacagcagcatccgcgacgttgtgccgaacgacctgcgcatcatcacggagcatgcgccgatcgaacgcattttctgcaacgggaacacgtcgctgaaatattaccgccgttataacgagccgctgctcggccgcccggccgtcgtcctgccgtcgacgagcccggccaatgcggcatggtcgctgcagcggctggccgaggcctggcgcgtgatattataaatgggaggagccaaatccgcggctcctcccgttttcatttccttagaataaccagatggccgggatgtggatgttcgtcagcccgagcttggcctgcagcgagagggacggcacgttatccggcgcaacgaagcagtacggcagccagccgcgctccagatggagccgaatgagcgctgcctccagcgcctgcgcgatgccgtggcggcggaactccggcacgacctcgagcatgcccatgctgccctcggaatggatgccgaggaagcctgccagccgcccttcggcggtgaaatggccccacagcgctccggcctccgcgcggccgcgcagatagggcaggggatcgtcaaacagatgatagtagcgcgccgcctccgcggcgtcttccgccttcagcgggcggatggagcaggccgggacctcgggcggcgacggctgcaggtacagcagcgtctcataggcctcctgagcgtgcaggccgaattcgcgctgcacggcgtcggcggcctcgtgcgagaagacggtgaagcccgcgtccttcggaacggtcacgccccgcagtacgcgcagcagagcgtccgcatccggaatgccgcagaaaaggccgtttccgcccgtttgcagcagcatgccctccggtccgtcgtacagcgcgcggcagcggccggtccggcggagcatttccgtaaagagaagccgaagattttgatccatgacgtttttcctttccaaataaaaaccgcgcggcccggagccgagccgcgcggaatatgtgccgggaaacgcgctcagaagagctcgttgatgatggcggcgatcatggcgatcacgacgaagtcggcaagcagctccacggcgttgatgatcaggccggcaagggccatgccctttttgacattgcggcgggcgacgcctacgatgccgaggatgaggccgacgatggacacgagcagtgcgagaatggccagcacgatgccgctggtgcacagcgtctggagctcgctgaagctgaaatagaaggagctgaccgaatccatgatgctggaaatgatggcaatcacggcgatcgtggcgacgagcgagaccatgctcatgacgaacgaggccacgccgacaccgttgctgcccttcagcggggagacaggctggacgtagaccggctgctggtagacagggtataccggggcctgcgcgggagcggcagactcgaccggtgcggaaggctgggattcgacgggagcgacgggcggctccacagggacggcgggctgcatgggctctacggcgttctgaacaggtgcgccgcagctgccgcagaacgcagcgccttcctcgacgggggcgccgcagttggcacagaatgatctcataacagattcctctctttccagggcttagagcacggcgatgccgatggccgccagcacgatgagccagatgcacagggcgatggcactcaggatcagaccggcaatgccgagacccttgctgcggttcttctgggacatgccgacgatgctgaggatgaggccgggaatggccagcaggccgatgtaggtccagcaaaagatcaggccaagcagaccgcagacaaagcccgcgatgctgcagccgtgcgcaccgcgcttttcgggaacgggagcggcaacatagacgggctgggaaggctgagcctgcacgggctgaacgggggcctcaggggcagccgcgatgggagtgccgcagttcggacagaatgcgccgctgttgtcgaccatgcttttgcagttcgggcactggatcatggacatggaaattacctcgattcaaacagattcaggaatgacagggcatatcctgttcataataattttacacaatcggtcggagaatgtcaaggcggaacgtggccggaagggtgcaaaaaaggcctgctgcaatgcaagttctgcagcaggcctttttgtggtcattttcctgcgatatgcagccggttcagggcgcggctgagcttggcgcgggccagcttgatgtcgcgctcctccgtggccgctgcgatgcgagcctcagcgcgggcctttgcggcctcggcacgggcgacgtcgatctcatcggcatattcgaacgtggtggcgacgagacggacctcgcccttctccacgctgagaaagccgccgccgcaggctgcatgccgcggctcgccgtccttcgtgacgacgacgcggccgatgtccagcgcggcgatatagtccgtgtggtggggatagatgctcacatagccgccggtcgtgcggacaacgacggaattggcctctccgtcaaagaagctgccgtccggcgtgacgatctgcagatggaagctgctcattttgcagccccctgcttcgccttctcaacggcctcgtcgatcgtgccgacaaacaggaacgcggactcgggcagatcgtcatgcttgccctccaggatttccttgaagccgcggaccgtctccttgatggggacgtacttgccctgcataccggtgaactgctcggcaacggagaacggctgggacaggaagcgctggatcttgcgggcgcggctgacggtcagcttgtcctcctcggacagctcgtccatgcccatgatggcgatgatgtcctgcagctccttatagcgctgcagaatgcgctgcgtctcgcgggcgacctcgtagtgctccagaccgaccacgtccggcgtcaggatgcgggatgtggactccagcggatcgacggcagggtagatgccaagcgaggcgatgccgcggtccagaacggtcgttgcgtccagatgggcgaacgtcgtggccggggccgggtccgtcaagtcgtcggcagggacataaacggcctgcacggacgtgatggagcccttctttgtggaggtgatgcgctcctgcagcgcgcccatttccgtggccagcgtcggctggtagcccacggcggagggcattctgccaagcagggccgagacctcggagcctgcctgcgtaaagcggtaaatattgtcgatgaagagcagaacgtcctgcccctcgcggtcgcggaagtactcggccatggtcaggccggacagcgccacgcgcattctggctccgggcggttcgttcatctggccgtagacgagggcggtcttgttgataacgccggactgctgcatctcgttatagaggtcattgccctcacgggtgcgctcgccgacgcccgcgaagacggagatgccgccgtgctgcttggcgacgttgttgatgagctccatgatgaggaccgtcttgccgacgcctgcgccgccgaacagaccgatcttgccgcccttggcatagggggcgatcaggtcgacgaccttgatgccggtctcgaggatctccgtggaggtctgctgctcgtcataggcgggcgggtcgcggtggatgctccacttctcacaggtgacgggctggggcttattatcgatggcgcggccaagcagattgaagacgcggccgagcgtctcgttgccgacggggaccttgatgggcgagccggtgtccacggcctccatgccgcgcaccatgccgtccgtcgagctcatggcgatgcagcggaccacatcgtcgccgagctgctgggcgacctcgcagacaagcttgccgccgtcgcgctcgatctcgatggcgttgagcaggtcgggcaggtgaccggccgggaagcggatgtccagcaccggaccgatgatctgcacgacggaaccaatgttcttttcctgcattcggttgactcctttccgttacagcgcctcggcgccggaaacgatttctgtgatctcctgcgtgacggctgcctgccgcgcgcggttgtatttgaggaccagcgagtcgatgagctcaccggcgtttttattggcggcgttcatggccgtgcggcgcgcgccgtgctcggaggcagaggcctcacagagggcggaatacagcacgccggagacatactgcggcacgatggccgcaaccagggcggcagggtcgtcctcgacggtcgcgctctggtactttgcatcgcccgtgagctgcagcggcagaacgtcggcagaggcggggacctgcgagagcatggagcgaaactccgtatagacgacggtcacgcggtcatagcgcccggctgcaaagccgtcgcacagcaggcgggcgatctgcatacagtcgccgatgccgacggaggcggcaaggccgaaataggtgctgacgagctccgcaccgctgcgggtgaactgctcgagcggctttttgccgatgggcagcacgcagtagggctcgctgcctgccagcgagagcacgagccggtgcaggttggcgttgtagccgcctgccagaccgcggtcgccgccgatgacgacgaagcaggtcttcttcacggggcgcacctcggaatagacggacggcgtttccttcagcccggcctgaatgcccgcgatggcttcacccagcacctcgtggaaggggcgggagcgctcgacccgctcgcgcgcatgacgcagcttggacgtggcgacgagctccatggcgcgggtgatctgctgggtgctctcgacgctgcgaatgcgcgtcttgatatccttcatggaagccataggcagcgctccttaggccgtgaacggcgcgcggcaggattcgatggcggcgcgcagcgcggcctcgttttccggccgaagctcgccggtcttgcggatgtcctcgagaatttcgggatgctgcacggtcagatggtcaaacagcgcgttctcaaaggcggaaatgcgctcgacggggacgtccatgagcatgttgtgcacgacagcgtagagaatgctgacctgcagggcgacgtccagcggggagctgcggtcctgcttgagcacctccacgacgcgctcgccctgagcaaggcgcgtcttcgtgtcggcatcgaggtccgagccgaactgcgcgaaggactgcagctcgcggtactgcgaatacgtcagcttcagggtaccggcgaccttcttcatggccttgatctgggcgctgccgccgacacgcgacacggagatgccggggttgatggccgggcggatgccggagtggaacagctcggactccagatagatctggccgtccgtgatggaaatgacgttcgtcggaatataggccgagacgtcgccggcctgtgtttcgataatgggcagagccgtcatggagccgccgccgtattccggggcgacgcgggccgcgcgctcgagcagacgggagtgcagatagaacacgtcgccggggtaggcctcgcgtccgggcgggcggcggatgagcagggaaagggcacggtaggccacggcgtgcttcgacaggtcgtcatagacgatgagcacgtccttgccctgatccatgaagtattcgcccatggtgcagccggagtacggcgcgatatactgcagcggagccagctccgaggcagttgcggagacaacgatggtatagtccatggcgccgccgcgagccagcgtgtcaacgagctgggcgacggtcgagcgcttctggccgatggcgacatagatgcagatgacgttcttgcccttctggttcagaatggtatccgttgcgatgacggtcttgccggtctggcggtcgccgatgatgagctcgcgctggccgcggccgatggggatcatggagtcgatggccttgatgccggtctgcagcgggacgctgacggacttgcgctcgatgatgccgggggcgttgcgctcgatggggcgcatttccttcgactcgatggggcccttgccgtcaatgggctggccgagggcgtcgacgacgcggccgatgagggcctcgccgaccgggacggacacgacacggcccgtgcgcttgaccagaccgccctcgcggatgccgacgtccgtgccgagcatgacgacgctgacgcagctctcctcgaggttcagcgccatgccgaacgagccgttctcgaagcggagcagctcgttggatttgcatttatccagcccgtgcaccttggcgatgccgtcgccgacctgaatgacgtagccgatctcatcctgctgcgtctgggatgcataatttttgatctgatccttgatgatcttactgatatcgtcgattctgagattcacggtttcaccaaccttatcttttgatggggagccggtcagaccacggtctggctcaggctgcggcgcaggcgctccagacggctgcggatgctgtcgtcgagctggatgccgccatagcgcagggtaatgccgccgagcagcgtgggatcggtgcggcaggtcaggctgacggtcttgccggtcagcgactcgagccgggcgcacagggcctcgcgctgccgctgctgcatgggaacggccgtgatggccgtcgcgcgcaggatgccgtgcgcctcgtcataggccgcctcataggcggtcaggcaggcgggcagctgccagagcgcgcgccggtcgcacagcaggcacaggaaattgcgcagctcctgcgacgcgccggaaaaggcctgcagcagcagggcgtgcttttccggtccggccacggcgggcgtgtccatcagcgtgacataacctgggttttcccgcagggcgcggcggacgagctgcagctcctccagcaccccgtcgccgcagccgtcctcttccgcgagctgaaacagcgcgcggccatagcttgcggcatcaatcatggctgtcccccaatttctcaatgaaggaatcgatcagttcggtgtgctcctcgctgcggatatcgcgctgcaggacggcggaggcaatgtccaccgccatatcggacacatcgtccttgatctcgttcatggcgcgcttcttttccagcgcgacctgcgcctcagcgcgctgcatggtctgcgccgccttgtcctgcgcgtcgcggaggatctcctcctcacggagctgggcacggcggttggcgtcgcggagcagcgcctcgctctcggcgttggcctgctgcaggcgcgtctcatagcgcgcgcgcatctcttctgcctcggccttggcacggttggcgttgtcgtagaggtcgtcgacctccttctggcgcgaatcgatcatgttcttgacgggcttgaagaggagctttttcatgaccagatagaggatgaccagattgcacagcgtgaacaggcaggtccagaaatccacaccgacaaagctctcaaatcccgtaaaaaatttcaagccgcatttctcctttctccggcagatctcgtggtgctgcgccgcatcagaaaacgaagagcagcagcagagcgatgaccagagagtagataccggtggactcggtgatggcgcagccgaggatcatgttggtacgcagcgtatcggagacctccggctgacgtgccatgccctcgagagccttaccgacggcattaccttcgccgactgccgggccgatagcgcccagacccatgcagagacctgcgccgatcgcagcggcggccttgatgattgcttgatccattgtgtgtttcctcctgtaaatattgttgtgtttggaacgatctcaaatcggggtttgcttatttcttctccggcttcggggcggggggcggacaggccgcgccgacgtagaccatcgtcagcatgcagaacacgagtgcctggatgcagccggtaaagagatcaaaatagatggagaggatggctgggatgccgacctggaaaatggggatggacgagatgaattcactcgggatccagccgagcacgaacgagctcagcgcggacagaccgccgtagataagggccgtgagcacggagccgccggcgatattgccgaagtgacggaacgacatggagatcggctgtgcgatctcgctgatgatgttcatcggcgtcataacgaccacgggctctgtgaagcccttcagccagccgaagaagccgttgttcttgatgttgttgtaccagacgagggcggtcgtcatgagggcccaggtgagcgttgtgctgaggtcggccgtcgagctgcgcaggaagccggtcaggctggcaagcgagccgagcacggacgagcagaacagcgcgccgatgtagggcgcaaagcgctcattgtgcttgcccatcgtgtcgtccacgagcttgtaaacggcaaggacggcgcgctccgtgacggcctgcatgcggccggggcgcttccggagattacggccgagccgccagcagagaatcgtcaccgcggccagaacgaggagcgaggtgagcgtcgtctgcgtgatggtcacatcgcacagaccgaaaaacgagaactccgcaaggatgcgcggaccggtgatattaacattcatgcagcgggaactcccttctttttcttgcgtaccagctcggaggccatgagcgccagccgcatgaagcacagcggcagcagcgtggccagcgggtcgaaccgcttgctcttgagcgcgatgaccagaacgaccagcagcacgaccatgcgcgccacaaacaggatgcgggacgtaagctgggcggccagcgggttttccttcttcgaggcccgcagcaggccgaggatcatggcggcaaaattcaccagcgcggcggcggtaccgagcgcggcgccgagcagaatatcctgccgcagcgcggcgaacagagcatagcagcccagcatgatgccggacagcacgacctctgcagcgagcgtcggcagaacgagccacttcagactgccggacgttgactcgttaacgggttccatgcggatcatcctcctttttgtgagatgacggaacatcggaagacgggggagcggtggggtccatggtgcgggcagccgtcagcagaaaatggaacatgctgtacagcccggcgaacacgccgaagacgatggcggcaatcatgatccagcggccaagtccgcagcgcgtgcgcagcagccagccgccgagaatgatgagcccagccgggcacaccatacagaagcctgcctgaatgcaataattgacggcataaatcgcgcgaaatacctttttcggcaagaaagagcacctcctaaaaaataggacccgattctcccctattatcagttaacatcataccctgttttcatgcaaattgcaatatgcaaagcttgaaaaatgtctgaaatcagggcggcctttcgaatatgctccgcgttgacattctgcggggaattcgatataattgttcacgatcgccgcgcagaatgcggctttgttgattcttattcttcccgatttgaggtgtcttgattttgaaaactcccgatctccggccggaaacgctctgcattcaggccggctacacgccgggcaacggcgaaccgcgccagatcccgatcatccagagcacaacattccgctatgagacctctgaggccatgggaaagctctttgacctcgaggcggacggctatttctattcccgcctgcagaatccgacctgcgaccacgtcgcggcgaagatcgcggcgctcgagggcggcacggccgccatgctgaccggctccggacaggccgccaattttatggccatgttcaacattgcgggctgcggcgaccacatcgtgagctccgcgtccatttacggcggcagctataatctgtttgccgtgacgatgaagcgcatggggctctcctgcacgttcgtcgacccggactgctccgcggaggagctgaacgccgcgttccgcccgaacacaaaggccgtgttcggcgagaccatcgccaaccctgccctgaccgtgctggatatcgaaaagttcgccgctgcggcccatgcccatggcgtgccgctcatcgtggacaacacgtttgctacgcccgtcaactgccgcccgctctcgtggggcgcggatatcgtgacgcactccaccacaaagtatatggacggccatgcggcggccctcggcggctgcatcgtcgacggcggcaaattcgactggacaaagtatcccgaaaaattccccggcctgtgcacgccggacgagagctatcacggcgtgacatatacggaacgcttcggactcggcggcgcgttcatcacaaaggccacggcccagctcatgcgcgacctcggcgcggtgcagtctccgcacaatgcgtttctgaccaatctcgggcttgagagcctgcccgtgcgcgtgcgccagcactgcgccaatgcgcagcgtatcgcagagcacctgcagggccacgaaaagatcgcgtgggtgaagtactgcggcctgcccggcgaccgctattacgagctggcgcagaaatatctgccgaacggctcctgcggcgtcatttcgttcggcgtcaagggcggcagaactgccgcagagcggtttatgagccacctgaagcttgcctccatcgagacgcacgtcgccgatgcgcggacatgctgtctgcatcccgccagcacgacgcaccgccagatgaacgacagcgagcttgccgcagcgggtgtttctccagaccttgtgcggctgtcttgcggccttgagaatgcggacgacctgattgccgacctcgatcaggcgcttgccgccgaataagccggaggaaacaccatgcccattaaaataccgaacgatctgccggcagccgccaccctgcaaagcgagaatatcttcgttatgccggagacccgtgccatcacgcaggacatccgcccgctggagattctcatcctgaatctcatgccgacgaagatcgtcacggagacgcagtttgcccgcctgctcggcaacacgcccctgcaggtgcacctggaattcctgcacacgcgctcccatgtggccacgcacgtctcggcggagcatctgttcacgttctataagacgttcgacgaggtccgagaccgccgctatgacggtatgatcattacgggcgcgcccgtggagcagctgccgtttgaggatgtcgagtactggcaggagctttgcagcatcatggactggagccggacgcatgtgcacagcacgctgcacatctgctggggcgcgcaggccgcgctgtaccatcactacggcatcgagaaggtgccgctggagaaaaagctcttcggcgtgttcccgcaccgcgtggagtataagaacccgatcctgctgcgcggctttgacgatgtgttcatggtgccgcattcccgccacacgacggtccgccgcgaggatatcgagcgcgtgccggagctgaagatccttgcctcgtccgagcaggccggagtctacgcaatctttacggcgggaggacggcagatcttcctgacgggccacgcggaatacgacccggacacgctgcggcgcgaatatgagcgcgacaaggccctcggccttcccattgctgtgccggagaattatttccccggcaatgacgacacgaagccgcccctcgtcacctggcgcagccacgccaacctgctgttctcgaactggctgaactacttcgtctatcagacgaccccgtatgatttcacattctgaccaaagcgtgccgcgaaaacggcacgctttttcgtcgtaagcgccaaagatcggattttgacgaaaaagggctttacagccgggaagggctgtgctagaataacgcccgaaaaaagttctttaagagcggtacagagagaccgacaaggacgcgaatgagagacgcagagggtctgtgcacccgtctgccgttttgctgtggattcgtatgccctgtcgctgtgctgcggcagggcatttttgcgccctgcgggaggaaaaaccatatgcagactgttgagatcgcggatgcagccgcgtttgagcgcaccctgcgccgtctggcgcatcagatactggagaacaacccggagccggagcaggttctgctcgtcggcatcctgcggcgcggcgttccgctggccgaagagctggccaggcttatggagcgcttcggcggcgtccggccgccggtcgagacgctggacatcacgctgtaccgcgacgacctgagcgagctcggcgatctgccggaggtccggccgacgcagttctctacgccggttgccggaaagaccgtcatccttgtggacgacgtcatctacaccggccgcacggcgcgcgccgcgatggaggccgtcatccgcctcggccgcccggcacgcatccggctggccgtgatggtcgaccgcgggcaccgcgagctgcccatcgacccggagtacgtcggcaagaacgtgccgacggcgcgggaggagcagatctgcgtgctgacgccgcagttcgacggacaatggggcattcacctgcgcaagcaggcctgaatacaaaaccacatcagcaaaacccaaaatacagaacgggggaaacaatcatgaacatgatcttcggagtcaaggaccggccaaaattcggccagacgatcctcttcgccatccagcagctgctggccatcatggcggcgacgctcgtcgttccggtcattaccaacggcgcgaccggcagcacgctcagcccggccgcggcgctcttcggcgcaggcgtcggcacgcttgtctacctgctctttacgaaattccgcagcccggtcttccttggcagctcgtttgccttcctcggcagcatggctgcagccttcgcaggcggcgtttccatgacgctcggctatgcgggccttattctcggcgcggtgttcgccggctttgtgtatgtcatcattgcggcggccgtgaaggtcgcgggcgtcaagtggctcgaccgcctcatgccggtcgtcgtcatcggcccgacggtttccatcatcggcctttcgctggcgggcaacgccgtctccgacctcgtcaagggcagcgttgtgaacgccgagggcgctgcggtcgcttctccgctcatcaccgttctgtgcggcctcgtggctctgctcgtgaccatgctctgctcgacctacggcaagaaaatggtccgcctcatcccgttcatccttggcatcctcgcgggctacgccgtcgcggcggtgttcaccctcatcggcaacgccacggccacggacgcgctgaaggtgctcgacttctcgaagctctccgtgctgtgggaaaacggcgtcacgctgaagacattcgtgaactatgagcttgtgacgaaggacttcgtcttcctcaaggctgccaagggctttgccgagctgaactggggctatgtcggcgccatcgccgtggcctatgtgccggtcgcgttcgtcgtcttcgccgagcacattgcagaccacaagaacatctcctccatcatcggcaaggaccttctgaaggatcccggtctctcccgcaccctgctgggcgacggcgtcggctccatggcgggcgctctcctcggcggctgcccgaacacgacctacggcgaatccgttgcctgtgttgccatcacgcgcaacgcctccgttgtgacgatcctggcaacggccatcctcgccatgctcgtcagcttcttctccccgttcgtcgccttcgtcaactccatccccggctgcgttatgggcggcgtgtgcatcgccctgtacggcttcatcgcggtctccggcctgaagatgatccagcaggtcgacctgggcaaggacaacaacctcttcgtcgtcagcacgatcctcgtgaccggcatcggcggcctgtccctgacgttcggcaagatcacgatcacgccggtcgccgtcgcactcatcctcggtattctcgcaaatcagatcctcaagggccgcagcgcgaaccgcgactgagaccgagtctcataccttatataatatatacagccgcgcggtgtccaagtcaccgcgcggcggcttttttcaaaatagggcttgacaaatgcggaaaaacaaagtataatacacaagcaaattggatatgcgagtgtgctggaataggtagacaggcacgtttgaggggcgtgtgacaaccgtcgtgtgcgttcaagtcgcatcactcgcaccacgccggagcagattctgctccggcgttttgcattttccggagcgactcctgcgatcgctccgttttttgatttccggggagggaagacagcttggcagatcctgcaaatgaatgcttcgccctgcggcgggaggacggccccctgacaggcgagatcaagccgcgcgcgctcgtgcaccgcgacggcgacctgcacggcgcgagccacgtttttctggcgcggctgcgcggcggaagggccgaattgctgctgcagaagcgcagcgcacagaaggactcgttcccgggtctgtatgatatttcggcggccgggcatcttgaccccggcgaggactttgcggcggcggcccgccgtgagctggccgaggagctgggcgtgacgggggaggagccggaatttctgtttgcccagcgcaacgaatatcacggcgccttccatggaaagccattccatgacaatgagatcgcatgggtctatctcctcgtcctcgaccggccggaggaagccttcacgccggaggcctgcgaggtcgagtccgtgcactggttttccgtgcgggagatcctgcgcgccatgcgggaaaacgacccacgcttctgcctgcgcgaggcggagttccgccgtctgctgccgtatctggcacaaaagttcggcattccggttgacaagctctgaagcggaaggtacaataaaagttaaccgtctctgattttcaaacacgctggaggaacgctatgaagcttcttgacctgctcatcactgccattgcgctgtccatggatgcgtttgccgtctcgatcggcaagggcctctctgtcaagcgactcaaggcttcgcattgcctgatcaccggcgcgtatttcggcgggtttcaggcccttatgccgctgctcggcttcctgctggccagctcgttcgcctcgtacatccagaaatttgaccactggatcgcctgcgtgctgctcgtgctcatcggcgcgaacatgctgcgtgaggccttctcaaaggaagaggagcaagggaacgattcgttcgccttccgcgtgatgctgccgctggccattgctacgagtatcgatgcgctggccacgggcgtgacgttcgccatgatgggcgtcaatatctggatcgccattgccattacgggcctgacgacgttcgtgttctccgtggcgggcgtcaagatcggtaacctgttcggcagccgctatcagtccaaggcggagctggtcggcggcctgatcctgatcgtcatgggtttcaagatccttgttgagcacctgctcggcaaggcctgagggaaccgtcatggagctttgggatatctatgaccgccagcggcggacgaccgggcgctttcatgtgcgcggcacgccgatggggcggggggaatatcatctgacggcgtttgtttgggtgttcaaccggcagcgggagctgctgctgacccgccgcgcaccggagaaggagcattatgccaattgctgggccgccacgggcggcgcggccctcgttggcgagacgagcctgcagaccgtgcggcgcgagctgcgcgaggaaacgggcattgaggctgatgaggcggatttccatctggtgcggagctttcgcgagcactccaccttcagtgatgtctatttcctcttccatgatatcccgctttccgcgctgcacctgcagcccggtgagaccacggaggcccgctgggtgtccaaggccggtctggaggctctggttgcctccggtgaggtcgctcagccggatgtccgccgcctgcgccagctgcgggacgaattccgaaaaatttggaatgcctgagaccgatgggcctcaggcatttttgccaatgtaacgaggtgcctctgtgtaggggagcggcatgccgctcccggcggtgcaggaacgatccgtatggggtgacgataaaatggcaaacgctcccgaattgtcattgcgaggaggccgcaggccgacgtggcaatctcacgcaaccggttacgtttttgccgggagtaccctgttatccgaccgggtgctgcgagattcccacgtcgcttcgctcctcggaatgacacgtcagggaaatgccgtggtgcacc

SEQ ID NO: 11237 - DNA, 358 bp, Unknown
  gut microbiota DNA sequence
gatttacagcaagtagaattcaaaatactccaagcggtagatgcagtatgccgccaattgcacatcaactactatctcatttgcggaagtgccttgggggcagttaaatactctggcttcattccttgggatgatgatctggatattggcttgctccgtcccgactatgagatttttgttgaaaaggcgcaggagctgctcccgaacagctatttcctgcagaattatcgcaccgacccggcattcccacagatattcagcaaggttcgcgattcgaatactacttatattgagaaaagtgctgcgaagctatctatcaatcatggcgtttatattgatgtatttcctttggatggat

SEQ ID NO: 11238 - DNA, 760 bp, Unknown
  gut microbiota DNA sequence
gtgcccttggggtgcaatctcgcagtacccggtcggataacaggaaagccccggcgaattcgtggcataaaatgatccggcagcgccgaagcgctgccggacttttttccatctcaatgcgacggccattcgaccgccgtcggccactgcacatgatattgagaaccggtcagataacagtccaaccaccagtggcagggagaccagccgccgttgaatgcatcatccgcgatccatttcagcagcacagcatccgtgcagttctctgtgctatgctcagcgccatacacgcccggatatacatagtgccacagctcaaaaatacagaaaagccattcctcgggaagctcgcgcagcacataattcccatccgcatttggctctagattctgctccagaatgtccgggatttgaaccatgagtccataggccgcctttgcatcaggataggccgtgaaataatcctcatgtgccgcaacacagcttgcaagcgcatccgcgatctgatggaattcctccaaaacggccggatggaacgtcttatttacgatacggtacagcgcctgaaaataccgcgaggtagcgtagtccagctccgtgctgtctgatcccggcgtgcgggaacaggctgtcagcagagacgggaccgcacacaggaacaccgcgagaagaaaaatggacagaaccttgcgccatgcagcaaatttcataagtacgctcctttcacattgtcaacaataattggccgcaggaataacgt

SEQ ID NO: 11239 - DNA, 1395 bp, Unknown
  gut microbiota DNA sequence
gtcagctgtacgccctccgtcagttcataggtctctctgttcgaaataacatatgcttttccaaaggatacgcagcgcagcacacaccggcatgactcattctcgttttccggctcccagcttgcgagggtctgcagcgggccgccggacagcggacgcgtgacgagcgccgaggctgtcccgttgtctgtgaaaaccaaagcatagtagtttccccggtattccaccagagactgcaggtcgccgaagcaggcattacaggtgggatcattatgccggcagccgttctggtagcacgggacataggtcgttctggtcacggggtcataggcctgaatatagggccggaaaaacgtatcccactgccagaacccgccggtcgaagcggaggcggccatgttaccaaatactcgaatgttctcctccggaaccggataagtcgtaacaggaatctccgagtctgtaacgatcgcacccgaggtctcgcctccctgctccgtagtctcgctcacaggagcggcatagcagccgctcaggatcgctatcacggcagctgctgcaagcagcaggcttagcattcttcgactggtcaacatggccacctccctagttttgtaaggcagatcagcggaacgccgcgtcataattgctccgataaaagtcctccttactgatgtaacactgctcgaaatctccactcgaattgcgcttcaaaccagcgaagtaaccgttgcattcataatttgcgccaaatgccactacattcccgccgcgagtgtccagcgcaatgactgatccatctgcgatgtctaccgcccatgcgcggcaggtatcttccgttccgcaaatggcgatcacatgcccgtccataatctggtaattatagaacccccagtcccgctcataggtaaagagctttctttttgcctgctcctccagatcatagacatacagactgcggtcgacctgatacacagcgtactggccccagcttcgatgcgggtcgactgtccggacaaagttctccgaagcatccacaagcacggtctcctcgcccgttttgagattacggatcaaaaaacgaaaccggacaaactgccggtcatactcatcccatgctgttccctccggctgctgcgcaagccagtcttcaaattccggcgcatcttctgccatttccagcacgcggaggactgcgatgtcctcccagacgccgtagagatcatagttatcacaattttcgaggatcgtcgatatcgcccccgtctgcaggtcgacggagacgaggctgctctcctgcgcggcagctgtcagctgtacgccctccgtcagttcataggtctctctgttcgaaataacatatgcttttccaaaggatacgcagcgcagcacaca

SEQ ID NO: 11240 - DNA, 974 bp, Unknown
  gut microbiota DNA sequence
tgcgtcatgcccgctcgcctgttctttgatatcgtccggaagctgccggatgagatggtctccatcaccgttgaccacaagcagcaggtctccatccgtgccggtgcagcctttttccagatcacggccatggattccgaggactatcccgagctgccggacgtcaacggcaagagcggcgtgaccatgccgcagtccgcgctgaaggccatgatctccggcacgatcttctccgtgtctgaaaatcaggcccgccccatccagaccggctgcctgatggaggtcacggaggattccgtcaccatggtcgccgtggacagcttccggttggcccgccgcacctggcacacggaaaacgccgcgaaccataccctgaaattcgtcgtccccgccgccggcctcaaggagatcgagcgcattctggaggattccgacgagcccgtcaccttcacgctcggcgacaagcacatcctcttctccatcggcgacgccctgctcgtcagccgcgtgcttgagggcgaattcatcgattggcgccgcgttgtccccacaaactgcggcaccgtcctcaccgcgaacgtcgcggagctgacgtcctccatcgagcgcgtgagcctcatcatctccgaaaaggtcaaaagtcccgtccgctgcgtcttcggcgacaatatggccgatttccgcacggcgaacaccatcggctccgcgcacgacacctgctccatcgccgggaacggcggcgagctggagatcggcttcaacagccgctacctcctcgatgcgctgcgcgtcatcccgagcgaggaggtcacgctggagctgcagaacggcctgagtcccatcgtcttcaccccgtgcgacaaaaaatatgactttgcctatatggtcctgccggtccgcctgcgcagcaacagctaagaccggatgaacgttccatttctcgtcagcaatattctctccggcgtgggcatgtg

SEQ ID NO: 11241 - DNA, 6800 bp, Unknown
  gut microbiota DNA sequence
agaaagatcctcgcggtccagtctgtgaaccacgccctttccatggcggcctgctcgctgctgcgcggctggagcggcgcggtgcaggaggccgtgaacctcgtgcgtgacctcgccattctgctgttcggcaaattgaaccgcttctggcagatctcttttgtggcggcggcgctgggactcggcgcggcggtcacgtttgcgggaggctttcagtggtacggcctgcttcccgttctggccacggccctctattccgccgtcgtcgtccacccgcggtgcaatgcccgctggatcaaggcctctacggccgtctgcacgatgatgtgggcggtctacagcctctttatccgcaattacgtctacgttctgacgaacgtcatcacctcggcctccgccgtccttttcctgctgcggagccgaaagcaaggagaaacaaccgtatgaaagttcgtgtccggcgggtgtccgccgaggatgtccccgtggccatcaccacggaatttatcaagctggagagctttttgaagctggccaacgccgtcccgtccggcggcatggcgaaaaacttcatccagaacggcgaggtactcgtcaacggcgagccgtgcaccatgcgcggcaaaaagctccgccccggcgacgacgtccggtttgacggcgtgacctactgcgtccgcgccgcgcatgcagattgaccgcctcagcctgcgcggcttccggaattatgaggatgcgcaggcgcagttcgtccccggcgtgaacctgctggtcggcgggaacgccaacggcaagacgaacctgctcgaggccgtcagctatctctccacgggccgctcgttccgcacccgccgcgaggcggagctcatccgcttcggcgcagactttgcggagctgcgcgcgcaggtgcagtcgcaggagcgcacacgcgagctgcgcgccgtgctgttttccggcaggcggccgcgccagctgtggctcgccggggtaaagcagcgcagccgcgccgccctgtccggcgtgcttacgagcgtgctgttctgcccggaggaccttatgatcctcaaaaagggcgcgtccggccgccgcagactgatggacggcgtcatctgccagctccgcccgaattacgaggccgcgctggccgaatacggccgcctgctcgaccagaagtccgccctgctgcgcgagcgctatgacaacccttccctcctgcaggtcctgccggagtatgacctccgcatggcccagacgggcgcgctcgtcatttcgtaccgcgcccgctatgtcaaggcgctggcgcaggaggccgcacgctatcaccgcgaattttccggcgacagcgagtcgctcgagctgacctaccgcacggtctcgactgtgacggacccctttgccccgcccgagacactctgcgcccagctgcaggagcatcagcgcagccacgcccgcgccgagctcgagagcgcgcagtgcctgtccggcccgcataaggacgacttcgaggccgtcatcaacggcctgcccgtggcgcagttcgcctcgcaggggcagacgcgcacggccgtcatctctctcaagcttgccgagcgcgccctgctgcggcagggaacgggcgaaacgcccgtgctgctgctcgacgacgtgctgtccgagctggatgccgggcggcaggactttgttttgaaccagctccgcgaggggcaggtctttatcacctgctgtgaaacggaccgcctgaccagtctcggtcaggtgctgtccatccgcagcggcaccatcggaggggcgcagtaatgtatctatccatcggcggcgatatggctgtgcgggaccgcaccctcatcgggatctttgatctggacaatacgacctgctcccgcgacacgcgcgcgtttttaacggccgcggagcagggcggtcaggtggtcgacgtctccggcgctctgccgaagagcttcgtcctgaccgaggaattcggcatggaccgcgtgtatctcacgcagttcaacgccgcaattctggaaaagcgcatggaacaaaaggagaacacaattcatgtctgaagaactgctgaatacgactgtggaacaggaatacgacgcctcgcagatccaggtcctggaggggctggaggccgtccggaaacgtccgggcatgtatatcggctcgacgtccgccagcggcctgcaccatctcgtctatgagatcgtggacaacgccatcgacgaggcgcttgcgggctactgcacccacatcaccgtgacgatcaaccccggcgacaccatcaccgtcaccgataacggccgcggtatccccgtggacatccaggcccagaccggccgccccgcgctcgaggtcgtctatacggtcctgcatgcgggcggcaaattcggcggcggcggctataaggtctccggcggcctgcacggcgtcggcgcgtccgtcgtcaacgccctttccgagtggctcacggtcgaggtccataaggatggcaaaatctatcagatgaagttcgcccgcggcaatatcacgcaggagatgcgcgtcatcggcaatacggacaggcacggcaccatcgtcaccttcaagcccgatcccgagatgttcgacaccctcgtctatgactacgagacgcttcacacccgcatgcgcgagcaggccttcctgaacgccggtctgcgcatcgagatcgccgaccgccgcacggaggacggcccgtccgattccatgtgctacgagggcggcatccgcgagttcgtcctctggcacaaccgccacaagacgcccctgcacgaggaggtcgtctatatggcgggcgtccgccgcgacgccgaggccgaggtcgctctgcagtatcacgacggctataacgagaccatcgtctcgtttgccaataacatccacacgccggagggcggcatgcacgagacgggcttcaaaacggccctgacccgcgtgctcaatgcctacggcacgaagaccggcgtcatcaagaccgacgccgacaaggtctccggcgaggactgccgcgagggcctgactgccgtcatctccgtgaagctgacggacgcccagttcgagggccagacgaaggccaagctcggcaatgcctatatccgcacgctggtcgattccatcgtcaacgagcagctgtccacctattttgaggagcaccccgccgtcgcccgcaccattctcgaaaaggccatgaccgccaaccgcgcccgcgaggccgcccgcaaggcccgcgagtccatccgccgcaagacggcgctcggcggcgcggccatgccggacaagctgcgcgactgcaacgagacggacgccagcctgaccgaaatttatatcgtcgagggcgattccgcaggcggctcggccacgcagggccgcgactcccgcttccaggccatcctgccgctgtggggcaagatgctcaatgtcgagaaggtccgcgaggacaaggtcatcggcaacgacaagctccagcccgtcatcacggcgctcggcgcgggcatcggcgaggaattccaccttgataagctccgctatcacaagatcatcatcatggccgatgccgatgtcgacggcagccatatccgcaccctgctgctgaccttcttcttccgctatatgcgcccgctgatcgagcacggctatgtctattccgccatgccgcccctgtataagctcacccgcggcaagacgtcccgcgtcgccttctccgacgacgagcgcgaccgcatctccgccgagctccgcgcggacaatcccaatgccaaggtcgatatctcccgctataagggcctcggcgagatggacgcccacgagctgtgggagaccaccatggaccccgaaaagcgcaccctcaagcagatccgcctcgaggacgccgtcaaggccgatgagatcttcaccctcctcatgggcgaaaaggtcgagccgcgcaaggaatatattgagcagaatgcaaagtatgttgtgaatctggattattgattctgtttccgggcctgtccctgcgccccggcgaatgcgacaggctcccagacttgtcattgcgcagcttggctctccctttgggagagctggcggcgcagccgcctgagagggaaaatcagccctccccttgattgctattgccattcaaaagtgcctgcaaggccctctcagtcaccttcggtgacagctctcccagagggagagccatgggcgctttgctccccgcaataacacaataaaaaccccttcagataagcagcaaaccaaatcaaggaggaaaaaccttggcacatcataaaaaggactaccagccggaggacatccgattcccggatcaggcgatcgtgacctccgagctggtgcatgaaatgaaaaccagctacatggagtatgccatgtcggtcattgtcggccgcgcgctgcctgacgtgcgcgacggcctcaagcccgtgcaccgccgcattctctatgccatgtatgaggataatctgacggccgacaagccgttcaaaaagtctgcgacctgcgtcggcgacgtgctgggccgctatcatccgcacggcgacgcgtcggtctatgatgcgctcgtgcgtctggcgcaggacttctccatgcgctatatgctcgtcgacggccacggcaacttcggctccgtcgacggcgatccccccgctgcctaccgttacaccgaggcccgcctctcgaaaatctcgaatgaaatgctccgtgacctcgaaaaggacaccgtggactgggacccgaacttcgacgaatcgcgcaaggagccgcgcgtgctccccagccgcttcccgaacctgctcgtgaacggctcgagcggcatcgccgtcggcatggcaacgaatatcccgccccacaacctcaccgaggccatcaacgcctgcctgtgcgtcctcgataaccccgaggccacgctcgccgaccttatggaacacctccccggcccggattttccgacgcgcggcctcatcctcggccgtgcgggcatccgcgccgcctatgccacgggccgcggccgcgtgaccatgcgcgcccgcaccgagctggaggaattcggccagaaccgtcagcgcatcatcgtcacggagatcccctatcaggtcaacaagcgtatgctcatcaagaatatggccgatcaggtcaacgagaagcgcctcgagggcatctccgacatccgcgacgagtccgaccgcaccggtatgcgcatcgtcatcgagctcaagcgagaggcaaacgcacaggtcgtcctgaaccgcctgttcgctcagacgcagctgcagacgacgttcgccatcaatatgctggccctcgtgaagaaccagagccagccgaaggtcctctccctgcgcgaaattctggacgaatatctggcctatcaggaggaggtcattctccgccgcacgcgctatgacctgcgcaaggcacaggagcgcgcccacctgcttgagggcctgctcatcgcgcaggacaacatcgacgaggtcatccgcatcatccgcacgagctacgacaacgcaaaggaaaacctcatgcagcgcttcggcctcgacgacatccaggcccaggccatcctcgatatgcgcctgaaggccctgcagggcctcgaccgcgaaaagctccagaacgaatatcaggagctggaggaccgcatcgcctattacgagcgcgtgctcggcgatatgggccttgtcaagtccatcctcaaggacgagctgaccgccatccgcgacaagtacggcgacgagcgccgcacggaaattcaggacgtcgaggacgagatcgacatcgaggacctcattgaagaagaggactgctgctataccctctcgaacgcgggctatatcaagcgcctgcccgtcgatacctaccgcacgcagcgccgcggcggccgcggcgtctccggccagagcctgaaggaggaggattacgtcaagaacctcttcatcgcctcgacgcacgactatgtcctgttctttacgaacacgggccgcgtccaccgcaagaagggctacctcatcccggaggccgggcgcacggcgcgcggcacgaacatcgtcaatatcctgccgctcgagcagggcgagcgcgtgacggccatgctgctgacgcgcgaattcacggaccatgagtacctgatgatggtcacgcgcggcggcaccgtcaagcgcatccggctcgacgccctctataccgcccgcaaggccggcatccgcgccctgtcgcttgaggacggcgacgagctcatcgccgtcctgaagacgaacggcagcgacaatattctccttgctacgcggcagggcatggccatctgctttgccgagacggacgtccgccccatgggccgcgacgcagccggcgtgcgcggcatccgcctcgacgacggcgacgaggtcgtcagcgcagccgtggccgccgagggaaagagcctcttgactgtcacggagaacggctacggcaagcgcacggccgtcgaggcctacctgcgcggcgaggaccgtcagccgcagacgcgcggcggcaagggtctgcgcaactaccgcctgaccgagaagaccggccttgtcgcaggcgcggccatcgtcgatgatacgaacgacgtcatgctcatcgagtccggcggcgtcgtgctgcgtactccggccgccagcatcaacctctacggccgcgatacccagggcgtcatcctcatgcgcatcgaagagggtaaccgcgtcatcggcgtcgaggcgatttccaatacggaggaaaccggggaagaataagaaaatcgcgcaagacgc

SEQ ID NO: 11242 - DNA, 2120 bp, Unknown
  gut microbiota DNA sequence
tatcgtcagccgccagatatttcgcgtccatacgacaaaattcgcccccggcaggtgaccctgccgggggcgaaaggctatgttgttggtttttgtcgctcggccagcagccgcgcggcctccgtgcgcatggcccagaccatttcgcacagatatttcgggatgccggagacgcttcccgtctcggccatggccatggcggcgcaggagtggcagatgcgccggttctggcagccggtgcaggtgccggagagacgttgggccgagctgacgcgcgtcagctcgctccaggcctcgcggaagggtttgcccttcagctcgatgcgcggcttcggcatcatgccgcagggtgtcagccagccgtcccacgtcacccagaacgaggcgttgcccgcgcggcaggagatcgtgccgtctacggggtcgacgcagtcctcgtccagaccggggggcggggcgatgccgcgcaggatgttctgcaggaagcgggtgaagtcctcctcgccgcgctgcaggcggtagcgctccatgtgatagtgcgccgtttccgccggggtgaagcggtcgttccgcccgaccatggtcgggtcgcggcgcagcggggggaacatataggtgttgacctcaaggatgaggtcccgttcggcggcatagcttacgatgcgctccagatcgcccgcgttgtgcggcgtgagggagcagttgagcttgacgaggatacctgcctgccgcagcagggtgatggcgcggtccacgcggtcaaacataccgctgcggccgcacagggcttcgtaggtctcattgcccgcgccgtagagcgtgatgttgatgcgtgtgggcggatgctcggccagccgggccacgcgggcctcatccagcagggtgccgttggagttgatggagatgaggaagcccatcgtgctcagccgctcgtaaagcggccagaagtcctgccacaggaacggctcgccgccggtcagcagcaggtagagcatgcctgcgtcgcgcgcctgctcggcgatggacagccactggatcagcccgacgggcgggcgcggcgaggcggcgacctcggcgggcgtcttacgcacatagcacatcttgcaggcgaggttgcacaccggcgaaagctcaaaggtaccgctcagcggcgtgagtgtgcggctggcgcggtcaaaaagatactgtgtcaggcgtggttcaacatagcgttcaggctgtttcatgttccaactccgctttcaggcagtcgaccgcggcgcggtcgggcgtacaggtcagggcgtaaacgggaacgtccagcgccgccagcaggtcgcagacccgcgcgacatagcggtcgtcccataggttgacggtcattcccgcatacaggccgcggaacgcggcggcgggggagaggcggcgcagcgagcacgcgctgccctgcgacagcaggacgatggcgcgcacggggcggctctcgttcacaaagcagttcgaggacccggcgtatggcgagccgaaggccgtccacacgccgtccatgcggcgcagcacggtgcggtcgccgttaaggagctccgcgccctcatagcgctgccagaggtccgcctgcgtggacttgccgatgccggatacgccggagaacagcagcccgccgtagcgcgtggagacgaacgaggcgtgcaggatcatggcgtcccgctgcagcagcagggcctcgagggcaatgtgggagaagcagttggccgtctcggagaaaaagccccggtcggcctccagatattcgatggtctcgcgcccgtccggctccaggtggccgacggcgtaaggccggtcgccctcgcgccggtcgtggaagacgcgaaaaaagccgtcctccgttcggaagacggcaaaggcataatttcgcagaagctcgcggccgcggacctcgggcagagcctgcacaggcagcagcgagacagtcaggggtgcttcgccgggcgcacagaggaagggctggaagccgcgcgtgacctccggccggaacggcatcagcaggcggatctcacagcctgcgatggagaaagagatcgattccacagggggtcaggactggaagatcttgggcataccggcagcaccgttggtatagc

SEQ ID NO: 11243 - DNA, 685 bp, Unknown
  gut microbiota DNA sequence
gccggatttgtcattgcaagaaggcgcggcgataagaacggaggtatccttcatgaaaaaagcgatcccgattttactggtcgtatttctctgcctgcttgtcgctttttccgctgtctgcgaataccggcagcagcatccggtaccggaggagctgcggctgtcgtttgatgccaacagcgcatatcggttccggaatgcgaagggagagacactggagtatgacgatcttgatttcagcggtgatatgcagatcatagacagcgtgttgggcggtgttgacgcgcctccgtacttctacctgacgcttccatacagcaaaaggcttgaggctgactttgtggatggaggaccggatgcttacgttcgcgtcagcacggatctggccctgtggggcgtagaaggaagcggggtccaaagggccgtgttcaccggctcgggcattgagaccacgggcgagaatatggactatacggtacgggcctgcgttgttgatgacctctatctggaggcgaccggcagcggggaaagccatatccgttgtgtgcagaggggcgggaagctgtatctcactgcgcaggacgccgcgtttaccgtgaagtttaaaagcttcctcgaagaagggtcgatggactctatggatttctctgccggagagacctgcaccatccgcatccgcgacggc

SEQ ID NO: 11244 - DNA, 542 bp, Unknown
  gut microbiota DNA sequence
ggcgaaacagcgcttgacaaggccgctctgccgtgctaaacttgtagttgcacagcggacaaacgggcagagaatgcccgcgctgtaatgacaggctgattgccgcaggagtgacagctatgcattcttttgagagcgattatactgcgggcgcgcgggtagagatcctgcgccgtctgaacgagacgaatctggagcagctccccggctacggcagcgacaaatactgcgagagcgcaaaggaaaagatccgcgcggcctgtgactgtcccggcgccgacattttcttcatggtcggcggcacgcagacgaacgccgtcgtcatcgactccatgctgccgtcctacggcggcgtgatcgccgcgcagaccggccacatcagcgaccacgaggccggcgccatcgaattcacgggccacaaggtcatcgccctgcccgtctacgacggcaagctccgcgccgaggatgtctggatgtatatgaaggactactggcaggatgcgagtcaccagcattttgtctatcccggcatggtctacatc

SEQ ID NO: 11245 - DNA, 222 bp, Unknown
  gut microbiota DNA sequence
gcaaacagtctgcgtgaagcatcctgccccttcatatcaaaatatcgatttaccgcagcttcgtcataaacatagggctgaaacaggtgcatatccatatagatagacgcatcattcgtccaatgcttgtacagttcgtgacatagttctcgcgtcatcgcctttaactgaattgttggcatgttataccttacctaccttatcattccgatttattgcttt

SEQ ID NO: 11246 - DNA, 448 bp, Unknown
  gut microbiota DNA sequence
ctcggcgaatccatatgccatttccgggaattgctacatttcccaatcagcagacaaatccacccatttgggattcatcgtcgctatcagcgcatctttccttttgcgggaccagctctttatctgcttctcacgctcgattgctgctctcacatccggtgttgtttcaaaataaactaattttctgacacaatatcgctttgtaaagccatcctcggggccttcccgatgctcgtacaatcttctttgcaggtcgtttgtcatgccggtgtacaggacagtatttcctttgttggtcaaaaggtagacataatactgtttcatgctttgactgcctttctgggggtcgaattcgccgaagcttttctgttatccgagcgagtactgcgagattgccacgtcgcttcgctcctcgcaatgacaaatcggaggtgcgtaccgtttttac

SEQ ID NO: 11247 - DNA, 11752 bp, Unknown
  gut microbiota DNA sequence
catgaatgccctccttgataacaacatggaatcgttttattctaaagaataattttattttatcacacgggcgtgctataatgcaatcgctacagaaaaaacggagggttcttatgaaaacgatctggaaaatggtgcccggtctggcaatggcgctcgtcattgcggccgcggccaagggactggagtatctcgaggggctggcgggcctgcacctgatcggcgcgtccgtcattgcgctgttcatcggcatggtcatcaaccgcttcttcaagccaaacgcggtcacgtcgcccggtatccgcttcacgtccaaaaaggtgctgaagctcgccatcatcctgctcggcgcgagcctgaacatcatgacggtgctgaaggtcggccgcttttcgctgacggtcatgcttttcacactggccacctgcttcggcgtaggctatttcatcggcaaagcgctcggcctgaactggaagatgagcaacctcatctctgccggaacgggcatctgcggcggttctgccattgcggccatcgcacccgtcattgacgcgacggatgtcgacgttgcctacggtatgtccgcgacgttcctgttcgacatggcgatgatcgtgctgttcccgatcctcggccgctggctcggcctgtccgacgccgcctacggcctctgggccggaacggccgtgaacgacacatcgagcgttgtggcggcgggctacgccttcagtgagcaggcgggcgatttcgccacgatggtgaagctgacgcgcacgctggcgatcatcccgacggtgctgatctttgccctcatcggcatgcatgtgaaaaagaaggaagcagcgggcgacccgtcggccgtcagggtcaatatgaagtccgtcttcccgtggttcatcctcggcttcctcgctctgtgcggcgtgaacagcctcggcttcatcccggcctccgtcgcctccgtgctcaaggatatcagcaagtttctcatggtcacggcattggctgccatcggcctgaacacgagcttctccgacatgcgcagggcgggcctgaagcccatgctgcacggctttatcatctctctgctcgtcgtgctggtcgccatcgcagtcgaatatgccatcggcgttgcgccgagcggtacgctgctttgaaagtatataaaaatccgcgctgtcctgctgcaggatggcgcggattttttatgcgatccgtttttccttccactttccggtgcggtaatgtgcgaaggagatgacaaagtttgccagccagccgaccggcacggcgtaccagacgatctcgacgccccagagcggcgcgcagagccacgacagcagcacgcgaatggccagattgacgaggtttgcgatcgtgaacattttcacgtcgcccgcgccgcgcaggatgccgtctacagccattttgaagccgatgaagcagaagaaaaagccgatgaactgcagatagtgctcgccggtcgccacggtctcgggcgagggggcggcatcgaggaacatggcgatgatcggcgtgcggaacagctccagaaggacgcacagcagcacggagatcagcacaatcatccgattggccgcgcggtagccctgcggcacgcgctccggcttctctgcgccgatgttctgcgccgtgtaggaggacagggcattgctgatggcggccatgggcacgatacacagcgattcaatgcgcgccgcagcggaaaagcccgcgaggatctgcgtgccgaagccgttgaccacggactgcacgagcatcatgccgatggagaccgtggactgctgcaggatggacggcagggccacgcgcgtcatggcgtgcagctctccgaagcggaacagaccgttcgagcgctccgggatgcgccgcagctccagcaggaacacgccgaacgacagcacggcggacaggccctgcgccagaaacgtggcataggctgcgccgggcacgccccggtgcagcacggcgacgaaataccagtccagcacgacattcagcagcgaggaaaaaatcaggaaatacagcgggatgcgcgattttccgagcgcattgaaaagggaggaaagaatattatagaggaagagaaagggaagaccatagaaatagatattcagataggtgactgcgatctccagtgcgtcgggcggagtcttcagggcggtcatgatctgctcactgcacagcagcccgacgccagccagcaggacgctgacggccagaaacgtcagcagggcggtgtagacggcggacttcatgcgggcaaagcgcttcgcgccgaaatgctggctgatgatgacggaggcgccgatgccgccgccgatggccacgcagatgaagatcgttgtgagcgcggaggacgcgccgacggcggccagcgccgcttcgccgttgtagtggccgacgatcgcggagtccacgatggtataggcctgctggaagaggttgccgacgatcatcggcagggagaatttcaaaagcgcccgcgcgggcctttcggtgatcagatagtcggttccgggtttcaggacagtcgcttccttccgcaggtaatcattccttcatatcataccgaatgcggagagaactgtcaagtcggagcccgatcatgcacgccgtctatgattctgatgcaaaaaaacaattgtatttttaggaaatatttgatattattgaatcgataaaacaatattgaataaacaatggatcgatggaaaggagcaacggatatgttaaacggaaaaattgcgatcgtgaccggcggaacgcgcggcatcgggcttgccgttgtccggacgttcctgcacaatggggcaaaggtggcgctgttcggcagccgggaggcctccgtgcagagagcgctggcgcagctgcgggaggagcagccgaactggccggtgatgggcctctggcccgatctgacggactatgccgccgtggagcgggcggtgcaggaggtcgcgcaggccttcggcggggtggatattctggtgaacaatgccggcatctccgcgcgggagccgctggcggattattcgcccgaggcgttccgaagcatcatggacctgaatgtcacggcggtgttccacggctgcaaggccgtcgagccgatcatgcgcgcagcagggaagggctgcatcatcaacaccagctccatggtcagcctctatggtcagcccggcggcgtcggctatcccgccagcaaatttgccgtcaacggtctgacgcgcagtttggcgcgggagcttggccgcgcaggcatccgcgtcaatgcggtcgcgcccggcgtcacgcggacggatatggttgcggccctgccgcaggagctggtcgaccgcatcagcgcgcccatcccgctcggccgcatcggcgagccgcaggaggtcgccaacgcctatctgtttcttgccagcgatctggcaagctatgtaacgggtgagatcctgtccgtcgacggcgcagcgcagacctgagcggaaagctgccggggggatacttgatccggaagccagaataaaaacagcccctgcgctgccggtgggaaagagaccggcagcgcagggaaattttcatgccgtcccgcgccggaatggctgcgggaggacggccggggcccggcttttggcaggtcctgcgccgcgtgcgatgcctcttcgcctgcgggcaggggagcgggaccccttcatcctatatatgtcttcagaaacgcgttcctgacaggttttttcaaaaaaatttttcgatagatgcgagaaagatatatttacaggcgatacgtcgcttaaaaatatacgaaaacgaaaccgagacaccagacggatgccccggttttacgcttctgcgtcttccatataattcggatgcagatacaataatgtcggaatgccgttcatgactttttcttttttcagcacagtcagaacagcctggttttccagataatctatcgtggttctttcaaatgcggacttgcaataatatcgctgcccggtacccttgtcgataaacacgaagaaaatttcgccggagtgcaaatttttaatgatgtattctgcgtcaattttgcagtgaatgcgtaccaggttcggacgaaaacgtgcaatcaggaactcggtgtcaagcgtttcctgaagatgaatgatcgcattgagtcggcctttgatccgcagccaattccggcttcgctccatgtttgccgcttcaagctttccgctcaaaatggaagggatcagcctttcaccgtagtattcggatgggcgcagaccgaagtctacatcctgcgcatactgcatcccggcaacatgtgggaaatcagcaaaggagaagctcaaagcaaaagaagatttctttcctcgccttccaacggtgatccggtattctgttcctgtcaattgctgccatgcatgggcagcttcccgtaaaagacacattccgacctgcttttttataaaaaagcggaaccctgcattaacagagctccgcaagaggcgttttcattcggggaaaaccctacgtcagcctgtggaaaccgcctaaccctcggtcaaagctccacaagtgtacggcatgctgaccccatcacttgcttcaacgctgcgacagacaaacctgttgctgtctacgggaattttcattccctaggcttagtatacacgctctgaactgaaaaatcaacatgaatttcgaaaaacgaaggcccctgcgctgccggtgggaaagagaccggcagcgcagggaaattttcatgccggcccgcgccggaatggctgcgggaggacggccggggcccggcttttggcaggtcctgcgccgcgtgcgatgcctcttcgcctgtgggcaggggagcgggaccccttcatcctatatatgtcttcagaaacgcattcctgacaggttttttcaaaaaaatttgaaaaattttccggaagagttctgtaacaggacataaagcgatttcaggaacaggaatggtggctcttttttctgctgggaggcagcagaagcgctaagggagcggttccgtgcaggcgatttgctcattgacaaacagcagtctggtcaggctaacaacgaacagataattgttgccattcttccggacgtaggctccaatataggaccgcgttaagtcaatgcttgcctgtacgttcttctcaatggtgaggctgtgagatatattgtaataccagttgtcgtaggtgtgcttttcctgcggcgtgatcacgtcaccacccagaatgaccagattttcagagtgtgcgtattccagcacatccggaatatcacagacgtgccatgcaagctcaccccaatatgtttcccgcgccttctgcagcaattgcggcggatagtattgaaatgtcatagcagcctccggcaaacgaaaatgatatcaatacagcgctctcatcagggcttccggtgcaaattgaaagctgatcagcattgttaccagaaaggaaatcgcaatcgaaatgataaagaaagagaccgatcgtccacggtggaacgcggctgtactttccagctttttccacggcagaacgcgaagcgggagccagtgcgccagtgcaagcacgagcaggactacaagcacccaaagaggcagcagtcggaaggtcccaaccgcagaaagggtgaattccagccgcaggagcggcgtgtaaagaagtccacaaccaatgctgaacgccagcagtagaatcagctgtacgatacgctgcagcatcgtgggcacatatctcgcgccgcagtggccgcaggaaagggccagatggaaacgatttgtcagaaagaagctgaatgagagcgggatattccgcttggcggagcattgcgggcagctgcttaattccataagaatccctcctttatcgcatcagggccgtcacggcaaacaccagcagggacagccccagcgccgtgagcatggaccagacgatcgtgggcagcagatattcctgctgttccaagggcttatttccggaaatcggacgccaccttccgaagcggcgaaggagaactccactgagtccatacatcgcaagcagcacaaccaatgacaatatgctggaaaagggataggccgtaattcctgcaagatattcattgatccaaacacccagaaaatagatgatcgttacgatcacgcccaaccggggcgacggaacatagtatgttccgcagtttacgcatttcacggccactgaaaacatgtaaaagaacttgaaactctgtgtgggaaatgggtcctgcgtttcctccggttcgcatttgggacaataatccagttccagatcaacttcgcgcatgtggggcctcctctcatcctatgtagatatcgtgttttcacaattttgcagttttctgagattctcctcccatacctcgtccccaagcgcctgcgcgcacagaagacttcccgcgatcgcccgatggagtgccgccgagttctgaaaagcctgcagcctttcgaggatgagaaaagcgcccggccaattcatgtcgcgcagccatgccaacaggttttccaaacaggcgtctaattccgcatccgaccgcattgccagagcttttgcgcaattgtcccacacgtttttgttgtagtgctccgtgcagggctgcaaaaagacttgaaagttttccacctgcgccgcctgcgcaagtccggcggcctgctcctcggcgctgttgttccagtccagcatccccatgatcacatcgatctctgtcattttttacatcctccggtgctcacacgaaccacaccgggctgagcgcaattgggggccaccatgcccgttccttcaaagcgcgggttctgccgagcggggaatagtacaggcttgccctgccgttcagccacgcggtactgacctttacgcgccaaaccgattcgccgagcttccgaaagcacagctttacctccggtggctgggaatagtcggaaaagcgctttttttcgctttccgtcagcgcagcaaacagcggctctgtgatctcagcggcccttgcagcgcagtccaccggtgcgttctcctccggaacgaaatacaatggaccgatttggagcgcctgctcccggaatttccgcggcagcgtcgttccgagatagcggatcggcatggcggaaagctgctggcatacgttctcaagctgtgcctgattcccacgcaggtagcgccgcgtgatgcccttgcgccagatcatgaatgacgcggcaagtgtgatccagaatgcggcccggtcggcaaaataccagaatacgaccgcgttatggatctcaatgtccacatgaaagggggaaaggatcggcaggatggcccgaagcagcacatagctgccgccgatggcgaccatcagcacaaagggaatccgtctcagggcgagcttcatcgcagggtgtgctcctttctttctgtcggaggttacggctgcggggaggggggcatacggcgttgtcagcgacggaaaaagcagatcagcgcaaaataggcaaaatagaaagtcaaagaaatgccaaaccaaatgaaaatccgcttttggctttttcggtcgctgcgaaactgcagctgtttggctttcagacccgtgggaaactcctgccaccgcccgaaggtcagaatggcacgctcgatcagctcgctgatcgcgaagagtgacaagcaggtgagcagaagcagaacgaaagccagatatgccggaccgtcagtcctgacagccaggttgaggagccagataaggatcggaaaatacgctgcagcgggaagcagaaaaaggccgttccggtaccagtaccacagcttcggcgggcggatcagctcgccgcagatcgcgcagcggccgtaccatacgtcctccagaaaaatgtcctgcccgcgccgaaagcgcgttttcgcgtcgggaatgctgccgtcctttgcggcagggatatgccgatgctccatatgctgcacgcccctcttgtggttaatataatgttacgagttgcaaaaaaaacaaaatacatattaaaattagtatatcataatcgcatagaaaagaaaagatatctttgaaattaatcgaaaaaatattttttgagagtgccttttcacgttaatgacccgcggcggcagaattgcaaaacaaaatgcttcaaaactctatttgcgattctgaacgcagcgagatcccgaaggacttttttggcaagctgagagaagacccctgcgcagccgggggaaagagaccggccgcgcaggggagaccccgccgccttgcctgccccgggtgtcaaaaaccgcgggaaggacagcggggaaaagaagggcggttccgatatccgcgcgaccctgcctcgtggcctgcgcgggtacccacactcggatgcccttcaccctatatatgtcttcagaaacgcattcctgacatgttttttcaaaaaatttcaaaaaatttttagacagatgcgcgataaatatcattacaaagcatacgtcgcattccgaatgcgggaaaactgcacggaatgcagaagcaacaattctgggagtcctattcaatatccgatatggcctcggcctgtatccggacgatcctatcctctgttgccgcaaaaggcagcttcagtatggacacgctctcatcctcgaacatcacggtaagttatttcagcggcaattatatatgcgcgtcctgttcaaggacctgcggcaggaagaaacagcaggccaaaaccaccggcgcagccggtaattttgacctgtaaaaattaaaaatcggtaagtttcgacagaaactcaccgatttttggtccgagtgtaattataggatctcaaaaaatccagtcatatcaatggttttagcgcagcaagtaagaggcttttatccccaaaagcaaaaaatcaaacgataagatgcaaagcactcagttctacttatgaactgagtgcttttttgaagcaatatgagtatagggttaagcatatctttgattaaggggttgcataggttagtgcaacatgtagctaaagctcgtaaatatgaggatgtattagttgcataatatgtgggaattattctgtgcaaaggttgaatattatggacaaactcacgaaaggtgtgctataattatgaaagagaaattctgggagggaaaggctatggatacgagtgaaatgaaagccgttcttgatgcggactttgagaatttgctgcgaaaattacaagtttatgatgaagttgtgaatggagtggcagtttgcgaattttgcaagaccccagttactctttcaaatatttctatggtctttccaaaagatgggcgagtatgcttctgctgcgataaaaaagaatgtaccgatgaactactaaaacaaagaaggatttgcgaatgaacacgactggtgcaactgtttgggatttcctaatttcaatgcgccttcctatttggatagtattgatcattattatccttgtgttttgtattttgaatgcagacaagcttttagcgttgagtggcgctattgcagggctttttagaaacatatcaacgagagcaaataagaagtatatttcagcaggtatccgcagtagtgttatttctgcctcaaagaaaatcgggttaaatgaaactgggattttgccatctgacctaaagattaaatgggcagataatgacgatgtaaaatcctttttcgatgatgactgcgtagttgtaagaattagaaattctgtcaatcccaatgagaattatgtaaatatcatatatcaatttgtatcgagtggtttactgaaaaatcaaaagcactactttgattcgaagataatgggagcttccgctctattggtaactcagaaaattgttgcactttctaagccaacagcaaatgcattcttcatcgataatgtcttcaatccagccatttcagaagatgaaattataaaagatgatttttcacaactccagcgaatagatttcaatggaatgttgttcaatatctatcttaacgagctaatgaaggctgcagcgactattgaaggacaggtacctgatccgtgcttaaaagcggaaagtgcagaattgttgcgatttttatacagaattgcaaatcgagagcatgatgaacaaatagaacttacatatttaggtatttactttaagattggcattttgttagcggcaaatgatgaaactttgaacaagaacggatggtctggccattttcattacgcgaagaaactactggatcagggttgcaacacaatatatgtctttggaataggtaaaaaagcaaatgtagcatctaaaattgcctacgcagtaaaagattccgatgacagaattgttaagtcaataacccatcaatacagacatcttaatatagatagaggcattcgcacgacggctgtttgtgttgaattggatacatattgattaattattaaacgccgcccaacaggacaacgggcggcgttttcatatataaaaccatgaagggaggtcacttccacccggccagtctgcggactggcttttttcatgccacgaaaaggaggtttgcaaatggcagatgataagaaaaacattccagaggcagccccgcctgccgaggcacccgctcccgcagtaggaaatgccgttgtgccggagcagcccgctcccgagcctgcgctgaccaacgcagagacggtcatgctggaacatgaggggcaggcggcgctctttgaaatgggcgaagctgtacccaatcccgccgacgcggttacccacgccgaggtggaggagcctgccactcccgaagtacccaaaaccgaaaaggaacaggatcagccgctcgctcccggcaaggacaatcctgccccggcacattccgcaaggtggtgaattttgccgccgcccgtgaggaggcggccaaggaggagaaaaaggcggtcaagcagaaatcgcccacggaaaaggataaggccgccaagcccggcagaggtcgcccatccaaggatggcaagaccgctcccgataaggccaagtcgcccaaacctcgggacaaaaagtcccaaagcaagcccgccccggagaatcctgtcgtggataagggcggcgctcccgccggtgcggaggtcacgccggagccatctgcgccccgtgatgctacccgtgccgagaaagaggaaatcgtctatctcaatttggcagacctgcacccgttcaaaaatcacccctttggtgttcgggacgatgcggaaatgcaggggcttgtggagtcggtcaaggcggcaggagtcaatcagcctgcgctggtgcgtccccgtgaggatggcggctatgaaatcatcgcaggccaccgccgccagcgggaaagcgagcttgccggatttgcgaatatgccatgtataaaaaagaaacaagcgacgatttgcggcaggaagtgatcttcgacaactggggccgtacggtctgcacctacacgaccaatacggacagcaccgaggtccttggcagctcggcggcttcctatgtgcagaacagtggaacaagtcgcaagaataatcgcacgctcgacataggttcatccggtatgacagcagtcaatctgctcatagacggcggcattgaaaagagcacagatagctggacttcctcttgcagcgcaaacgccagtgccgctgcaagaactactatcacaaacgatgagaaccgccgtcatggtacaggtggactaaatctctacctttcttccagtgcgacaag

SEQ ID NO: 11248 - DNA, 480 bp, Unknown
  gut microbiota DNA sequence
tattgaaaagagcacagatagctggacttcctcttgcagcgcaaacgctagtgcagctgcaagaactactatcacaaacgatgagaaccgccgtcatggtacaggtggactaaatctctacctttcttccagtgcgacaagcagcaactacgccggaatttaccgcagcgcatcgctgaccggtgggaagccctacacgctgtcggcctatttttccgccagttcctatatgaactggaacagcggtgcgaaattggagctgcttgtgcagaacagcagcggcacgacgctggaaacgcatttgctcacggacgccaagccaaacgccgctatggaggacggctggcagcgcgtcagcgcaacctacacaccgacaaagagcggcacctaccgtttcctgtttaagctcagcggctgcaacggcacggcttatctggacgacctgcaattagagcaggcggaagccgcctcgacctataa

SEQ ID NO: 11249 - DNA, 416 bp, Unknown
  gut microbiota DNA sequence
tgtcagcgcaacctatacgcccgcaggcagcggcaactaccgcttcctgtttaagctcagcggctgcaacggcacggcttatctggacgacctgcaattagagcaggcggaagccgcctcgacctataatctgctgcaaaacggaagctttgagaacacgctgtccggcaactggtcaatcaacggcatgagcaagtcgtctctcactaccacattaaagccctttggtacatctggcgtgaaagtgactggaagtcagaatgccatccggcgtgcaagtcagactattacattgaattgttcttccgacacgaccttcctgctttccggctgggcattggcggagtatgctgcgccgaattctgtgcgggaatatgagtggggaaaacgctatttcggcctaatcgcagaaatta

SEQ ID NO: 11250 - DNA, 557 bp, Unknown
  gut microbiota DNA sequence
caacgcagccgaccagccccggcgagatcatgtccggcggcgagggcgaaccggtcgaggcggacgttcctgctgaagatgaaactgttgctccgcagggaacccatgttaccagcaaacagaccgttacccatgaatacctgaggaaacactaattggtctaatgagggaataacaatgaataacttcaagaaacaattcaaacaaggtgacgactattgcgacatccgggcggactatcgcagcctgatctccatcgggaagagcgttgaggaaacggaggacctgctgctgcgggcctactgtccgaaggagggagacctgctgttcacgcccacgttttggctctccctcggcatctgcgaatgggaaactggccgactgacgccccggacgaaggaggaggcgctctactgcctttcgctatatcaggagacggtcgagcagcgtttgaacgccgggccaaacgaacggctgtcggacatgctgcagtttttccgggaaacgcaggaaatgctgctttcgcccctgccggaggccaaaaagatcagtaagcc

SEQ ID NO: 11251 - DNA, 6735 bp, Unknown
  gut microbiota DNA sequence
gtggcaatctcggggaggcactcacggttcgtaccggctgccgtgaaaacgctgtgcaccgattgcgtctgtagcggcgctcactgagcgcctttagcagttgcaggttttgaagtgtgaattccgtggcacaagaccttcaagcttgtcattccgaggagcgaagcgacgtgggaatctcttgcaaccggttacgttttttgccgaggcccacttgttatccaacctggtactgcgagattgccacgggcgcaaagcgccctcgcaatgacaattcgggggcgttcaccatgatgacgttaccctgtacgagttgccagcgcagtgccgggtctggctgtccccgcccctacgatcgtttactgcgggcccgcgccgttataatcattcgcggcggcggggacgccgcgggcgatgatctccagcgcggcgtcggcggcccgggcggccgcctcggtgatgagcttgtcttccgggccggtgaaattcgacagaacccagtccgcaagatcgtaatcgggatgcggcttcgcgccgacgccgatcttcacgcgggggaagctctggctgttcagcccgccgatgatggacttgatgccgttgtggcccccggcggagccgtctgcgcggatgcgcagacggccgaccggaagggaaatatcgtcaaacagaacgagcacgcgctcgggcggcagcttgtagaaccgcgccgcgtccatcacggacaggccggagttgttcatgaacgtctgcggcttgagcagcagcagcttttcgccgcctgcggatgcctgcgcggtcaggccgcggaagcgggcgcggtcgatcttcacgccgagcttttccgccagcgcatcgacggcgcggaagccgacgttgtgccgcgtgcgggcatagttctggccgggattgcccagacccacgacgagccagccgcaggcgggcgctttggaaaacagcatcagaacaggctcgagatcgacgtctcgttgtagatgcgggtgatggccttggcaaagatcggcgaggcgtcgagctggcggatcttcttgccggtgtagtctgcgggcagcgggatggtgttgagcaccatgagctcctcgatgcagctgtcttcgatgcgctgcgtggcgttgccggagagcacgccgtggctggcgcaggcatagacggccttggccttgccgatggtcttgatggcctcggcggcgttgcacagggaaccggccgtgtcgacgatgtcgtcaaacaggatgcaggtcttgccctcgacgtcgccgatgatgttcatgacctcgcacatgttggcgcgctggcggcgcttgtccacgatggcaaggcccatgtggaccttggccgcgaacgtgcgggagcgggcgacggagccgacgtccggcgaaacgacgcagaactcatcgtggttgaagagcttctcgtcgaacttggacatatagtagcgggtgaacagcgggttgccgagcatgttgtccacggggatgtcgaagaagccctggatctgcgcggcgtggaggtccatcgtcagcacgcggtcagcgcccgcgcgggtgatgaggttcgccaccagcttggcggagatggggtcgcggcccttggccttgcggtcctgacgggcatagccgaagtacggaatgaccgcagtgatgcggcctgcagaggcgcggcggaaggcgtcgatcatgatgagcagctccatcaggttgttgttgacgggcttgcaggtggactgcaccacgaacacgtcgcagccgcggacggattcgttgatggagacggagacctcaccgtctgcaaaggcggtcacggtgctgtcgccgaggtccagccccagctcggcacagattccttttgcgaagggcacgttggcattcgcagtgaagaccttgatctcttttccgtgagcaatcatttcgttacctctctattttccgagcgccgcatccgcacggcgctcaatattttgcgagcgcgatggattatttcttgtgctttgcggcccattccttcttgttggactggcgggcgcgggcaatgccgagcgcctgcgcggggacgtcctccgtgatggtggagcctgcaccgatgtaagcgccgctgccgacctgcagcggggcgatgagggcggtgttgcagccgataaaggcgccctcgcccacgacggtctcgtgcttctgcacgcggtcaaagttcgcggtggtcacgccgcagccgaagttgcagttggcgccggcctcggtgtcgccgaggtaggccagatggggcacctgggtattttcgcccagacgggcgttcttcagctcgacaaagctgcctgcccggacgctgcggccaagctcgcagccgccgcgcacgctggcataggggccgatgacggcctcctgccccacgcgggactcgcgcacctgcgaggcgttcaccacggcgcgcgcgccgatgacggaatcgtcgatgacgctccacgggccgatgacggcctcctcgccgatgacggttttgccgcgcagcatcgtgccgggcagcaggcgcgcgccgggagcgacgcgcacggacggctcgacatagcagctggatgcgtcatagatctccacgcccgtgcgggcgagggccagcaggcggttgcgctgcagcaggcccgcgatctccggcagctcggccggggaggcgacggaatacatggcctgctcctcgttcatgggggagccgttgtccagcaggaagcgggcaaaggagaagtgctcgtcgagcgcctgcatcagctcctcgcgggagacgccgtagacgcgcgggaagcgccctgcggcctgcggggcgagctgcggcagatagacggccgggccggtgacgacggtgatggtgtgctccgcgtcctccgcggtggaaaggaacacatgcagcaggtccgcaggatcgctgtccatcgtggtcatgacctccgcttcggcgggcaggcacgcgcgggccgcctcgacatagcggtcgtgacagaccaaaaagaagcgcccgacaccgctgtcgaacagagcgttcgccagccacgcgagcagcggcgcgcccatgacgctctgcagcatcaggggctgcggatatccggtttttgccgtatcgtccggaataaagatcactgcggacattccaatcatggcatacggctcctttcacatgggaatacggctccattatatcaaatctttccgcattcgtccatatgttttcctccggaaagcaaacaaattcctgcggcgggccgtcttcttttttgtcggaaccccataacggcatttttgaacaggccggggcacggcttcctgcacaggctgtggaaaacgccaaaatttttgccgctttgtgggcaaagtccccggatttcgggcggggagacggcctgcacagcccaaaatccctgtgtataaacctgtgcaaactggggataactcaaggaaatgtgcacgggtctgcaaacagggcgcgggattatgtctaccaacggggcatgcgctccactttgcctccccacgcggcgcaggcccggctctggtgaaattgccgaatcggcccgacatttttcggcgaaatttcccgccggattgtagcattttactcagggtttatgctataataaaaatcgaacatttatcgggcgcgtacggccttttgtaggggcggtgtcctcgacgccctgttgggtactgccgatccgcacagggctgccgttaaaatggtaatggccccgacggggcctgtagcggcgctcactgcgcagccgttggcggctttgccgccttacggatgcggcgtgccccttgcgggttgtgagcgccttgtacggataaattcaaccgcgcaagggcactgatgcaccgttgcaccaccctgatgtgtcattgcgaggaggccaacggccgacgtggcaatctcgcaggacatggttggatgacaaggtacctccggcgaaatcgtaactgccttcccgagattgcaccccaagggcacttcctcgcgcttcgcgctcagggcgccacgtcgggctttcgccctcctcgcaatgacagaccttcggcgttcaccgttttgctgacagcctgtttattataccagtgcagcgccgggccgggctgtcctcgccccctgcaacgcgcggccggcagtcctattgtatctcattttcagtatgcattatatgcattgaatttacacttttctcccggctgatgccggaatgttgataaacggagtttccgccatgctcgaactgctctcccccgccgggtcccttgatgcgctgcacgccgccgtctgcaacggcgcggatgcggtctatctgggcgcggaggggttcaatgcccgcgcaggtgcgcgcaatttcacattggacgagctgccggaggcggtgcgctactgccatgtgcgcggcgtgcgggtctacctgacgctcaataccctcgtcacggaccgcgagctgccgaaggtcgcggagcatatcacggccgcggcccgcgcaggcgtcgacgccctcatcgtgcaggacctcggcgtggcggccctttcccgccagatcgccccgcagctggcgctgcatgcctccacccagctcacggtgcactcgctcgagggcgtgcgcgagcttgccgcgctcggcttttcgtgcgtcgtgctctcgcgcgagctgccgcgcgaggagatcgcctatatctgccgcaacagccccgtgcgcatcgaggtcttcgtccacggcgcgctgtgcatgtgctattccggccagtgctatatgtcggccgttatcggccgccgctccggcaaccgcggccagtgcgcccagccctgccgcctgccctatggctacggccggtttgaaaaccgctatcccatgagcctgaaggacaattgcctcatccgctacctcggtgagctggcgcgcatgggcgtggccagcctgaagctcgagggccgcatgaagcgcccggagtatgtcgccatcgtcacgggcatctaccgcgctgcgctcgacggccgcgaggtccgctcgtcggacctttccgcgctgcgcgccgccttctcccgcgagggcttcacggagggctattatctcggccgcacgggcccgcagatgttcggcacgcgccagccggagcggccggaccgcgagctgcttgcagccgcccgcgcgacctatgaaaatctcgagccccagcgcgtgccggtggatttttacgccatcgtcgcgcacgggcagaacgccatgctcgccgtgcaggatgccgacggccacatctgccagacgcagggggccgttccgcaggacgccgaacggcgcgcgctgacgcaggacgagcttgccgcccgcctttccaaaaccggcggcacgccctatgccgcccgctccgtgcgcagcgtcgtcgaccccggcctgacgctgcccgccgcggagatcaaccgcatgcgccgcgaggtgctggcgcatctttccgccgtgcgggcgcgccgccccgcgccgcagctgctggcctatcgcgcgctcccgcccgtgctcggcacgcgcgccgcgccggtgttcaccgtgagcgtgctgtccgccgggcagatcaccggccgcctgctgcggctgaagcccgcggttttgtatgtccccctgtccgagatcgcggcccggccggactttttccgcagccttgccgcacggcagacgcttgccgtcgtgctgccccgcatcgtctgggacagcgagacgcgccgcctgctcgatgcgctggacctcgccgcctcgctcggcatccgccgggcgctgacgggcaatgtcggccagctgtccctgctgcgctcccgcggcatggaggcggcgggcgacttcggcctgaacctgacaaattcccgcgcggcctcggagctgcgcgaccttggcctgtgctctctcacggcctcgttcgagctgacgctgccgcagctccgcgacctgtcaaagccgcttcctacggagatgctcgtctatggccgcctgccgctcatgctgacggagaactgcctcatccgcaaccggacgggcgagtgctcctgcggcgcggggccggtgaagctcatcgaccgcaagggcgaggaattccgtatcgtgcgcgactgcggcacctgccgcagcgtcgtactcaacggcaagaagctgtacctcctcgacaagcgcgaggacctgcgccgtttcggcctgtgggcgctgcgcctgtcgttcacaacggagaaccccggcgagatcgacacggtgctttcgaacctcaacgccccgttcgaccccggcgcctgcacccgcggactgtattacagaggggtcgagtgagtcgtaattacaaggaaaatgttggggcgcggcatgccgctcccggcgccgcattggcccattggtacgctgtaggggaggggacagccgggcccggcgctgcactggtgtaataaacaggctgtcagcaaaacggcgaacgccgaaggtttgtcattgcgaggaggccataggccgacgtggcaatcttgtgaccgcactcacgttgatcgcacacgccattgtaggggcgcggcatgccgctcccggcgctatgctgccgatccgtacaggttaacgataaaacggtgaaagccagaatatggggtgtagcggcgctcagtgagcgccttgtacagagccattcaatggcaggagggcgctggtgcaccaaggcatttccctgatgtgtcattgcg

SEQ ID NO: 11252 - DNA, 6845 bp, Unknown
  gut microbiota DNA sequence
ctcttcgcaaagaacgcgcggaaggcctgcagctgggcaagcgtgcggatgatccacggatcctcctccgtgccgtcgccgctgtcaaagaagtccggcgtcgggatctcggtatcctcatatactctggcgctcaggaccgtcttgccgtcctcattgcgctcccaggcataccatgccgccgggcgcagcgcagccagcttctctgcggtaaagccgacatcctcgccggtcagccagcggtcggtgcggccgaggcccgcagtcgagaggccctcgttcatggtgtctgcaaacgtcttcgcgccggtgtcggcagcagagacattctccagccggaccgtgtcgcccatggcgcccgcggcagccgtctcgatctgcgtgccgttggccgtcacaacggaggccgtctcatagcggcagccgacgaccacgccgttcagcgcgcggcttgcggaaattttaccgaccagcataccggcggcaggcgctgccacatccatggcgttgaccagctcgatgttgccggaggcatagcagttgtgcagcaggccggtcgcctggccgatcaggccgcctgcagcgccgctgatggtgctggtgagcgtgtagccgttgtgggagatcacatcgcccagcgcagcacagtttgccagcatggcgccgttgctgttgatggcagtgatgccgccaacgcaggtcaggccgctcttggagatggcggagaccgtcacatcggtccagctgttcgtgatgacgccgttcatggcctgcgcgccgaggatgccgccggcgtaggcccagttttcggccgtcagggagatggcggagccggtgacggagcagttgtcgatgcggacgtccgtgccgatgctcagggagccgcctgcgatgccgccgacgaacggacgcgtccactggcccactgcggagccgtagatgctcacgccggtcaggtgcagattgcggacccgtgcatcgtttgccagaatgtcaaagaaaccgagcggcgtatccgaggcatcggccggagcggactccgtgccgatggtcatgccggagaccgtgtggccctggccgtcgaacgtaccggcgaaggaatggatcggcgtccagtcgccgttcagggggatatcggcatccagcgcgacatactgaccggcataggtctcgccgtccgccgtcgtcgctgcgaaggcgcgcagctgcgcctcggtgcggatgaggaacggagcggtctcggagccgtcgccgcccgcaaacgtcgggtcatcctgcgagccgccgaggacgactttgccgtccgcaaggccccagctctgccaggcagccgggcgcatggccgcaaggctctcggcagtataggaggtgaacttgccgctgctcgtcaggtaggcatccgtctcggcaaggccgctttcggagatgccgtcgttcagggccgcggcaaaggccgcatccgtgacgctgtcgtgcgcggtgatcttgttgtagtcaaaataccacgaggcggggatggagccggtcgccttggccgtctgcgtctcgccgttgtatcgcagaactgcgccgttggaatagtggccggagacgaccacaccgccgctctgctcgccgatgaggcagccgagatagacgtgcttgacgctctcggcagaatcctgcagggagacattgccggaggcgtagcagttgtgggtcagataggcagaggagcccagcaggccgcccgcacggcaccagttgtattccgcactgacgcccgtgaccgagacatcgcccagcgcggccgcattggcgatcatgctgctgccgccgatggtggcgacaaggccgcccgcgcaggcgggagaattggcagagactgcggtgacggcaatatccgtccagcagttcgtcacaacgttttcgcggtcgagacgaccggcaaggccgcccgcataggcaaacgtgccggaggttgcagagatcgtgctgcccgtgacggagcagttgtcgatgcgcacattgctgcccgccgtgccggcgccgccgacgaggccgccggcatagatacggtcgtccagcgccgcgccggagcgctgcacatagacggaggcattcgtcaggtgcaggtcatgcaccttggccgtgttggccagcacatcgaagaagcccgcagaaaccagcttggagggcgcatcggccgtgccgatggtcatgccggagaccgtgtgattgccgccgtcgaacgtgccgccgaagctgtggaccggcgtccactcgccgttcagggcgatgtcggccgtcaggacgaagcagacattcgtcgtcacgagctttccggcctgcgtggcctcggcaaaggcgcgcagctgcgcttccgtcgcgatctgatagggatcgccgaccgagccgtcgccgcctgcgaagtaatccggctcttccggcgtgacggagccgcccgccgtgggcagcagcgcgccgtccgcattgcgctcccatgtgcaccagccgttttccgtcatgctcagcaggctgtcgagcgtgatgtcgccggtcagcagggattcggacttgaagtaggcctgcccctttgccagctcctccggcgtcagggccgcggtgagcttgttcagaagcgtctcggaggcgatctcggcggcagtcagtccctcgcagtgatcgttgtcgctctcgctgtagttcagcacgtcgtaaccgacggccagcggcgtcgagacctcgccgtcataataggtctgcttctcttccttgttgaaatagcagttgtaggccgcagacagagccgagggagagccgacaacgccgccgaccggcacgtccgcaccgtcctcagaggacatggcgtccatatggatgcggctggaggaatagctggcatagaccgcgccggagctgtagcccacaacgccgcccgcgccgtacatcatggaggtgttgccgtagtttgccacggagccgagggccgcgcagttcacaacggcggagttgttgccggtatcgccgacgatgccgccgacaaagctgtcagagctgcccttggcatagacgacaacgttcgtccagctgttgcagatgaggctcttgatgccgatgctgccgatgaggccgccgacgtaggaataatagggagaagtcgtatcgctgtagatcgtgccggtcgcccagcagctctcgacgatgctgttctcgctgatcccggccgccagaaggccgacgctcgggtccgtcgtggtcttgttgtagatcgcggcgttgataacgccgacgttgcggatggcagcgcccttgcctaccgagccgaagaggcctgcctccgtataggaagccttctcgctttccgagccgatggtcatgccggtgatcgtatgatagttgccgttgaagctgccgttgaacgagcccgtcgcgccgatgggcgtccacgcggttccggtcaggtccagatcggcatccagactgatgtactggccctcatagcccgtgccgccgttgacggctgcggcaaaggcctgcagctgcgcggccgtgcggatgagatacgggtcgctcttcgtgccgctgccggacgcgaagaccggagtctccttcgattcggcctgacggaacacgtccttcgcagcttccttgatggcattgctgctcagggtcgcgccggtcacggcgtcgagcttttcgacctgctccggggtctgcagaccgacgagccggtcaagaagcaccttggccttttcccaatagcgggcagtttccgaatgggtcacattgtccacgctcgcgatcgcgccgttcgtcagcgtgagcgtcagcgccacagacccgttgcggcccgtacccgtaccggtgtaggtgccgctctcgtaggtcgccgcgacagccggagcgacacagccgagcaccagaagcacggacagcgccaccgccagcaggcggcgagtcacacgatgttttgtcatctcttgggtttcctcctttttttatttggcaacaccgcataatttggccttcgccggatattttcgccgaatgctctcgctgaattgtgcggtgctgccttaaaaaacggaccaaaaaattgatccgatttttcagatttccttcgtcagctgccggtacagcagcgtgacgatctgcgcgcgggtgcacaggtcatccgggctgaagcagccgctgcccgtgccgttcgtaacgttgttctccgccgcccaggcaacggccgcggcatagtagctcccggcggggacgtccgcaaaggccgtactgccggaagactccggctcccctgccgcacgccacaggaacgtgacgatctgtgcgcgcgtgcacggggcatccgggctgaagcagccgccgcccgtgccgttcgtgaagccgttctccgccgcccaggcaacggccgcggcatagtagctgtccgccgggacatcggcaaaggccgtattgccggagggctccggtctcccggcagcacgccacaggaacgtgactgcctgcgcgcgggtgcaggacaggtccggtgagaacgtcgtcatcgtcgtgccgttcaccacgccgcgggacaagccccagacgacggcgtcatagtaataggcatcctccggcacatcccggaacgggagctgcatcacttcgccgcagcggacgcagatgccgttcacgacctcgtggcccagcggctccagcggctggcggcgcagttcgccgcagatcgtgcagcggaagtcgatccagcccgacatggtgcaagtcggctcgcgacggcccgtttcgaccagctgatgatcatgcatcttcggctgcgtcgtataccacaggctgctcgtctcgccgcggtagaccgtcagcggagtcttcgtcttggcatagcagcggaagcagcccgcatccgcatcatactgcagcgtgcggctgagatagcgcgcgctgcggatcgtcatatgaccgtcctccatggaaatgacccagcgggacagcgacgttccggtgtcctccgccgtgttgagctgctcgctgttcgagcggcaggccagataaaccgcatcagaagtgccgccgaggcggatggcgtactgctccgtgcctgcggcacgctcgatctgtacaacgaccgcagcggaaacgccgcgcagcgcgccgtcctcctctgcaagcccggcatcggcaaacgggactgccgcctcgctgctgccgagcgctgcgcccgtgaccgagccgtcgcacaggagggcatggccctcggcagagagcacataggtgccgctccagtcctccggggcccctgtcagctcgtggaaggcgggcgtcgttccggccggagtcgcaaaatagcgatagacggcgtaaagtgtctgcttcggctgctcaacaggcagctcgcttccggcgcggagataggacaggctcccgaccggctccgcctgctcctgcagggaccaaccggcgaaggaatactcctgcgcatccgctgccggggtcccggcgggcagcggcaggggctccgcatccccgacatagctctggatatccgcctgcatgacaccgttcggcacgacaaagtgcagcacagctggcgtcttggccgagaagtggatcgtgatcgtgcagtccgcacgcagagacgagatgcggtacaggtctccctcctgcgtcacaacagcggctccctccggggtaaccgttgcgccgtcggcatagtagccgcgggccgggacggccgtgaccgtcatgcccttctggacgaccgttccggccgtttccggggcgtccgtcgtcacggtcgtggtgaagctctccagcaggctccagacggagctgacctcctgcacggcatcgacttttccgtggccgggataggcatcctccgccgaaacgacaatggggaaggccgcgtgcttccgcacggcttcctccagcgatgcggcggtctgggaggaatcgctgcccagaatggcgggcgagcagtcccagttgccgtagcgggccttcatggtgcgaatagactccgcgaccgtgccgccctgcagcagcttgttgaaaaattcctcttcaaagcagtaatcgccgataaaggtaacggactggctgtagccgtagaccacgccgacgcccgcgtccataagtgggccctcgaggccgtccgtggccatgccgaggcagatcgccatccagacaaggccgccgtttgcgggcttttccatatggttggcaatgaccgtaccgtcgacctcatagtagcgcatgccgttgatgccgtttccgccgtagacggcgtggccgtcggcatagtcctcggtcgtcaggccctcgccgctctgcaggcagaggtaggacttcgtcgctttggaggtgtagtcctcattgtcgccggtatagtccgtggtgccgtggctgtcaaacagaataacgccgccggactcgaccgcgtcggcaatggcgtcaaccgtcgcggcctccgtcttataatagcagaacgtgccctcggacttcgcggcgatgcgttggccctcttcgtaatactggcgcgtgaatgagctgtccagaccgtagtacggctggaagagatacacgtcgcgcccgtgctgcacgccgcgcagggcgggaatgctttccagcgtttccgtctgcgccggttcctgcgcacgcttgctgatgcgtgccagctgcgggttatacgagcaggtgatgcccgcatccgtctgccaggtcacgcagctgccgttcgcagagaccgtgcccggccggacgccgtcggctgtctccagccaatcgcagagcgccccggtgtcggccgcacccgccgtgccgccgttcgtgccgtccgccgacggcagcgaggcaaagat

SEQ ID NO: 11253 - DNA, 548 bp, Unknown
  gut microbiota DNA sequence
caagcgttgtccggaattactgggtgtaaagggagcgcaggcgggagaacaagttggaagtgaaatccatgggctcaacccatgaactgctttcaaaactgtttttcttgagtagtgcagaggtaggcggaattcccggtgtagcggtggaatgcgtagatatcgggaggaacaccagtggcgaaggcggcctactgggcaccaactgacgctgaggctcgaaagtgtgggtagcaaacaggattagataccctggtagtccacaccgtaaacgatgattactaggtgttggaggattgaccccttcagtgccgcagttaacacaataagtaatccacctggggagtacgaccgcaaggttgaaactcaaaggaattgacgggggcccgcacaagcagtggagtatgtggtttaattcgacgcaacgcgaagaaccttaccaagtcttgacatcctgcgacgcacatagaaatatgtgtttccttcgggacgcagagacaggtggtgcatggttgtcgtcagctcgtgtcgtgagatgttgggttaag

SEQ ID NO: 11254 - DNA, 44721 bp, Unknown
  gut microbiota DNA sequence
ggcaggcggacatcacattttctgcctcgctgcagctctatcgcacagacagcgaggaaattgccgccgagtgcgcactcggctcggagatgccctatgatatcgccttcgtgacggacagcgtcgtctgcgccgtttcggaggacagggtccggttctttgcggcagacggcacggagcgcggcgcttatgtcgcggagaacggccgcatcgccgactatcactttggcggagacggcgttgtgaccgtgctggtcgatccctatgagacctccagccgcgcagagctcatcacgctgcagccggacggcagcgttctggcgcagttgtcgctgagcttcatgccggtcagcctttcggcctgcggcagctatgtcggcattctgacggctgaaaaagcgctgctctacacgagcgcgctggagcccgtcgcccagacggagcaggacggcacggccgtctgcattcttgcccgttcggacggaacggccctgctggccggtaccggaacggcaagcctgttcctgccgtaagcaggaaaacgcccgcaaggcgggacttttacggaggcgcgactgcttccgggaggagtgagcttatgaaacctaccatctgcagccgatgcaagaagaacatcgctgtgatttttattacgaaggtcgaaaacggcgtgagcacgaacgagggcctatgcctgaagtgcgcccgcgagctgaagatcaagcaggtcgacgacatcgtcgagcgcatgggcatcacggatgaggatctggacaatctcaacggcgagatgatggccatgatgcagccggagccggacgagaccgacgaggacgacatcggcagccgcacggcgacattcccgcacatgaaccgcctgttcggcaatcagggcgaggtcgccccgcgcgaggagccgaaggagacgcagaacggcaagacggaaaagcccaaggtgaagaaacacaagttcctcgacacttactgtctgagcctcacgggccgtgcccgcgccggtgagctggacaaggtcgtcggccgcgaggtcgaaacggagcgtgtggtgcagatcctcaaccgccgccagaagaacaatccctgcctcatcggtgagccgggcgtcggcaagacggccatcgccgagggtctggcgcagcgcatcgtcgcgggcgatgttccgttcaagctgcgcgacaaagaggtctatctgctcgacctgacgtcgctcgtcgccgggacgcagttccgaggccagtttgagagccgcatgaagagcctcatcgccgagatcaaggcctgcggcaacatcattcttgtcatcgatgaggttcacaaccttgtcggcgcgggcgatgccgaaggctccatgaacgccgccaatattctgaagcctgcgctgtcgcgcggcgaaattcaggtcatcggcgcaacgacgtttgccgaataccgcaaatacatcgaaaaggactccgcgctcgagcgccgcttccagcctgtcacagtcaatgagccgtcgctggaggaggccgtcgccatcctgcgcggcgtggcgcattactatgaagtgttccacggcgtgaccatcccgcccgaaatggcgcggcaggccgtcgtgctctccgagcgctatatcacggaccgcttcctgccggacaaggccatcgacctgcttgatgaggcttgctccgatctgaacctgcacagcaaggagatctccgatctggccgaaaagcgcaaggagcgcgacgactaccagcttgagatcaagatgctgacggaggacacggaacagcaggacaatttcgagcgtctggccaagctgcgcagcaacgtctgccgcctcgacgccgagatcgccgagctggaggcgaagcccgcgcccgtcctgaccatggagaaccttgcgcgcatcatcgagctttggacgaaaattcccgccagtaaaattcgcgcgcaggaatatgcccagctgcgtgagctcgaggaccggctgaagcagcacatcatcggacaggacgaggccgtccatgccgttgccgccgccatccgccgcaaccgcgtcggcatcgccgtgaagaagcaccccgtttcgttcatctttgtcggctcgaccggcgtcggcaagacggagctggtcaagtgcctcgcaaacgagctgttcgactccgtcgattcgctcatccggctggatatgtcggaatacatggagcgccactccgtctcgaagctcatcggctcgccccccggctatgtcggctatgacgaggcgggccagctgacggaaaagatccgccgcaagccctattccgtcattctgttcgacgagctggaaaaggctcacccggacgtgctgaatattctgcttcaaattctggatgacggccgcatcaccgattcgcagggccgcgttgtgaattttgaaaacaccgtcatcgttatgacgtccaatgcgggctccgaccggcagggcggctccgtcggcttcggccgcacggcgaccgagcagggacgcgacaaggccatgaaggccctgtccgaattcctgcgcccggaatttcttaaccgcgtcgacgagatcatctgcttcaaccgcctctcggaggagaacttccgcggcatcgccgccatcatgctcggtgagctgaaaactgcccttgaagagcacggcgtggcgctccgttgggatgagagcgtcatcgactacctcgtacagaagtcctatactctgacctacggcgcgcgcaacctgcgccgcaccatccagaaggacatcgaggacgtcgtcgccgaaaagctcatcgacagctatgagaaccccatcacagcgatcggcctgcaggcgcaggacggcaagctggagctgtcctgcctgtaagccgcagaaagagagaacacgatgatccgcgcagttttttttgatatcgacggcacgctggtctcgctgaagaccaagcgctgcccggattccacaaaggcggccatccgcgccctgcgagagaagggcatccgcgtctatgtggcctccggccgctcccgcttcgagctggaggagcaggagatgctccgcggcatgacgtttgacggctatctgaccaacaacggccagatcgtctatgacggcagctggaacctgctgcgcacggtggcaatggttccggacgaggtccgtgcccttgtggactactgtgacgagcgttcgctcccgctgtggctcgtcagcgagcagcgctcgcgcttcaattaccatttcaacgatcgcgtgccggtcgttatggcagagatccatacggagatcccgaagcgctgcgacctgcacaccatgctgcaggagccggtcgtcaaggccgtcatgtttctgacggcgcaggaggttcgcgaaggcccgctgtcgttcatgccgcatgcacgctcgacgcagtggttcatccatgggcaggatatcattccggccgagggcggcaagctgcctgcgatgcgcttcatggctgaggcgaacggctggtcgccggatgagctgatggccttcggcgattccgaaaacgacaatgaaatgctccgctatgcgggtaccggcgttgccatgggcaatgcgctcgaggagacgaaggccgcctctgactatgtcacggacgactgcgacgacgagggcgtggcccatgcgctggcacatttcgcgctgatctgagagaatcgaccatgatgcaccggagcatctcagcatatgcggtgtataacggcctcgcagagttcgccgcccgcaggcggcgaatcaattgaaatcattttctccggcggcgtgtacgtcggataaaataccgctcagtccgccagtgtgcggatcgcccgcctccggcgggcgatcgtgcgcgcagcggactgcaatcctttgccggaaaatcgaatgattttccggcaggcaaaaaaaatgacgcctctcggcgtcattttttcatgtttgattgggactataagccgggttctgtgatcgacagccatctatctcgacgcagcgttgccgctgcgctcaagccaccccctcggaagcggccgggcaggccatatgcttcctccacggtgttgcaccggatagagtttacagcgccgcaatgttcccatgcggcgggtgagctcttacctcgcctttccacccttaccccgcgagcggggcggtatttctctgttgcacttttcctgaagtcgccttcggcgggcgttacccgttatccttgccctgtggtgcccggactttcctcacatgggcgcttttcagcgcagatgcgcggctgtccgtcccagtcgtgtttattttactttattttggcggaaatgtcaaacggattgcaaaatttatcccgagcggatataatatgggagtagttcaacgcctgcgccgggcggcgcaggggaaagaaggacatagatcatgactgtaacggaatatttcacccggctgcaggggaagcgcgtgctggtgcttggcctcggtgtaagcaaccggccgctcgtgcgcctgctgctgcggtttggcattgacgtcacgggctgcgaccgcacgccgcgggagaagctcgacccggaggtgctcgagctggagcgcctcggcgcgaagctgcacctcggcgatgattatctgacgggcatcaccggcgatgtggccttccgcacacccggactgcacccggaaaagccggcgctgcaggcgctgcgtgccgcagggacgcagtttacctcggaaatggaggcctttttcgaggtctgcccctgcaggatcatcggcgtgaccggctcagacggcaaaacgacgacaagcacgcttatctccgaaattctgaagcatgcaggccatcgcgtctggaccggcggcaatatcggtacgccgctgctcgaccaggcggagcacatgacgccggacgacctcgtcgtgctggagctgagctcgttccagcttatggaccttcgccacagctgccatatcgccgtcgtgacgaaccttgcgccgaaccatctcgacgtacaccgcgacatggcggagtacatcgacgcaaaaaagcatattttcacccggcagaccgcgcaggacgtgctcatcctgaacgcggacaacaccatcacggccgggtttgcaccggaagccgccggagaggtccggatgttctcgcgccagaccgttcccgcgcacggtgcgagcttccgggacggcgtgatccggcgcgacggcgtacccgtcgtgcggcaggaggagatcaaaattcccggcctgcacaatgtggaaaactacatggcagccatcctcgcggtcgaagggctggcctcggatgaggatatccgctatgtcgcgcggaacttcggcggtgtggagcaccgcatcgagttcgtgcgcgaaaaggacggcgtaaagttctataacgactccatcgcctcgtccccgagccgcaccatcgcgggcctgcgcagcttctccgagaaggtcattcttatcgcgggcggctatgacaagcacattccgtatgacgtgctcggcccggagatcgcagcgcacgtcaggctcctcgtctgcaccggcgcgaccggcccgaagatcgcagccgcggcccgcgccgttccggatgcgccggagatcctcgaaattccggatttctatgaggccgttcacgccgctgcgcagcaggcaaagcccggtgatatcgtgctgctgtccccggcaagcgccgcctttgaccgcttcaagaactttatggtcagaggcgcggaattcaagaaaacggtgatggcgctgtgagcgggggagatatccgctgctcggccgttatcgtcgcagccggcagcgcgcagcgcatgcagggcatcgacaagctcctggcaccgttggacggcgtacccgtcctgcgccggacggtcgaagcgctggcatctgcgcccgagatcacagagctgatcgttgttacgcgtgcagaccgcttggaggccgtgcaggccctgtgcgaaggactttccaagcccgtttccgtcgttcccggcgggaaaacgcgggcggagtccgtcctgtgcggcctttctgcggcagccatgccctatgccgccattcatgacggtgcgcgtccgctcgtcacgaatgaggtgatcgcgcaggccattgccgctgccgtctcctgcggggctgcagcgccagccgtccctgttcacgacaccatcaagcgcgccgaaagcggccttgtgcttgaaacgccggaccgcagcacgctgtttgccgtccagacgccgcaggtcttccggacggaggaaattcgctccgtgctccgctgggccatcgcgcaggggctgccgctcacggacgactgctccgccatggaagcggccggaaggccggtgcgcctgacgcccggcgatgtcgaaaatttgaagatcacaacaccggtcgatctgcgcatcgcagaggcgatctggaaggggagaacgacatgaggatcggacacggatatgatgtacaccgcctcgttccggggcgcaagctcatcctcggcggcgtggaaattccgttcgagcgcgggctggacggtcactccgatgcggacgtgctcacgcacgctctgatggacgccctgctcggcgcagcctgtctcggcgacatcggcctgctgttcccggataacgacccgcagtacaagggcatttcgagccttctgctgctggaggaggtcgtgcgccgcgtgcatgcggcgggctttgccgtcggcaacgccgatatcaccgtcctgtgccagcggccgaagctccggccccatattcccgccatgcaggaacgcctgcgcgccctgctcggcacggaggcagtcaatgtcaaggcgacgaccgaggaaggcctcggctttacgggcagcggcgagggcatcgcctgccacgccgtgtgtctgctggaggaacgcgcatgaaaacgcttctgatcaccggctttgagccgttcggcggcgagacgatcaacccggcatgggaggccgtgaaggccctgccggagcagatcggcggctggcagctccggaagctgcagatcccgaccgtcttcggccttgcggctgcaagaacgctcgcctgcgcggcggagtgccgcccggatgcggtcctgtgcatcgggcaggcgggaacgcgcagcgccgtgacgccggaatatgtcggcatcaacctgcgccacgcgcgcatagcggacaaccttggaaatcagccgcaggacgagcctgtcgtgcccggcggccccaccgcctactttgcaacggtcccggtgcgtgccatgacagccgccatcgaggcgcaaggcatcccggccgccgtgtcctacacggccgggacctatgtctgcaatgacctgctgtacacgctcctgcatcactatgccggaacgccggtccgcgccgggttcatccatgtgcccttcctgccggagcaggccccgcagggcgtggcctccatgccgcttgcacagatgatccgcgcactggaggcggccgtctccgcgctctgagccggctcagagaaagtgcttcatttcctcgatattggcctgctccgtctgcagcagccgcgtggacagggacgagaccttcgggtccagcacgcccatggcgcgcaggttctgcatactcttgaccatgccacgcgtattgccctgcacgagcatctcggcgattctcgccgtcgtgttccggctactgcggacgcgcagcttcgccgtgagcatggagccgtattttgccagcggattcacgccgcttaaccgcacgccgcgctcgcgcagcaggcggtccgcctcggcgtagatgctgtcatattccttccattggctccgcagcgcgctctgcatggcgggattctgcgcctccggcagcacggcccggatgccgctgcagcccatttccgtgctctgccggatggagcggagcatttcgatctcattttgcatgctttatcacctcgcgcatagctttccacgaaaattcccgcccattcgccggaaaacccaactttttttctacaaagaagggctcggcattgacaagattcgggaatcgcgctataatattcaagtgctgttgcgcagcaattggaagtaaaaaggagaatgtccgatgtatcataccatgacaattgcgggggtccagcgggatctgccgatctgcaaagtttctgacgacctctatattggtgcatttgtgattttcggcgacgtcgagctgacggtcaagacggctgaggcgctgctgaagaaggcgccggagtacgactatatgatctctgccgaggccaaggggatccccctgatctatgagatggcccgtcagagcggccagaacaaatatttcctcgcgcgcaaggcgccgaagctctatatgtccggcgtgtttgatgtgaaggtcaactccatcacgacggccaaggagcagcatctctacctcgataaagccgatgccgagctcatgcgcggcaagcgcatccttatcgtcgacgacgttatctctaccggcgagtccctcgccgctgttgagaagctcgtggaagaggcgggcggcatcatcgcaggccgtatggccatcctcgccgagggcgacgcccagaaccgcgacgacatcatctaccttgagaagctgccggtgttccacgcagacggcacgatcaaggaataagcagaattacattgccgccgaacccgaatgggctcggcggcattttgctgcttagcggcggttctcgttctgattctgctgctggctctgctgttgattctgctggttttgcttctgattctgcttctggttctgattgcggttttccatggtggaaaagcctcctgaattttgatttcgcggttttgccgcggcattagtataaccgccgcggcttcatttatccttcggcttgaaaatgagactggcaagcaggccgaagatcacggccgccgtgatccccgcggcagaggcagtcaggccgcccgtcaggataccgagcgcgccgtcctcgtccactgcttttttgacgccgcgggccagcgtattgccgaagcccgtcagcggaacggtcgcgcccgcgcccgcaaaatcgacgagcttgtcatacagcccgacggcaccaagcaggacgcccgctacaacataggcgaccagaatgcgcgccggtgtcagcttcgttcggtcgatgaggatctggccgatgacgcacagcaggccgccgaccagaaatgctttgagatagtccatgtcagctcctttccagaacgacggcgtgacagacggcagggatcgactcgccctgctgggtggacagcggagagagcagcgcgcccgttccgcagaacagcaggcggcgcagctcgccacgctccatacgggaaagcagcgtcccgcacagaacggaggcgctgcatccgcagccggagccgccgcagtgcacgtcctgccgctgcgcatcgaagatcatcacgccgcagtcctgcacgtctgcgtggatgccgtccttctcgagaagtccgtgcagaatttcgctgccgagcctcccaaggtcacctgtgatgattgcgtcatagtcctccggcgcacagtgcaggtcatcaaaatgtgcgtgcagtgtcgcaaaggctgccggggccatggccgcccccatgttgttcgcatcgcagatgccgcggtcgacaatgctgccgatcgtggcggccgtgatgcggatgccgcgttccccgccgccgagcaggactgcgcccgcgccggtgaccgtccactgcgacgtcggcgtgcgctgcccgccatagcctagcgggaagcggtactgccgctcggatgaggcgaaatgcgacgaggtcatggccagcgccgtgcgcgcgtagcctccgctgacggacatggctgcaagcagcagggactccgccatcgtcgagcacgcgccgtaaagacccagcgtcggcacgccgcggttgcgcaggctgaagctcgagccgatgcactgattcagcaggtccccggcaaaggccgcgtcaagatccgcatcggtcagcccggccttctccagcgccagctccagcgtcatctgctgcatgcgacgctcggcccgctcccagctcttttcgccgaatgtcgtatcctgcaccgttgccgtaaactgatcgccgagcggcccctcgcgctcctttttcccggcgacggaggcgaagccgcgcacgaccggcggctgcggaaagcggatgctctgccgccccatgtgattcgttcccatgaacgttcctccgatcatttgattcggatatagtatgccgttttcgtgcgaaaaaattgcggtgcaaacacaacgttcacaccgcaattttgacaaatcatttttcgggcttctgcagcagcggccacaggcggagcagcaggagagccagcagcacccgcaccgccgcccacaccagcaggctcagcacggcaagcagccgcccgccgccgcggcacaggccatcaaagaaggccagcgggaaaaagccggagaacaggctctccgaaaaaaggccggagaatgcgccgagcaccatggcaagcgcaagaagtacattgatgccgagcatcacgctgcacggacccgtgccctgcttttcgcgcagggtgcgccaaccgagagcccgcagaaagcggcggctcacgcagaaatacaccagactgatcgcccagatgaccagcagaccgatatagccgctcagcacgcgcgaccgcgcaaagtccggcaggtggaaggggaagagatataggtgcagcggcaggcacaggaccgtcagtagcacgaattccatccaggcagccgcacgaaacgcacgataggccgtcagcggaacaggctcttccttccgcgccgcgcgccatgccagccacagaccggcgcacagggcagcggacggcaggaagaagaaaaacgccgcgccgccgaacagtcggccgtccttcggcaggagaacgccgacagaagcggcaagctcgtggaagccgtgctgcatggcggggaacagcagtgtcagcaacaggaacaggacaaggcccgccgtggagaccgtcgccgtgagcagacacaggcgggatgcagccacatgctgcaggcgcaggggaacgggctgcgggccctccggcagcgttgcgccgcaatggcggcagaggcgggcgtcagcggcattctcggtgccgcactgcgggcaggtcatgatgcattctcctttccctcgggcggcgcgatgcggacggcccggagcgactcgccgggataccagccctcgggcatggcaagggcagccagctcgtccgtctggcaggcaatgtagtggatcgtgcgcgtggattcctccagcaggacatattcggagttgtccgtgtcgtggagcatccagatataggcgggcaggcggaagagcgtcgtgtcataggttgcgctgagcgccgcgaggcggtcgacctccgcctgatagtccgcggcggaatagcggcaggacaggcgcgtgaacagctcgtcctgcaggagcgtatagcgatagaggtggtggtaatcccggtcctgcgcacgctgcagcagcgcatcgggcgggaagattgggaagagctcctgcatgcgcggcggcgcagcgctctgcgtaccgtccgcatcgccggtagaggtcaggttggagagcaggtcaaaaacggcgctgccgtgccaggtctcgccgccggtgttgccgtaatcggccagatccgtcgtctgcacgatggcgcagccgctcagcaggacagcaaaaagcagcgcaagggcaagcaagcattttttcatggaaggcctcctccaccgatatattctccggttcttctctgctagtataccatatgggcagaggaaagtcaaatgtcgctgcagcggtgaaaaaggcttgccttttcgggtttggtatggtattatattgctaatagtgttagcaatataaggagaaccaacaaagaccatggactattccgcacttgcagccgagctgctgtcgttccggacggcgctgcaccatcttcctgccgtccgcgggctggacgagatgtccggcggcgaatattttgtcctgcatttccttctgcgccatggcggaacggccgggccgtccgagctgagccgctctttgtatgccagctccgcgcgcatcgccgccctgctgaagcatctggaggccaagggctggatcgtccgcacaccggatgccgccgatgtgcgccgtgtggacgtcgtcctcacggaagccggcgctgcatgcatccgggagcggctgggcgcggtgctggatgaggtctccgtccttctgtcggcgctcagcccggaggaggcggcggaatatgtccgactgcagcgcaagctgctcgagaagggaggaaccgtttgaaaagacccatcgactggcgggaggaccgctctgccgtgcgagaaaaggtcgccgaatcggcacgctgtgtgctgccgatcgttctgatcgtcgttctgctgtgcctggccgccgcgccgatgaagccggacctgctcctgagctttctcatcggcggcgtgatgctggtcgtcggcatgggcctgttctcgctcggcgcggagcagtccatgacgcccatcggcaccaagatcggcacggcgctgacgcgcacaaagaatctgccgctcatcctcggcgtgagcttcgcgctcggctttgccatcaccgtggccgaaccggacctgcaggtgctggccgaaacggtgccgcacatcagcagcacagtgctcctgctgacggtcggcgtgggcgtcggcctgtttatggccgtgtgcatgctgcgcatcgtcacgggcgcgaacctgcgctggctgctgatcggctgctatgcgctcatcttcctgctggccgccttttcagaccccgattttctcggtatcgcctttgactccggcggcgtgacgaccggtccaatgaccgtgccgttcatcctcgccatgggcctcggcgtatcgaatatccgaagcgaccgccgcgcggaggcagacagcttcggccttgtggcactgtgctccgtcgggccgatcctcgcggtgctgatcctgggctttttctatcagggcagcgacgccgttgccgacctcagctcggcctcattcggcagctcgactgccatcggcggcgcattcctcgcctccattccgctctatctcaaggaaatggcgatctccatgctgccgatcgtggcgatcttcttcctgtttcaggtcacgctgctgcgcctgccgggccgcagccttgccaagattcttatcggcattctctatacctatgttggccttgtcctgttcctcaccggcgtgaacgtcggcttttcgccgctcggcgcggagctgggcgcagagctggccgtgcacggctggctgctcgttccgctcgccatggtgcttggctggttcattatctcggctgagcctgccgtcggtgtgctggaaaagcagatcgagagcgtcagcgcgggcgcgatccccggcaaggtcatccagcgcagcctctccgtcgccatcgcgctggccatgggtctttccatgctgcgtgtgctgaccggcatctccattctctggtttctcgtgcccggctacggcatcgcgctggcgctgtcgttcttcgtgccggacatctacacggccatcgccttcgactccggcggcgtggcctccggcccgatgacggcgacattcatgctccagttcgtcatgggcgcaagcagcgcgctcggcggcaacatcctacgcgacgccttcggcgtagtagcccttgtcgcaatgatgcctctgctgtccattcaggccgtcggcttcctctatgagcgccgggcaaagcgcgcagccgtggccccggagcactacggcgacttcgacattgtggagctttgggaggatgcggcatgaattatgtgatctccatcatcgcgccggagcggctcgagatcctcacggacctgtacggggagcttggcctgccgctgaccgtcacactccatgggcgcgggacggccgtgcagagcatgctcgacctgctcggcattgaatcaaatgaacgccgcgttgtactgacgatcgccgacgcggaaaagacggcagcgctgatcgccgcgcagaagcggcggctgcacatcggcgtgccggggcatggcatcgtcatcgccgtgccgatcaaaagtgtaggaggaggaaatacggtggcatatctgaacggcgggagaagcccgaaatacacgccggacctgagctgcgcctatgagctgatcatcgccattgcgaacgagggcggcacggacgccgtgatgaacgcggcacgcgcagccggggccagaggcggcacggtccttcacggcaaggggaccggcgcaaagggcgcgccgaaattttacaacatctccatcgcagcggagaaggaggtcattcttattgtctctgcggcggggcagaaggccgagatcatgcgctccattctgcgcaaggctgggccggacagtgacgcgggcgccatcgtcttctcgctcccggcctcggccgtggcgggcttcggtctgctggaggagaattgaactttaatgtatgcatcgagccgtggcgtttcgccacggctctttgtgctggttgtaatctctttgccgatatggtaaaatagcagaaaacgacggggaggaaacgatgaagcagcgcacctatcttgccattgatctcaaatcgttctatgcctccgtggaatgccgcgagcgggggctggacccgctgaacacgaatctcgttgtggcggatgagtcgcggacggacaagacgatctgccttgccgtcacgccgacactcaagagctatggcatctccggccgcgggcggctgttcgaggtgcggcagcgcgtccgcgaggtcaatgcctggcggcaggcccgcgcgccgggcagaacgctgaccggcagctcacaccagttttccgagctgcagcgcgaccctgcgctggcggtggatttcgtgatcgcaccgccgcgcatggccaattatatggaatacagtacgcgcatctacgaaatttaccgaaaatatatcgcaccggaagacatcgtcgtctattccatcgacgaggtcttcctcgatgtgacggactatccctatgactgcaccgcccatgagctggcgcagaccatcatccgcgacgtactcgaaacgaccggcatcacggcgacggccgacatcgggacgaacctgttcctcgccaaggtcgccatggacatcgtcgcaaagcacatcccggctgatgaaaacggcgtgcgcatcgcagagctcgatgaaatgaaattccgcagggagctctggccacaccggccgctgacggacttctggcgcgtcggccgcggcatcgcccgcaggctcgaggcgcacggcatgttcacgatgggggacgtcgcgctttgctccgagcagaatgaggagctgctctaccgcctgttcgataagaatgcggagctgctcatcgaccacgcgtggggctgggagccctgcaccgtcccgtccatcaaggcctaccgcccgtccgagaacagcctgagctccggtcaggtgctgagctgcccctatgaggcggcaaaggcccggctcgttttgcgggaaatggcggatcagctctcgctggagctggtggaaaagggcctcgtgacggaccaggtcgtgctgacggtcggctatgacattgagaatctgacggacccggcccgccgtgcggcctactgcggcccggtggagcaggaccgctacgggcggcgtgtgccgaaggccgcgcacggctcgcagaagctcgacgcaccgtcatcctccacacggaggatcatggaggcggcctccgccctgtatgaccgcatcgtggacagcgggctgctcgtccggcgcatgtatctcgtcgctgcgcacatcgtcccggaggacgaggcgcagccggaggagatggagcagctggacctgttcaccgatcttgccaccgaggacgcccggcgcgaggcggagcaggcggcgctggcgcgcgaaaagaagctgcaggaggcgacgcttgccattaaaaagaaattcggcaaaaatgccattctcaagggcatgagtctggaggagggcgcaacggcccgcgagcgaaacgccaggatcggcgggcacaaggcatgaggaggaatacatgaccggaaaatatgacgcgatcctgcacctgccgcaccatgtctctaaaaagcacccgcccatgccaatggccgaccgcgcggcgcagttcgcgccgtttgctgccctgaccggctacgacgcggccatccgggaaaacgcacgcctcacgcaggaacggatcgaccccgcagaagcggagctggcctcgctggatcggcgcttccgcctgctgctggagcatctgggggaacggccggaggtccgcctgacccggttccggccggatgaacggaaatccggcggagcctacgagaccgtcagcgggatcgtgaagcagatcgatctcattgcacgccgcatccgccttctggacggaacggacattcccatggacgatgtgctgacgctggacggcgcgctgtttgatgttttggattaagggagagagaaaattatgaaagagctgatgaaaacaaacgtctatgacgtcggggaatcggtgctgatcgtcggcagctgcctgccggacatggagccggagggctttgcgcagctgtgcgcatcatccggccatgtgtttgagctgtgcctcgaacagacgcatatcaatatggccatcacgaagatcagcgccatgctctacaccggcaagatccgcacgctgcgctttgcgacggtcgaccgctcgccgcactgcgtgcagatgcactacatccagaacgagctgcggcggatgatggacctctccgccgtgacgatcgaaaattacatcgtggagaacgggaagctgacgaagctctcgccggagctcatctatctttccaagcacctcggtgagctgtcccgccggatgaacgaaaatgtataagaaatccgcaggataggaatttacccatcctgcggagcaatttttttaatcggcatccatggcgaccacacaggcgctgagcacctggctgagaatcggcgtgcagaccgacgcgccgccgccgccctcctcgaccacgacgatgaaggcgaggggatagtcgctgtcctgcaggaagcctgcaaagacggcgttggcagcctttccgccgccgttttccgccgtgccggactttccgcctgcgtaaagtccggcgaagttccactcgccgtagacgttgacgacggcattgtgcatcatgtccgcaaggcgaccggccgtcgtgctgtcgagcagacgtcctgtggagcttgtggaggccttgtacttgacggagtcgccgtaggtgacctctttcacaaggtacggctccgcagcggagcctccgtttgcgatcgcgcccatataggtcatatactggcaggggttgatctggtccgtatactggccgatgccggcccatgccagctcggattccgccgcgtcggagacatcaaagcttccggcggccgtcgtcgtaccgtcaaagctgtagcggcgcgtgacgccgacctgctcggcatagcgcatcagcgtctttgggccgagctccgctgcgatctcgccgaaaacgacgttgcaggaatgggccagcgcctcttcaaagtttagcgtgccgtgcacgccgttgcactggatggtctcgccgccgatgacggcgctgccctcgcaggtgaacgtccgggagaggatatccgggatctcgtcgagcgcggccgcagccgtaacgagcttgaagacggatccgggcgtataggtggcatgcaggaagcggttgacatacacgccctcataggtctcgggattgccctccacatccggcacatcgtccggatcgtaggttggggaggagacggcgcagagaatttcgcccgtcttgtagttatagacgccgacggttcccttgcggccgtccagcgcggccagcgccgtgcgctgcacatctgcgcttacggtcaacgccatttgaccctcgcgcttgccggtggaataggtgccgttgatgcggtcgaagccgacaagctccgagccgtattcctgcagcaggaaaggcgtgatattgccctcccggtcgcccagcaggtgcagcatgctgcggcgcagcgaggcactgtcggcataggacttgccgttcgtggcatcgagcacgacggtgccgctgcggtcgacgatcttgccgctgttcataacgccgtccgtatagacatgggggctgttctggaacgtgacccagtccggtgaatcgatgaagtaacgcaccacgatcacgcccatgccgagcaaaagcacacccgccagcgcaagtgcgaaccacgcgcgttttgcaagcttattcaagcggttccacctcctctgcctttgcggtgcggaccgcgaagctggcgttctggcgcgtgtccgccgccttgaggaaggcgatcaggccccacgaggccagcatgctcgagccgccgttggaaaggaacgggaacgtcacgccggtcagcgggagcaggtccatcgtgccgaacacgttcagaatggtctggatagtcaggatcgccacggcggcgcaggcagcaatggtatagaagctgctgcggccgaccttggccgagcggacggtaaacaccgcaagaatcacgatgaccgcaacggcgcacaggccgatgatcaggccccattcctcacacaggaaggcgaagacaaggtccgtatccgccgcaaagacatatttgagccagccgttgcctgcgccgaggccaaacaggccgccggaggcgatgcacatcatcgcacgcgtctgctggtagccgcctgcagaggcatattcccacgcatggccccatgttgcaaagcggcgcaggatatgcggccggaagcgaacggccagaacgcctgcaaagcccgtggccgcgcaggccagcgtgaccgtggcgaagctgccggaacgcaggaaggcgatgacgaggaacgcgacgaagaagatgagcgccgtgccgaagtcgttcatcagggcaaggcagccgcagatggcggcggaatagacaatgaacaggaacaggttccgcttcgttacgatgcggtccatcgtggatgcaccgacatagaggaagcagagcttgaccagctcggacggctggaaggagatcccgcccagcgagatccagttgcgtgcaccgttattttcctgcccgaacaccagattgacgagcagcagaagcatgccgccgacggcggccagatagcgaaatttcttcgcgcgggacaggtcgcgcagcgaccagccgatgatcagatagatcacgatgccgccgagcaggcagatgagctgctttgtgagattggcgggattatccgaggcgatgacggcaaagccgagcgtactgaggaaaaaggccagcgtttccacctcgtagccgctgcggcgcatcatacgcagcacggcaaacagcagccaccccatgaccagtaggccaaggaagctcagcacgatcgtttgggccgtttcggcctccgcgcccatccagagctgcagcgtcgtcaggagctggaagaccgtcagcagaaacagggtcagcgcaggagagcccagatgcgtcgggcgcgtgcggctggcaagctgctcctcgagctcggactgcgtgacgggtgcaagcaccatgtccacgccgccgagcgagatggtatcgccgtagtttacggcagccatctggaccggctcgccgttgagcgtgactgcgccgcgtgagccgatgtccgtgagggaccagctgccatcatcataacgcgtcagaacagcgtgcgtgcgcgaaacggtcgggaagtccacgacgatgtcgcagcccttcgcacggccgaggatattctcccaatgtgtcagggggagctgattgccgtccggcatgacgagccatgcccacgtctccggctcccgccggaatttcagcagcggccgggcacagcgccacagcagcagcacggccagcaccggcgcaaggtagcgccacacggtgcagaacaccgagacaaagccggagccgcttccctgaaagtattcggcggcagaggcaaaaaatgcgtccatggattcctcctttccggctcagccggggatatcgtcataatccggatcgtcgatctccatatcgtcgtccgggtcgatctgtgtttcgtaggcaggctcctcggcagcgctcgtgtagctcggctccgtcacaggcggcaggtcgtccacggtgcggatcgtgtaatacagactcgtctgcaggggatggcgcttacgggcaaggcgcttgttgacgcggtcaccgatgacggtgtagagcacggcaaagaccggcacgccaagaagcatcccggcaaagccgaagataccgccgaagaccagaatggcaacgagcacccagaagtccgaaatgccaagcttttctcccagaatgcggttttcgatgatgttgccgtcgacctgctgcagaatgagaatgaaaatgcagaaatacagggcgttgacgggcttgtcgatcatcaggagcagggccgagggcaccgcgccgaggaaggggccaaagaagggaatgatgttcgtcacgccgacgatcgtgccgatgagcgccgcatagggcatgcccatgaacagcacgccgaagtaggtgatgacgccgacgagcacggcgtcgatgatcttgcccataacatagccgccgaagatgctgttcgtccggcgggccaactccagcaggcgatcggcatgctggcggctgaagaccgccacggtgaccttcttggcctgcgcacagagctcttccttaaagatcaggatatatacggccgcgacgatgccaagcaggatattgaagatgaccatcacaacgctgtagaccgagctcgtcaggctcgtgacgatcacgctgtaatcgagcttcttcagccagccgatgaccatttccagcgggtcgccgacggtcttttccaggaaggactggatgtcactgttcgtgaaaatgccgcggaaccacttgctgatggtcgcataatagctttcgagcttttcgggctgcagcagctcctcgatgcttgcgatcaggttcggcacgataagagcgatgagtgcatagaccgcaaggcagaacaccagcacggcagcgcagatcccggtgatcttgctgatgcgcgcggccatccgatcgctgaggttccgtttggcaagcagcttgtccatgatccgctgcgtgaccttcataacgggattcatcagataggcaaacaggcagccgtagagcagagcggcgatgatgttgaggaattcgacgatcagatcataaaagccgcgcaggttggagaaaacgagccagaacagtccggcggcgacgatcacaagaaaggccgtgagaccccatttgacatatttttcattgcgattcagcttcatagcgtatcctcgtgtcatgatattctattctaggataccacgaagcggcggaatcgtcaagcagagaagtcctgcgggaaatttttttccatttcccaaaacggggcttgcaatttatggcgccggtgtggtatgttgacagcagaggtgagagtaccatggcaaaatcggaacggcagaagctgaagctcctcatccttcgcgattatctgcgcagccacacggacgagcagcacccggtgtccatgcagcagattcttgccgcgctggagggcgagggcatccgtgcggagcgcaaaagcgtctatgatgatctggacaccctgcgcgattacggcatggaaattcgcaaggtcagcggcaaaaacggcggctattatgtgccggagcgtgatttcgccctttcagagctgaagctgctcgtcgacgccgtgcaggcggcgcggttcctctccgaaaaggagtccatggccctgatccgcaagctcgccgccctctcgagcgcgcacgaagcggagctgctgcggcgcgaggtcgtcgttaccggccgcgccaaaagcggcagcgaggacgtctgccgcaatgtcgatacgctgcatgcggctatcgccgggaacagccgcatcacgttccgctattttgactgggatctgcagggccggcgcagtttccggccaaagacctatgaggcaagccccatcgcgctgtgctgggaggacgagaactattatctcgtggcctacggcgcgccgcacggcctgacgcactaccgcgtggacaagatgacggagatcacggcgacgggcgtcccgcgcgagagcaacgacgagacgcgctcctttgacccggccgtctattcccagcaggtgttcggcatgttccgcggggagcagtgccgtatgaagctgcggtttgaaaactcgctggcaggcgttgtgctcgaccgcttcggccgtgaccgcctgctcgtgccggacgggccggaccactttgtctttcaggcggatatctccgtttcaccgacgttcctcggctggctcgcaggcttcggcggccgggcggagatcgtgttcccggcgtcggcggcggaagcctaccgcgattttctgcgccgtgcgctttccgcagcagagtaaggcagaacggaaatgatttgttctcaaagtattcataatttcgtggtatactggcaaaaaagagacaggaggactcttgtatggaaaagcagccccccagcatcgacagccgcctgcgccacattctgcgtatgccgcaggagatctatcaagcaagcggcatcatcgtcaacggccgaaggctgaagagcttcgtattcacgaccgatctggccatcatccgcaactgcgacgcggacgccgtatttgccgtctatccattcacaccgcagcaggccatcagcgacgcgatcatcaaatattcctatgtccccgtattctgcggcgtcggcggcggcacgacgcgcggcctgcgcacggtgcagcttgcgcgcgacgtcgaatcgcagggcgcgatgggcgttgtgctcaatgcgccaatcaacaatctgaatctccgcgcggtctccggcgtgatcgatatcccgaccgtcatcaccgtgacgaaattcggcacggacttcgaggcgcgcattgaggccggagcctccattctgaacatcgcagccgctgcgcagacgccggagctggtgcgggaggcccgcaaggccctgccggacgtgcccatcatcgcaacgggcggcaagaccggcgagagtatcctgcgcaccatcgaggcaggtgcaaacgccatcacctatacgccgccatcgacgtatgagctgtttcaggaaatgatgaagggctatcgcgaataaacaagccaggaccgctgcgcgacgcagcggtcctttccatatttgtattttgatacttctgcagcagcgtttcctgagcgccgctgagcgggtatcaggcgcgctttctgcgctcgagtgcgtcgcggatcagcccgtgcaggagcagcagcgcgcagtacagcagcagcgccgcgcagaacacaaagacaaaatcatgcggcagagaataggtcgtggcagtgagccccagaagagtgacgtgcgccagcagataggcgaccggcagcaggatcacgcgctccgtccaggcgcaggctcgcggcttcttccggacaaaaatacggacgagcacagcggctgccagaacgatcagggctacaaaggcatagtaattgagcgtcagggacggcagggcgatcatgccgccggaggccatcggctttcccgcgagataaacggcctccgtgccgtcgttttcgctatagagaacggtgagcggcttaccgccctccgcctcgagccgggcggcctgtgtatgcgggccggagaaccagcgctcccagagcgtcgaccaggcctccacaaggcagatctcgcgcaacggatcgtccggatcgacaaagcgctccgtcgagacgttggcgacatcagcacggaacgtaagctccagcgctcccgcatcctccgtcacctgcacaagatcgtccgtataggggaaatagatcggagcattcaaaatgccggctgcggatatcacggccgtcaggacaaacagagccgtcatcacgatgatttgcaggcgcttgcgcgccagccttttctgcaaatgctgcaggggcgcggcgtccggagcgggctgcagggcaggcggggcctgtgtctcctgcagggcggcgcggcagtccgcgcaggtgcgcaggtgcttttctacaaaggcagcggtctccggactcgtaagccgctcggcatacagcgggagaaggtcccgcacaatgctgcattcctgattcatgttgatccctccatgttttttcggatgatggttttggcgcgatgataggtcacgcacgcccagttttccgatttgccgaaaagctgcccaatggtcctgaagctcagaccgccgagggcccgccagaggaagacctccttatacggctccggcgcgctgtggagcgcggcccggatgcgggcggcatcgtcccggtccgtgagctgctcctccagactcggggcggaagcggggagtgcttccattttcccgtcatccagcagctcgatgcggcccatgcgcttctgctcggtatagaagcagttcttcgcgatctggcagagccagacgcggatatcgcaggccccgcggaagccgggaagcgcgcgcatggcgcggcagaatgtttcgctcgtcagctcttcggcaagctgggcatcgtgagaaagggcaagcagatagcggtagacatcatcaaaataaatgcggtagatctccgcaagctctgacacggcgccacctcctttctgccaataagaccgcgccggagagaaaatcttacaggaatgcgaaaattttttcgctgcgaatggtgccagccccgttcaggctgcaaaaaggtccgctgtcaggcataacagcggacctttacatgcatttgcgttctatcccgttttcagaaatcagaagcggatgcgaccaccgatgaggcgaccggtagcggcaagacgctcggcatcacggccacgcggctccagaacgccatgagcgcccagaaccatgaggatagccagataggtgtcccaaccgaggggagcagagccgcgctccatctcggagatcttctgacggctcttgccgacggcatcaccgagctctgcctgagacatccgcatcttcttgcggtaggcgggaagctcctggacgagagaactgatcagttcacgctgctgttcggactgtacaaactgaggcataactttcccaactttctttttaaatttcagccgcctgccaacggccgattcctgtaacaggaaattcagctctgtgtggaagaatccatgattcctgcttacatgctcaatatatcatactatgttccgtttgtaaacaggattttgcaaaatattttgaaataattccatgtagcctgcccaaaaccgaactgcatgaaacgtttcaaattttacatactccgtattgacgtcaattgtacaaaagcatgtcagtttgttataaattgactgcactcaaacaccgttcttgaagaacgcgaccgctacgacacccggccccgtatgtgtgccgatcacactgcacagcagcgtctgctccagactgccgcagtgatcgcgccagagcgccgcgctgtccgccacatatttctgcagcagggcatcgctcaggccggtgtagccgagcaggatcggcagggaaaagtcgatgccgccgctctcgcgtaccttctgcacaagcaggttgttgccctgcttcgagccgcgcgccttgccgatcatggtcacggccccgttttccagcgtaacgaccggcttgatgccgagcagcccgcccgcgagcgccgccgtgcgtgagatgcgcccgccgcggcggagatactccagcgtatcgagcaggccgagcaggcagatgtcgtcccgctttttcgtcagcagcccggcaagctcggcggcggccatgccgtcagccgcccattccagcgccagctctgccagaatgccggatccgatggcggcgctgcggctgtcaacaacatagatatcctcatagtctgccgcggcgatgcaggcgctctgataggtcccggacagctcggcagagatggtgatgactacggcgctctctccggcctgccggacggcctcaaattctttgacaaaggccgccggagtggcctgactcgtcgtgggcagcacgtcggactcgatcagccgctcataaaagcgcctgcggtcgatggtaacgccatcaataagctcttcgtctccgaaatgcaccgtcagcggaacggcgcgcacctgtgcgcggcagcgctccggcagatcgacggtcgagtcgacaagaatgcggacgggtttcatagggtatcctcctgttctgcggcgcacagccgttccagattgccgcagatcaattccagtgcggcatacattttgctccgctgctcctctgtcaggcccatgctggcagcgtcctccatcgaggcaatgcgtgcctgcagggcggcgaagacctcgcgcccacggtccgtcagatacaggggactacgatagcggcgcgatacggcctccgtggtcacatagccgttttgcagcagaaattccagtgtccgcgagacggcggccttgtcctcatcgcagcgctcggaaagctccgccgccgtcagggggccgtccagcccgagatagtacaggcacgagacatgtgggcccttcagaccgaagcgcgccatttcctccgccttcaggcggcggatgcagcggctgatgcgcgcgatgcgctgcgtaaagatcccatagcgttcttccatggcgttcctccatttcgatatgttgatttatcaacttgtctgcagagtatagcacaaacttattgatttgtcaacattcggggcggcaccgcacaattcagcaagagcattcggcgaaaaatgtccggcgaaggccgaaggggaattatgcggtgttgcccaaagtgtaggaacgtgccgaacgagcgcggcataccatgggatgagcgcgaaataaaggaggaatcatatttggaattcagaacgcaacccatgatcgaagcggcgctccgcgaggcgcggcaggaggccgcgcaggaagcgccgcagccggagcgcacggagcaacaggatgccgcctgcggcatgcttccggcctgcgcgccgctggcaaatccctttgtcccgttccagagggatgatccgcccgtctatgcagcggcggtcggggccgtgcgcggtaccctgtttccggggctggaccttccgctgcgcggacaggagaacagtggcgagctaagcggtacgctgcagcgcgacctgcaggcgctgggcttcgccgtggtggagcttggcgaatacctcgatacgcatcccggcgatgccagagcggcggagctattccgctcctattctgggctttatgcgcaggcggcagccgcctgggaggccgagaacggccccatcgtccagcgcagcgccgtgggcgagtccggttatgactggctgcgcggcccgtggccgtggcagtacgctgcaaacgacggggagggctgacgatgtttgtctatgaaaagaagctgcagtatccggtgcggatcaaaaacacgaacccgaagctcgcgagcatcatcatctcgcagtacggcggcccgaacggcgagctcggcgcggcgcttcggtatctgtcccagcgctattccatgccgtttgacgagcagcgtggcctgctgacggatatcggcacggaggagctcgggcatctggagatggtcggcacgatcgtccaccagctcacgcggaacctgacggaggagcagcagcaggagagctcctttgcgccgtatttcgtcgatcacacagctggcgtctatccgcaggcggcctccggcacgccctggtcagccgcaacgatgcaggtcatgggcgaccccatcagcgatctgtgcgagaaccttgcggccgagcagaaggcccgctcgacgtatgacaacattctgcgcctgtcggacgatccggatgtgaacgacgtcatccgcttcctccgcgcgcgggaagtcgtgcatttccagcgcttcggtgaggcgatcgagaagctgcgcgagcacctcgaccgcaggaacgtatatctctacaatccggcgatcgaggcataaaaatctcccggcgggagcatccgctcccgccgggcagggatcttcaaatatcgaactggctgcggtacagctcggcataaaagccgtttttctccagcagggtcctgtggttgccctgctcgatgatgtggccgtctttcatcaccagaatgacatctgcctcgcggatggtcgagaggcgatgggcgacgatgaagctcgtgcggccctgcatcagacggttgaaggcctcctgaatcttgatctccgtgcgcgtgtcgatggaggacgtcgcctcgtcgaggatgagcatcggaggcaggcagagcatgacgcgcgtgatgcacagcagctgcttctgcccctgggacaggccgccgccatcctcggtgatcggcgtgtcatagccctgcggcaggcgccggatgaagccatgcgcatgcgaggcctttgccgcggcgatgacctcctcgtccgttgcgtccggcttgcccatgacgatattctcgcggatggtgccggtcttgagccaggtgtcctgcagcaccatgccgtaggacgtgcgcaggctgccgcgcgtcaaatcgcggatatcctcgccgctcacgcggatgcagccgctgtcaacatcgtagaagcgcatgagcagattgatgatcgtcgtcttgccgcagccggtcggtccgacgatggcgatgcgctggccgggcttcgcagcaagatcaaaatgctcgatcaggtgctgctccgggacataggagaacgagacgtcctccagcgcgacgctgccgtctgggtccgtgagcgtcttcgcatcggcgggctccggggtctgcggcgtttcctcgatgagctcgaagatgcggtcggcgcaggccagcgcattctgcagctccgttaccacgccggaaatttcgttgaagggcttcgtatactggttggcatagctgaggaagcttgtcagctggccgacggagatgccgccgtgcacggcgctgagcgcgcccgccacgcagacgcccgcatagacgagcgagttgacaaagcgcgtggacggattcgtgatggacgagaagaaaatggcgcgcagcgagcacttgcgcagccgctcgttgacctcgtcaaagcggccctgtgcgcggtcctgatagccgaaggcctgcacgaccttctgattgccgaccatctcatcaatgatgccggtctgctcgccgcgggcggcggactgctccttgaacatggcgtaggtcttgcgggcgataaagctcgcaacgaacagcgacaccggcgtgatgaccacgacgacgagcgtgatgagcggattcatccacagcatgaacagcagcgtgccgacgatggtgagcacgcccgtaaagaactgcgtgaagcccatgagcaggccgtctgcgaactggtcgacatccgcgatcatgcggctgacgatctcgccgtagctgtgcgcatcgatgtagcgcaggggaaggatctccagccgcgcaaaggcatcgctgcggatatcgcgcacggtgcggtaggtgatgcggttgttgcaggcgttcatgatccactgcgacagcgccgttgcgccgatgaggatgcccattttgagcagcagactggcaatggcggagaattccacctttcccggtgctacgatgaggtcgactgcctgcccgatgaggatcggcagatacagtgtcatggctacggtcagcgccgcaaacagcagagacagtgccagcagcagccagtattttttcagatagcgcaggagcttgcgcatggtgtttctctttttcatgcgttctgcgcctccttcgggaactgggaatagtagatttcctgatagaccgggcacgattcgagcagctcagcatgcgtgccctgcccgacaagcgcgccgtcatccagcacgaggatctgatcggcatactggatggaggccgcgcgctgcgacacgaggaacacggtgacgttcgcatcgtgggcgcggatggccttgcgcagacgcgcatccgtcgcgtagtccagcgcagaggcgctgtcgtccagaatgagaatttcggggtcgcgcacgagcgcacgggcaatggtcaggcgctggcgctggccgccggagaggttcttgccgccctgcgcgaccgcggcgttcagaccgccctcgcgggtcgagacaaattccgccgcctgcgaggtctcgagcgcgatctgcagctcggcatccgttgcgtcctccttgccccagcggagattctccgcgatggtcccggcaaacaggacggccttctgcggcacgataccgatcttgctgcgcagctgcccggccggatagtcgcgtacatcgacgccgtcgacaaggatgcgcccgcccgtcgcgtcatagaaacgggggatgagattgacgagcgaggactttccggagcccgtgccgccgatgataccgacggtctgcccgcgccgcacgcggaagctcaggccagacagcgactccgcgcccgcgccgccatagcgcagcgcgacattttcgaacacgacggcgtcctgtgcagtgggatcatcctgagcgggctcgcccgggaacgtcatactcgaattctcgtcaaacacgctttcaatacggcgggcgcaggcagccgccttcgtgatcgtaatgatcaggttcgcaagcttgatgagctcgaccaggatctgggacatgtaattgacgagcgccacgacctgtccctgcgtcagcgcgccgcgctcgacctgccacgcgcccgtccagatcaggacgacgatcgcgctgttgatgagaacgtaggtcagggggttcatcaaggcggaaattcgacccacaaagagctgcaggtgcgtcaggctctcattttcctctgcaaactgcgccgtctcctcggcctccttatggaaggcgcggatgacgcgcacgccgctgagattctcgcgcgtgcggcgcagcaggcggtccagcccggcctgtgcacggcggtagagcggcatggtcagcagcatgatgccgaacacgacgacggacagcaggggaatggccaccgcaaagacgagcgccgagcggacatcgatggtaaaggccatgaccatcgcgccgaacacgataaacggtgagcgcaggaacaggcgcagcaccagattcacgccggactgcagctgattgacgtcgctcgtcatgcgcgtgatgagtgaggccgtgccgagatggtccatctcgctgtaggacaggctctggatatggcggaacagagcggatttcagcccggccgcaaagccgacggcggccttcgccgcgaaatactgcgccgtgatggagcaggtgaggccgatgagcgccagaccgaccatcagcaacaccatacggacgatgtaatgaacgtcgcccgtggcgatgccgacgtcgatgatcttcgtgacgacaagcggcacgagcagctcgaacgaagcctcgagcagcttgaacagcggccctagaatgctctcttttttataatccttcaaatagaccagcagctttttcatgcttcacctcacgccccgcagggcaaatgtttttcccaaatatttagtatagcatatccgccgcagtttgaacagacccacttccggcaaaagcagcctccctgcaggaggccatcgaccacatgaagaagctgaaaaaaatatctggagtaaaagaaagccgggctcccggggaaggggagtccggcgtgattatttcttctttgacagatgccataacttcttccttcccgcagtaagaaagaagaaattgagaaggtctgttgtccatttgttgtccaaggcaaaaacgcccagcacaaaacaggctgaaaaatatagaaaaaccatcgattccaaatgaaatcgatggtttttggtggagataagcgggatcgaaccgctgacctcttgaatgccattcaagcgctctcccagctgagctatacccccatatgaacttttctgacgctgtgtcgtttccctcagtgcacgggtattatatcaaacctcccgccaaattgcaagtacttttttcaaatattttgatttttttcggcagaaaaatataaagtcagaatacagattcaaaagttcatattaaaacgatatatttcctatttcccttgctgcgatcttcgctcgaacagcaggcaattgagcacgccgccgtagaacagaatggacatgcacacataaagccacagcatggccatggcgatgccggcaaggctgccgtaaaacacggagtaggagccgaagtgctgcacatagacagagaacagggacgaaaacaccagccagccgagcgaggcaccggccgcgcccggcagcgcgcggagcaggggaatgcggcggttcgggaaaacgcacaggatcgcccagaacagcagcgtcagcagggcaaacagcacaaggccccggaagcgaagcacgcgcgacagcaggcgcaggatcggcacatgctttccggcgatccacgcggtaagctggctgccgaagacatgcagcaccagcgtcagcaggagggcggcaagcagcagcacggtataaagcacgctgaccagccgcgtatagacatagccgcggctctcgcgttcaccgtagatcgcgttcagaccggtcttgatgcagtaaacaccacgggaggacgaccagatggccataatggccgaaaccgggataagcgtgagggacgaattgctcccgaggtcccggatgacccactccagcgcaggttcaaacacggaagggatcacgccgtgcagggcagagagcaggtgcgcctccgtcaggccggtgtgcggcagcagcgccagaacgagcaaaattgcagggaagacggacagcaccagataaaacgacgcatttgcggcatagagcggaacgcggaacaaagcgatccggcggatgaagcggacgggagccgcgagccgatctggcattcttttcattttatatctccctccggcgaagttcatttgacaaagaaacggaacgatggtatactgaattggaaaaagagaatgcggcaaaggaggcacggacatcgtgcatttcatcagcagcgccatggcaagcttctgcctggagaccaccgtcgaggatgcgatgcagacggtgcgggacgcggggttcgacagcctcgatttcccgctgagcgtatacagccgcccgcaggacgcgccgctgcgcggagacgactggcgccagtgggcgcgcggggtgcgccgcacggcggaccggatcgggctgcccatcacgcaggcacacgcctcctgggagcaggccattccggacgacctgcactacgaatcaccttatgaaatctatgagcggacgatggaggcctgcgccatccttggctgccgccagctgatcttccatccggtgctgtatctgcaccgcatgccggaccgcagcctctggccgcgcatccacgattggaacgtccgctggttccacgagcttctgccgctggcggagaagttcgacattgtgatcaatctggaaaacacgttcgactatcgccatctgcagcagccgggcgacgcgcccgtgccctacacaacggcgcaggacatgctggagctcgtctacggcattggctcgaaccgtgtgcagctttgcctcgacaccggccatgcccacatcagcgggcaggacgtgccggagatgatccgtgcgtggcgcggcaatctggccacgctgcatctgaacgacaactacggcctgatccggccggtctttgaggacctgcatctgttccccggctacggaacgctggagtggaagccgatcttcgacgccctgcgggacatccgcttccgcggcgttctgaacatcgagccggtcgtggagctggcgcgtatgccgcgggccgtccgcgtcatccagctgcgggccgcagcccagacgctgcaggtgcttgcagaattataatcctagtataccacaaaccggtgcggaagaaaagcggtttgcgcagagggggcgcggcgagtggagaaaaatacgcatacgccgcgtccgctgcatcttgcacaggcggagcctctgctgcgggagcggctggaagctaccgtcgtgctgaccgtgacgggcggaagcatgctgccgcttctggccggcggccgtgaccgcgtaacgctcggccccgtgccggagcgtctgcgccggggtgaggtcctgctctaccgccgcgccgacggcagctatgtgctgcatcgcctgaccggcttcgggcaggacggcacgctcgttttctgcggggaccgccagaccgagccggagcgggggatccggccggagcaggtcatcgcgcgggctgtagccttcgaacgaaaaggacatttttttacgcgcagggcgcccggctaccgggtctactgcgcgctgtggccgcgcctgcgctggtgcaggcaggcgatcttccacctgcgggcagtcctgccggggaacggcaggaaagggcagaaatgagagagagtctatgaaacaacgcaaatccgaaatcaactggaagctcgtcgtccgcgtcgcatgcctgatgctgctcgacgtcatgctgctgtatctggcatgcctgctggcgctgctgtcgcgattcgacctcagtatccacacactcatgcgcgacagcggctttttgcctgcactgcatgcggctttcccgtggatggcgatcggcatgatcaccctgttcatcccactgaagctctacagcagcctctgggaatttgccggagtggaggagctgctgcacattctgtgtgcctgcttcctgtttgccgccgcgacgctgctgctgatcctgttcggcgtgctcgacctgccgcgcagcttcccggttctggccgggctgtatctggtggcgctgctcagtgcatcacgcttttcctatcgtctcatccgcacgatcctgcaccgctccggcagcgagaagcgcaagaagcgcacgatgctcatcggtgcaggcagcgccggcatgctcgtgctgcgggaattccagacgagcgaaaattcccagaacaacgtggtgtgcgtcatcgacgatgaccgcgacaagctcggcaagtacatccgcaacgtcaagatcgccggaacacgggaagacattgtcgcactggcacagtcccgccgcatcgaagagatcgtgctggccattccgacggcagccgtgcgcgaacggcgaaatattctgcagctttgccaaaagacaggctgccgcctgaagatcctgccgggcatttatcagctggcaaacggcgaggtcaacatccagaagatccgcaatgtggatgtgcaggacctgctcggccgcgactgtgtgaaggtcgacctctcccagatcgcgggctacctgtccggcaagacgatcctcgtcacgggcggcggcggttccatcggcagtgagctctgccgccagatcgcgcgtcatacgccgaagcgccttgtgttgctggatatctatgaaaacaacgcctatgccatcgagcaggagctgcaccgcacgcatccggagctggaccttgccgtgtgcatcggctccgtgcgcgacgaaatgcgggtcagctccctgtttgcgcagtaccggccggacatcgtgttccacgctgcggcgcacaagcatgtgccgctgattggagggcagcccgaacgaggccattaaaaataacgtattcggaacgctccatgtggcgcaggctgcggaccgctacggcacggagaccttcgtgctcatctcgacggataaggccgtgaacccgacgaacgtcatgggtgcgagcaagcgcgtctgtgagatgatcgtgcagaccatggcggagcgctccaaaacaaaattcgtggccgtgcgcttcggcaatgtcctcggcagcaacggcagcgtcatcccgctgttccggcggcagatcgaggagggcggccccgtaaccgtgacgcacccggacatcatccgctattttatgacgatccctgaggcggtatccctcgtgctgcaggcgggcgcttatgccggccgcggcgagattttcgtgctggatatgggcgagccggtccgcattgacgatctggcccgcaacctcatccgtctttccggctttgagccggacgtggatatcgaggtccgctataccggcctgcgccccggtgagaagctctatgaagagatgctcatgcaggaagaggggcttcgctccacgccgaaccatctgatccatatcggccgtccgctggacatcgacgttcctgcctttgagcggcagctcacggcccttgcagcggcctgccgggaaaattcacccgcgatccggacgctgctggcgcaggtcgtgccgacctatcacccggaggcaggcggaagaccggccgcgaacgtgtcataagtgctgggaggaaacacaacggtacgagcgccgtgataccccggcttgcatatcatattcaacatcatagggaggacattcggatgaaaggtatcattctcgctggcggcaagggcagccgcctgtaccccatgacccgcgccgtttccaaacccctgatcccgatctatgacaagccgatggtctattatccgctgagcgtgctgttgatggcaggcatccgcgacatcatgctcatcacggctccggcggactgcgagtcctaccgccgcctgctgggagacggctcccagtttggcatccatgtggaatacggcgtgcagccggtcgcccgcggcattgcggacgctttcctcatcgccgaggaattcatcggcggcgcgccgtgctgccttgtgctgggtgacaacatgtttcacggcgcgcagctcgagcagctgctccgtgccgccgcagcccggacggagggtgcgacggtcttcggttatcccgtaaagaatccgagtgcctacggcgtcgtggaattcgacgcacagggtcaggtcctttccatcgaggaaaagccggaaaagcccaagtcccgctacgccgttcccggcctgtatttctatgacggcgacgcagcaaagctggcgcacaccctgcagccgtccgcccgcggcgagctggagatcacggccctcaacgagctgtatctgcggcaggggaggctccatgtggagctgatgacccgcggcatggcctggctcgacaccggcacgcccgagggcatgctcaatgccgcgcagtatgtagaggccgtgcagtcccggcagggactttatattgcctgtcccgaggagattgcctgggagcagggattcatttcagatgaggaggtcgcagcacgggggcaggagctccgcatgacggagtatggccagtatctgctgagtctcgtcaagtaaggaagctttatgacagaaaagttggaacgcattttgcccaccgtacagaagcctgcgcgctatgtgggcggggaatatggacagacaatgaaggacaagcgcagcgttgagctgcgcgttgccttctgttttccggatacctatgagatcggcatgtctaatctcggcatgcgcatcctctatgcggtcatgaaccgcatggagggcgtgtggtgtgagcgcgtctttgccccgtggggtgatatggaggatgccatgcgcgcaaacggcctgccgctgtatgcgcttgagagcggcgacccggtgtcggagttcgacctcattgcctttaccatcggctatgagatgagctacacgaacgtgctcaatatgctgcgcctgtccggcgtgccgctgcatgcggccgaccgcacgggactggagcatatggtctttgcgggcggcgcatgtgtgtataacccggagccgttggcggatttcatcgatttcttctccgtcggcgagggcgaggagagcacgccggaaattctggagctctatcgccgcgctaagcgcgagggctggagcagatcggaatttctccgcgccgtggcgcagatcgagggcgtctatgtgccgtcgctgtaccgccacgagtggaatgccgacggcacgctggcctcggtcaccccgctggacggcgcgcctgcgcgtgtgacaaagcgcatcgtgcaggatctggacaccgcgctctatccgacggacggcatcgtcccgaatacggagatcgtccatgaccgctcgaatctcgaggtcatgcgcggctgcatccgcggctgccgcttctgccaggcgggctatacctaccgcccggtgcggccccgctcgcccgagacgctgcgccgtcaggccattgagtctctggaaaattccggctgccatgagatcacgctttccagcctttcaacttccgactaccgcggcctgccggagctggcagatgccatgctcgattactgcgcgccgcgcaagatcaatctctcgctgccgtcgctgcgcgcggacaatttttcccgcgatctcatgctgcggctgcagcaggtgcgcaagagcggcctgacgttcgcgccggaggccggtacgcagcgcctgcgcgacgccatcaataagaatgtcacggagcaggagatcctcgatacctgcgccatcgcctttgagggcggctggaacaatgtgaagctctacttcatgctcggcctgcccacggaaacggatgaggatgtgctcggcatcgcaaagcttgtctatgagatcctgaagacgtggcgcgagcacgccagcaacaaaaagcgcggcgtgcgcatccatgtggcaacggccttctttgttccgaagccgttcacgcccttccagtgggagaagcagatcacgccggaggaatatctccgccgggcgcgcctgctcaaggacaatatgccgtcgaagagcatcgagtataactggcacgctgccgacctgagccgcctcgaggccgttctggcccgcggcgaccgccgcctcggccccgtgctggaggaggccgtgcgccgcggcgcgcggctggacggctgggatgagtatttctcctatcagacgtggctggacgcattcgcggcctgcggcgtcgacccggatttctatacgacgcgcggcttcggtctggacgagcttcttccgtgggacacgatctccgacggcgtgagcacgggctgcctgctgcgcgagcgcgagcgtgcctaccgctccgaaacgacacccgactgccggacggcctgcaacggctgcggcgcaaactgccttttgaagggagggcgctgcgatgcataggatccgctttgaaaaaacaggccgcgccgtctggatgtcgcatctggacctgatgcggctcatgcagcgcgcgttccgccgggccggtgtggtgctgcaccattcgcagggcttcacgccgcatgcctatgtgtccatgctgctgccgctgagcgtcggcatggagagcgtgtgcgagctcatggaatacgagctggacggcgagcttgccgtcacgccggaagcactcaacgccgtcctgccggagggcgtgcgggtgctggaggtctatgaaagcacgcgcaaggcccgtgagctgcgccgcctgcgtgcgctcctcacgctggaatatgacggtgctgtgccggagcctgccgcgatcacaaccctgctggatcggacggagctcgtggtcgaaaagcgcacgaagcgcggcatggctgagacggacatccgccccatgctgcatgcctatcatgtggaggctgcgccgggcgcgctgctgctgacgtgcgaggtcagcgcgcaggagccgtcgctcaaccccatgctgcttgccgccgccatcgagcgctatctgccggaagcaaagccggactttgtccgctgccgcagactcgaaatgctcgatgagcagggagggatattccgttgatgtttggaaagggacgaatttcttgaaaaccagtgatttttactatgatctgccgcaggagctcatcgcacagacaccgctggagcggcgcgacagctcccgcctgatggtgctccaccgggagaccggcgagctggagcaccggcatttttatgatatcgtggactacctgcagccgggcgactgccttgtgatgaacgattcgcgcgtgctgcccgcgcgcctgctcggccaccgcgtgccgacgggcggagccgtggagctgctgctcctgcaggacaagggcggcggcgtctgggaatgccttgccaagccgggccgcaagctgcaccccggtgcggagctctcgttcggcgacggcgcgctcaccgcgacggtcacggccgaggaggagggcggcaaccgcctggtgcagttccactatgaggggatcttcctcgagctgctcgagcgcctcggcaagatgccgcttccgccctatatccgcgaggagcttgccgacggcgagcgctatcaaacggtctattcccgcgtcaccggctccgccgccgcgccgacggccggactgcacttcacaaaggagctgctgcagcgcattgcggacaagggcgttatgcttgcctatatcacactgcatgtgggactcggaacattccgccccgtcaaggccgacgagatcacggagcaccatatgcacagcgagttctgcatgctctccgccgagacggccgaggtgctcaaccgcacgcggcagaacggcggccgcatcatctgcgtcggcacgacatcctgccggacgttggaatcgctggccgagccggacggcacgttcacggaaaagagcgcctggacggatatcttcatctatcccggctatcgattccgtgcgatggacgcgctcatcaccaatttccatctgccggagagcacgctcatcatgctggtgtccgcctttgcgggctatgaccatgtcatgcacgcctatcacgaggccgtaaagtcgcgttacagatttttcagctttggcgacgccatgttcattgagtaatttcacacaatttctatattgttaaatataagcatatgtgcaggagtataccatgtttcaactgttaaaaaccgaagggaaggcgcggcggggcgtatttacctgcgcgcacggcacggtgcagacgcccgtgttcatgaacgtcggcacgcagggcgccatcaagggcgcgctgagcgcggcggacctcaaggccatcggctgtcaggtcgagctttccaacacctaccatctgcatctgcgacccggtgaccgcctcgtgcacgatctcggcggcctgcaccgctttatgacatgggatgggccaatcctgacagactccggcggatttcaggtattctcgctggcgagcctgcgccggatcaaggaggagggtgtgtatttcgcctcgcacattgatgggcacaagatcttcatgggtccggaggagagcatgcagatccagtcgaacctcggctcggatatctgcatggcctttgacgagtgcatcgaaaatcccgcgccctatgactatgtagcccgctccgtcgaccgtacctatcgctggctcgtccgctgcaaggcggaaaacgcccgcctgaatgcgctgccggacacggtgaacccgcagcagatgctctggggcatcaaccagggcggtacctacgccgacctgcgcatccgccacatgcagcagatcgccgagctggacctcccgggctacgccatcggcggccttgccgtcggcgagagcacgcagacgatgtatgacatcatcgacgccgtcgagccctatatgccgaaggacaaaacgcgctatctcatgggggtcggcacgccgtcgaacatcattgagggcgtcgcccgcggcgtagacttcttcgactgcgtcatgcccgcgcgcaatgcgcgacacgcgaagctcttcacctgggagggcgccatcaatctgaagaacgcgaaatacgagcgcgacatgcagcccatcgacccggcctgtgactgcccagtctgccgccgctattcccgcgcgtatctgcgccatctgttcaaggcagaggaaatgctggccatgcggctttccgtcatgcacaatctgtatttttacaacaagctgatggagcgcatccgtcaggcgctggacgaaggccggttcgaggaattccgccggacgtactccgagcggctcgaccgccgcatctgaaaaattcataatttttttcttgcaatgacggctatgtgcctgtataataaaaacaatgtgaaaaattggaggaaaatcctatggactacagcatgatccttatccttgtcgttatggtcgcggtgttctacttcatgatcatccgccccgagaagaagaaaaagaaggaagaagagaaccttcgcaattctctgaaggaaggcgacaagatcacgaccatcggcggcatcgtcggtaagatcgtcgacatcaagggcgacaatatcgtcatcgagaccagcatggaccgcgtccgcatggagctggccaagtggtctgttatgacgaataacaccgcacaggaggctgcgcagaaggcccgcgccgaggcgcaggctgccgccaaggagaaggccgccgccaagaaggccgaaaaggaacgcaaaaagaacgagaagaagaacggcctgtaaacggcaattccgatctcaggataaaacggaccgccgcagcgcatgcagcaggtcctttctatatttgggggaaaccaaatggactatgcagagctgtatctctgggacatcccggtcgtctggagcaagccggaaagcggggaccgcgagctgatttccctacgcgaccgcacgccgcgcatcgcggcagagggctgcgacatcgaagcgctcatccacagcgagatggggcggcagatggtgctgcaatttgaagactacatccgctacggcgacgaaatggacccggcctatgtgcagaagtggcacgcgcagggcctggacaagcaagtgatggagcgcaatgacttctatcaccgctgggcgctgttcacgcccatttcggcacgagaaaaaagctcccgccgctacccgctgctgttcgtgctccatgggagtagcatgccaatcaattgggaggagtgctccggctttctgcccatcgcagcgcgcgaggagctgatcgtctgcattccgcaggatcactcgctccaaaatctcctgcgtctgtatgacattctgacgcgggactacccggtcgaccccggccgcgtgtactgcacgggctattcgcaggggagcgcgcagacaaatgccctgctgttcgcccggccggagctgcttgccgcggccgcgccgtgcggatgccttgccgggccgttttccatggggatggagccggaagagcgcgtgcagcacgcggcgcaggtgcgcgtcccgatcctgaccgtctgcggccagcaggagggcctatatcttgtgccttattacaaggacgccccgcagtgcggcatgtattacgcgcgccgcacgaatccgcgcggacgggagacggcacgcaaccgcctgccggtgcaggccccgaatgccgcatacaaggtcgaatcactgaatcttcgcctgcgttcgtgcaactgccccgaggtcacactcgagaaggtccttgcctgtgcggagagcgaggatctcgtctgccgccgcatcggcatgccgttctccaaaaccgaggtacggcgcatttacggctgcgaccactatatcggcacggtgacggaccgctacggagacgacacgctgcagatcatctccgtggacaatttcccgcattggcccgcgccgtccatggcggagcttgtgtgggaattcctgcgccactattcgcgcgatccggaaaccggcgctctgcgggatgaccggaagtcctaacagaaaggcatgctttataaaaaccggggcggcggaaatgcgggtggtcgtaagacagtttcagtcccggcagtaatgtctgccgggactgttcttgcacatattaaagccatatgatagaattaaaaaagcaataaatcggaatgataaggtaggtaaggtataacatgccaacaattcagttaaaggcgatgacgcgagaactatgtcacgaactgtacaagcattggacgaatgatgcgtctatctatatggatatgcacctgtttcagccctatgtttatgacgaagctgcggtaaatcgatattttgatatgaaggggcaggatgcttcacgcagactgtttgcaatcatgcttggagataaggtgattggggaattgcaattgaagcagatcgaccatgataaaaaagaatgttccctgagtatccatatgcaaaacgacgcggtgaagggaaaaggatatggaacgcaggcagaacgtttggcagtaaaaaccgcctttgacgagtttggaatggctgcggtaaacgcagataccatcaggaaaaacacccggagtcagcatgtgctggaaaaggtaggctttcgctttgtcggagaagatgaatcattcaaatactaccgtatcgagcggtaaacttaatttgccgaactgataaagggcgcacttctatacacctttcggtgtaccgtg

SEQ ID NO: 11255 - DNA, 330 bp, Unknown
  gut microbiota DNA sequence
catagcgatacgctttcttcagcttcaattgctattggcatgttctccacagatagctacgtcaatccgttggcaatacaggcggaagcgaatgtgatttgctaaaagaacgcttaacaccaccacaccatcctcgagccttctttcatcccactgtgaggaatgtgggtatgctttacatagggattgcaggaaggtatcccgagagcggatcacgtcggaccaaggcatattccggcattccgcctggagaatgatttgatcatcccagatacataaatctgtcatacctatgaagccctcgcaccgcgcagtaacattacagttcat

SEQ ID NO: 11256 - DNA, 819 bp, Unknown
  gut microbiota DNA sequence
cctgtcaacgaatacaaaacaggcaatatatcgaggtgatccgcatggtaagaagaccagctatttcgcagaagacggcacctgctatttcccgctggaagtcgaacatcccgaggatgtaccacagtttgttcatgtctccggaactgaagttttggaagtatgtccgcttacaaagggatatccccttggagatagaacatacgaggtggtagccggatatggcgatgtcgaagcagaacgaattttttgcaaagaccgtgacggaataacaacagagttaacatttgaaaagtgtcgcgcgagtacgcgcgcaatcatcccatgtgccgggggacttttgattcacaatgatcgcttgtcaacaatgctctactacatttgcgatgatggagagatgacgctgctgttttccttgccatgtcttgcatcacaaagctctgttcaaacctgcggctcgactgtctatctttctgtaaaacgctatgtgtcactcggtgaaattggcatgcgccgccttgaaaacgacacagaggaaggaacgtggcgtattgacctgaaagacgggacgaaggaaaagataaacgattatattttctgcggaatgtataattttgatgacacctgtatttattgctgcgatgaggatgggaatatctaccggatggagctggatggcgaggtatctcctattctagtgaggaataactaagcgggtaattgttctgcttaccgggcgggagggacaaaacctgctaaagacgaaacttttcgcctttagcaggttctcccaataacctatagaaaggaaatgccctt

SEQ ID NO: 11257 - DNA, 201 bp, Unknown
  gut microbiota DNA sequence
gagtgaatgaagaagcaagttatgagaaggcaacagtaaggaaacaaaaatttagggtaattgtttacaatttcagctaaagaaaaacttctttatgagcctgcataattctgagaagaaatagtgagaaaccagaaactggaaattctacactagcttgtaagcgttcccgaaagggaatgcggttggtcaagcgaacaa

SEQ ID NO: 11258 - DNA, 222 bp, Unknown
  gut microbiota DNA sequence
aaaagcctcgcagagtttgcgcccgcaggcgcaaagaaaatggaaatcattttctccggcggcgtgtacgtcggagaaaataccgctcggctcgcaaacgtgcgaaggatgcgccgcaggcgtgcccttcgtgcgatgcagcgagccgcagccttttcaaacgagagcccagtgaaacgggtctcgtttgagagcttgtcaaaaacacttttttgacaagct

SEQ ID NO: 11259 - DNA, 207 bp, Unknown
  gut microbiota DNA sequence
aactgaaacatctaagtagggcgaggaaaagtaatcaaccgagattccgaaagtagtggcgagcgaaatcggaagaggccaaaccgcacgtagcaatatgtgcggggttgtggacggcgagatcggtaagcttcgttagacgaatggtctgggaaggccagtcaaagagtgtgagagccacgtagtcgaaaatgaagtgaacgtagc

SEQ ID NO: 11260 - DNA, 264 bp, Unknown
  gut microbiota DNA sequence
accgattgcgtctgtagcggcgctcactgcgcagccgttggcggctttgccgccttacggatgcggcgtcccctttacggggagtgagcgccttgtacaggattattcaaccgcgcaagtgctctggtgcaccgccgtaccaccctgacgtgtcattgcgaggaggccaacggccgacgtggcaatctcggggaggcactcacggttcgtaccggctgccgtgaaaacgctgtgcaccgattgcgtctgtagcggcgctcactg

SEQ ID NO: 11261 - DNA, 173 bp, Unknown
  gut microbiota DNA sequence
gatatcgacgatcctcgaaaattgtgataactatgatctctacggcgtctgggaggacatcgcagtcctccgcgtgctggaaatggcagaagatgcgccggaatttgaagactggcttgcgcagcagccggagggaacagcatgggatgagtatgaccggcagtttgtccggt

SEQ ID NO: 11262 - DNA, 175 bp, Unknown
  gut microbiota DNA sequence
agcccttgggcttcgcacaattagagtgtccactttatggggtacattttagcgaaaaaggcaatgatttaacgaataccctaaaaattcaacgaatacccataaatttaacgcttgctttggccaaagtcaccacaaaaaccgtaaaacgcacaaaaccccgccgcagaattgc

SEQ ID NO: 11263 - DNA, 866 bp, Unknown
  gut microbiota DNA sequence
cctcggagagccccgcatttttggcagagacaatggaacattggatttgacaaaagtgctagggggttatcatctatggcaaagccaagatgataagcgagtgggaaatctgatttaagaaggaaggagaggtgcctatgggtaatgtttcttactcggcacacattagcaatggaaagagtgccataacaagtaagagtaaattgcttggagtagcaaaacacaatttgcgaaagtataaatcgccggaatacagttccgacaatattttgcttttgaggggaacggaagatttgtatcaggatgtgaaaaatgtctatcatcaggaatttgacgaagcggtacaacaatataatcaaaagcaaaagcgggctgacagacggatagaggattactttgaacatgtagccaatctgaatcaggatatggcagttgaaattatctttcaatgtggggataaggagttctgggaagaacatacggataaaaaggaaaagatgtacaatgtgtatgcttatctgttatccacaatggaaagatttcttccgaatttcaaagtggcaaatgcagtgatacactttgacgaggcaagtcctcatatgcatgtggtaggagttccggtatgggaaggtgctaaaaaaggactggcaaagaaggtgtccaagcgtaatgtattcactccggaaagtttatctgtaatattacaggataaactaagggaagaagcaggttcgtgtttcaagttcaatgtgaaggaagaacttgctgagaaaaagctgggacggaatcatgatttgtcggttatggaatataaagttgtcaaagaaactgagcgtttggaagaattgcaggagcaggtcaaggat

SEQ ID NO: 11264 - DNA, 11135 bp, Unknown
  gut microbiota DNA sequence
gtgcaggtacgccgggtacccagataccgtagtctgcgggatcgggagcttctgcaccgtctgctgcgtatacatcaactgcctctgccagctcagcaccggtgtaagtaacatcctcggttgccagagtctcttcatcttccagggtgtaatctgcggtagcggatgcatcaatacctgctgcgaactcctgaacagctgctactgctgctgcgggatcgtagtcttcagactcgctgtcgatgactgctgccagttcttcatcaccgtcagcttctacgaatgcgttgatcacattcattgcatcatcatagggctcggctgcttcttcataagcaccggttccgatggtgaacagatgccagccatcaccgaatacgccatcgtttgcccagtcggtagcccaggtaccgacggtagttacagatacataatatacgatgaacataaccactgcgaagatcggcagtgccagccatctgttggtcacgattttatcgatcttatcggaagtcgttaacttctggccttccttcttggtgtagcattctttgatgatagaggagatgtatgtgtatctctcgttggtgatgatactctcagtgtcatcatccataacagtttccaactgcttgatctctgcggatacatcgggaacgctcttcatctgtgcctggatcttgtcatccttctctaacaacttgatagcgaagaatctcttctgttcctcgggaacatcggtcagcttcttctctacggtctcgatcacgctctcaacctcagttgcgaatttatgtaccgcaactgctgcactcttcttctgtgccagttcgatcgcttttttggtagcgttctcgataccggtcagtttcagagcggagatctcaacaacggggcagcccagcttctcagcaagctttgctacgttgatcttgtcgccgttcttgttcacgatatcgatcatgttgacagccatgacaacggggatacccagttccatcagctgtgtgctcagatataagtttctctcaatgttggtaccgtctaccaggttcaggatcgcatcgggtctctcaccgatcaggtagttacgtgctaccacttcctccagagtatacggagacagggaataaataccgggtaagtccatgatgatcacgtcatcaccgttaccgccgtactgtttctttaatttaccttcctttttctcaacggttacgccgggccagttacctacgaactggttggaaccggtcagagcattgaaaagtgtcgttttaccgcagttagggttacctgcaagtgcaatcttaattgccatttttctacctctttcctctaaaatcatttaataactattcagaccccattcgcaaaacgctctttcagagcttcctttttgctcatgtgattagctttcactaattagttccagctaaccttcctgctaaaaaaaagatcatttactcaacgcaaatcatctcagcgtctgccttacgaagagacagctcatagcctctgactgttacttccacgggatctcccaaaggagctacctttctcacatagatctcaacacctttggtaatgcccatgtccatgatacgtctcttgacaggaccttcaccattcagtttggttacctttacggtctgtccgcagggaacttccttcaatgtcttcattttctcctcctattagcatcttttggtacagctgcccgctacaccatgattttattggccatatccttgccgatggctactcttgattccttgatattcacaatcaggttgccttcggtccgggacacaactgtcactttaccacctactacaaatccgagggtctccaaaaacttcctcgtctcctctttgccgccgatcctctggatcgtgttctcttcaccggcacctaccatactcaggggcatcatacacacttccttcccttcaatagtattgaactgcttgtggtttctcattagctcttaatgagattcattctcaattcacgtggttagtatatactaacctttttttactgtcaacatatttttttgatttttttcatagaaatctcataggaattgcttattgatattttttctcaatagttacgttttttactatcctgtctatcttttttcaaaaacataagcgtaaaatgagctttaccacacaaatgaatagcggtaaagctctttttcattactattttaggatacgaatatgagattccatatcaaaatctgttgtttcaccatcgtctgaatagtactcatactgtttgatcttttctccaaaggaatacaactttaaatcttcaaatttaatatcttccacacattttccgccttttgccacaggtagcagatatccctctctcaggaaaacattcacggttcccattggcatatttacataggaaaaacctttttcaaagatattaccctcttctattattccatctttgaagacgagttgcttcattcgttccgggaaatatacaactcttcccgttacattctgttcacagaccggtgcgatcataatattttctccaaccagcagttgatcctccacctgtctggctaaattatcttttccataaatgaatgacagtggattaaacatcatcgtattacgaagtgctgctttcatatattcactataaatatatggcagaagttgatacctggctccaatgacacttgaaaacttcggaatgtgagaaaagcgatacacttcctgttttctggttcctctggctgaatggttccgaagcaacggtgtaaatactgcaaattctaaccatcggagtaataaatcctctgttgtatccgcaccaaatccaccaacatccgcacctgtgtataaaaatccacacatatttaaagacggcatcattttcacattcatcctcaggtgggaccaccatgccatattgtctccctgccagataccgccataccggtgcattccgatataagatgctctggaaaacagcaaaatacgtttctccggctggtaacgttcaaatgcctccgctgcagatcttgtcatataatatccgaataagttatgtacctgatcatggcgatagcgttttcctttataattgtgataaaaagaagcgtaatcctccggattattggatattgtaccgataagatctgtcatctcaaaaaaagtattcacatccaaatttttagttttgtactcttccatcttatcaaatacttttttcaatcgcttctccgaatagaaaatagccggttcattcatgtcattccaaaatccatcaattcccttatctatcagaattcgatatttatctccaaaccatcttcttgcttcatcatttaacatatccgggaagcagcattttccgggccatacacctataacaaaatcctctccgttttcatccttgcaaaatagccgttttcttttccttcctcgtaaacatcatagccatcttctttctttacaccaccatcgattattggcacaagatggatattttccttcttcatctcctctacaagattttcaaaatccgcaaagctgtctctgttgattgtaaaatccttgtagcgttccatataatcgatatccagataaatactatctatgggaatatcgcgttttctgtattctcttacgacctcacgcacttcatccgctgtctcataactccaacggctctgtccataaccgaatgcccatctgggggcaatatagcttcttcctatcatctcacggaattctcgaactacatcctgataagtttgtccctctatcaaatatattttatagttctcattttccattgcgatgattaaccggtctatatctgtatagcccacatcaaaagtcacagtccccggtgtatctacaaataacccgtaagtttcacttacaccgtctcccatcatgataaaattatgcgccccatacagagaattggtatgctcacaatgattaggattatccgagcaattacttacatatcgccatcctctcttgttgatgcctcgcacattttctcccagaccatacacaatttcatccggttttaatgaatactgaaacacattgccttcttttttgaaaagttcgtcattccagatggtttcctttatttccttgacaacggcatccgtttctatgggatccccgaatacatattttttaaccatattttctatttccggctagcccttcactccgccagccattaatccttccttaaagtatttttgcgcaagagcatatataacaacgataggaatcatagataataaactacctgccatcagtatattatattccgttccatattgtccatttaaactgtttaaagccaatgtcaaagtcattttattcttatcattcaacataagcaacggccataaataatcattccagctctccataaacgtggtgatcgtcaacgttgctattgcagaaccggataacggcagcacaactgtccgataaattctgaataatcctgcaccatcaagttctgctgcttctatatagtcgttggggattcctctcatctgctgtaccagcataaatacagcgaaagctctgaataaggatggtaaaatcacgcttggatatgtattgatcaacccgagattgttcatgatcacaaacaacggtatcatcgttacctgtgtaggaatcatcatggatgccaagtataatttaaatactgtatttccatatggaaattgtatctttgtaaatgcaaatgctgccattgatgcggacaaaatggtaactaccgtataactacaggtaataaaaaagctatttaaaattgccctcaaaaagggaaatcgggagaagaccatccgataactgtccagcgttggattttggggaatccattctatgggaatctgcatcaatgcacctttgcttttcaaagaggttgaaagcatccataaaaacgggatcatcacaataaccgcaatcaggcaggctaaaaagtaattccatattatttttaattttacattccatttactatgattcataatgcacccacttattttgtaatttcatctgaattaaagttagtatgaatataattacgaacaacagccaggaatacgcagatgcataccccattttgaaatatttaaatccgtatgtgtagattctctctaccatgacctgtgtagccccattcggcccaccttctgtcataatctgcacctgtgggaataactgaaacgcattaattaaagccataataatgcagaaaaacatcgatgggctaagcagcggcaaagtgattgagaaaaactgtttcatttttcctgcaccgtcaacggttgctgcttcgtagtacccggtatcaattgctttcaggcctgacagaagaaataatccgtaaaatcccatatctttccatacagacgcaagaacaattgccggcatagcccaaactttatctgtaagccatccgggaccggatatcccaatatatcccagcagctggttcaatataccatactggggacttaacacccatttccagatcagactggctgctacccacgatgtcaataccggaatatagtacataatccggaatacggtgattcctttcatgtttttattcaatatagatgcaatcagaagggacattatcaaaaccatcggaatatacagtacaatataataacaggtatgtcccaaaaccttccaaaattctgatgttccgagtatctgcttatagttatccaaaaatacaaaattacttgccagtgtcttgtaagataatttatccagtccattccagtttgtaaaactgatggctatagaaattataattggcaaaaagctaaaaacaatcatcccaagaaagctgggaagcataaatggtatggcgtttttcaaagctcttttctgtctttttttgctcatattttttcctgtcattttcaggatcactgtcgcatggcttacgccatacgacagtttcctaatttataatttgatttctactgtaacttaatctgtgcagtacactcttcctgggcctgatccagtgcttcctttaccgtgatttcaccacttgctgcaaggcttaatttattggtaatgatatcggacattaatgaataatcttcaataatcggagctactgtcaggtaattcagggaatcaaatactgcctgacgattctcgggaggggtcagcttcaaatatccggaaagaacatcctcattattgattgcaggaagatcccaacctgcatcaattctcatctgtgctgcagtatcactggatgcaagccagttgatccaggttgcagcggcttcctttttatcgctatccgcattcactacaagcgcattactgaagaaatgtgttgctttctgtgttccacccggctctacacaaatatcccagttaaagtcacacgcatctgcaaatgtattaaatgcccagataccggtaggaatcattccaagtcttccactttcgaacaggtcccagtcacccattcctcccatctgtgcttccgtgggctgcacattcgtctcagtcactttactgatcatcattgtagcggctttcagattttcctcagaattaattgtgaactctgttttgtcctcattcaaaactcctccgccatactgcgcagctactttgaagaattcgttaaaagtgatcggctgataaatgccatagatatcgtcacctaatgcactgatcttctcacacgcttccatcgcatcatcccaggtccaatcatctgtaggataagcaattccagccttatcaaataaatctttattataaataagtactacattagagaaatttccgggtacaccatactgcttaccatctacggaaaatgcgtttaatgcggtcgtattatagccgctggtatcaattcctgtaagctcagccagaactcctttattcgcatatgccgcaaaattctcaatgttcagttcatagcaatcaggggctgttccaccggctactcttgtctgcatctgtgtaaaatagtcgtcatatccaatcgtttcaatgttaactgttatattgggatattcttcgtggaatgcatcatacattttctgaagtgtttcttcattaccaccagaggcattaaaattagcatacgtaatttctgccgtttcttccgctacttcggtgttggcaagatcaacagtctcctgcttactttctgttgcagctgcagttccttccgcagtattatcatctgtgcttccgcagcctgtaagtaaagaggttgccaatactccggttaataaaagtgacattaatttttttctcataaatgtatcctctccttttcataatttaaacggttaacctcgcatatttttactgtatgaactcaaaaatgatattttgttctgtctccccctttactgttatattttttcccttccaggtaatatctatctgatcggaaagaatagaatccttgccttcctttccgtagaggaaaatcttatttttcccatcctgttccatttgaattgttgtcccggactttacataaaccggtaatttggtctcaggatctgagtctatccatttttctccttcatagcacttatttgtaaagaaatcaaaccattgtccttctggcagatatacctttctggatgtttgattttcttccataaggggagccaccagcatactatttccaaacaggtattcatcttctaagttaattacattgctgtcttcctgaaaatcatataccagggggcgcatcatgggtttactttctcttactgcaattttcgccgtttgataaatgtatggaagaagttcttccctaagtgtatgccagtaacgcatctcatcaataaattccggctgtccgtatgccaaggctacattccatggacttctttcattatttccatcacttcccggcatcaattccctgaactgaccgccatccggttccgaatgccactgcattatgggagaaaatactgccatctgcgtagatcttctgtataaatcaatactcggaagcggtcctgcaaatccaccaatatcaaaactccaaaaaagaataccactcatggctgcggaaagggctgcccgcaagacattctttaattcctcattggttgactgatggtctcctgcccataaaataggagttccggaagctcctgcatatcctgcccggctaaacagtacttgttcttccgatatttcattactgtatgcattcacataatcctgacaatactgattcttaccttctgctccgtttgttccatccgaaaaattcacttcttcggaatatatgaactctccaccgtccgtcttgaatccatccacgccaatatctgacaggtattttcttttttgaaaccaaaacttcttcgtttcttcatttgtgaaatccggaagataagagccttcaaaccaattgcccgccggtatctcataaggcgttcctgctttattcattacaagcagtccatgctccagtgcatattccttatccatgtcaagctgttccgatactcttcccggttccattcctttaaaaacaggaatttgccaaagcactagctttttccctttttcatgaagcctctcgatcatgcgtttcgggtttttccagtatttactattgctaaaatcaaaatcatcataggaaaaaccttctgccgacctcttcagtgaataggtagctccgttccaaatatagaaagttgcttcatcactccatgcttccaatacaataacactggtcggaaaatgatatttttccaattcctcaagcaatctgtctacatctgcttcagaattccagtgattggctgatgcccatattccaaatgcataacggggtggtatctgcggtcttttaaacaaaccggtataatcacgaataacctcacctattgtacccgtaaatacatagactttggattcgctcggtatttgacatcgaattgcatgatcaagcgtgattgtcgttttcttctttgtctcaatgtaaatacccagtcccgaatctgtcacgaaaaaaggagtcacgcagtaactgatatttccctgattacagaatttttctataacctgtgtctctactgtctttcctttctgattcactgcatcaaatttctcgcccagaccatatacacctttataatccacattaatgattaattttgtaccttctttgcgttctatctctgcataggagtcatttgccagtaatatttttttatgatattcctgatcttttatcgtttctaaaatcataatatctccgttctttttcttacactttgcctttcaattagttttacaggaaatacttcttccactttttccatctggggattttcaatgttctcgatcaatatttcaacagctctttctcccttagctgaaataggttgttttaccgtagtgagcccgggcgtcgtatacttggaaatatccagatcatcaaatccgatgatggatatatcttcaggcacctgaacaccctgttcataaaaccccttcatcagcccaattgcgaggacatccgctgtcgctaccactgctgtaatatctgccttattatctacgaaccattttgcagcatttactccgctttcataatcaaccgtcgcttcataaagattttctttttgaaattccagtccattttgttcaatcgctttcaggaaacctttatatcgcttctgcataacaccatcttcctgaagatgtcctgtcaccaatgcaatttttttatgtccctgccgaatcacaaattctgtagccagattagagcaattctcatcatcaattcttagtttatgaaaatagtcatatttacaataactatcaattaacactaccggtacatccaatgtttttaattcactaaaaaactgattctgataagtaccaataataataactccagccaaatttcgttcctggatcagctgaagataatcttcagttacatcggtagctgagataattacatggtatcctctctgtcttgcagcatactctatgctacccagtaattcactgtaaaaaatattatgaaacatcagcttactaccgggctctgtctgtggaacgactactcccagcaatttagtatcttttacagttaatcctcgtgcattcaaatccggcacgaatcctagatcatcgattactgtcagaatcttttgcttcgtttcttcagatacttttttctttccgtttaatacataggacactgtcgctactgatacgtttgatgctgctgcaacatccctgatggttactctgtttttcatactttctcttttcatacagtttttaatgagttttgttaaccggttaactatattatattctcctatttttgaatgtcaattatttttatttaaaataatattttttagataaaataaacaaacattacgtatcgtttttatagatttttaacgttgcttcttcaaagtaattcataatacttttttcttctttattgatattttttctcattaagttgaaatcttgcatttcctacccttttctgctattcttattgtaatgcctgcgaatggtcaagtttccatatgtagggcaggtatttcggttcaaaatgctatgtatgggaagggtatggtcattacatgaaaatacaggaatctgctgagaattatctggaaacgatcttagtgctgaagaaaaagaatggtgttgtccgttccattgatattgccaacgatctgggcgtgtccaagcccagcgtcagtgtcgctatgaagaatctccgcaatggggaatatattgaaatggacaaggaaggctacatcaccctgctggataaggggcgggaaatcgcagagaaaatctatgaacgtcacacattcctcacggactggctgacctccatcggcgtggatcccaccgtggctgctgaggatgcctgccggatcgagcatgtgatcagtgcagagactttcactgctatgaaaaagacattgaagacgaaatagaactcacagtaactcattgcatgttatttgaaagcaagaactcccgacgcaatattgaatattgctccgggagttttgctat

SEQ ID NO: 11265 - DNA, 11020 bp, Unknown
  gut microbiota DNA sequence
caaaaagatgactgtcacaaactgtttccatgtcatattcgtcgttccggcgagataacagagaaaatcatccggtgccaccggcagaaagattgccagtgtaaataatttcaaaaatctccccttcaactccgtccatgtcaggtatttttcaatcattttcccgggaaacatcttgtacagcaccggtcttcccagacttcttgctattccaaaagcaatacaggaacccgcacagattcctatataattatagaaaaatcccggcaccgctccaaagagcagcactcctgccagacagctgatgccacccggtatgatgggaaacaccacctgaacgatctggatcagcacgaagatcagtgcaccgatcattccgaaacggttcacaaactgctgcatagtctccaccgattggaaaatgccgctctgatagccccagactgccagtattccacagaggatcagactaacccaggatgcaatattgacggctctttgccaggtgtttttctcttttgacctgtttttcttcaatctgtcgctggtatagttgctccatgcttcccgcaaatcttttttgggaaaatatttctgcggactgttttgcataactgcacattcctctgcgttcatcgtcttctttctccttccagttcttcaggtctttcaagaattcctcctcggtccggtactgccagccgtttttgccctcttccacaaccgcccgcaggcattgatcccttctgcataataacggtaatcctgctgccagtgcttccgcataggtaagcccctgggtctcactggtggaagcgctgacgaacagatctcctgccggataataagatgctacttcaacgggtgataccattccggtaaaaataacgctttccgtcacacccagttctgctgcctttttccgtaaaatctccaaataaggaccgccgcctacaatcatcagtattgtgccgctctcctgaattttctgctggtactccagcaattcttccacattcttctcttttgccagacgacctacatataaaagcactgtggtcttccggtccattttatattttcttcggattttctcccgggaatccgtccgggtctgcgcgtcatatttactcagatcaatccccgatgggatcactgataccggacaatgaatgccatagtcttttagtaatgtctctatttttgtgctgggagcgatcatactgtccaccttctcggagatctgtcgcgtcaggaactgtaccatatccctgccccatttcttgtaaggggaaaaatagtgggtataatcttcgtatacagtatggtaagtatgcaccagagggatcttacattcctctgcgatcttttttgccatgaaaaaggtagaaaattcacactgggaatgtacaatatccggattccactctataatcccgcgatacagttcgcgtcccggggacacccgaaatcttgctcccggataaatatatccggcattcacggaacccatatagatcacaccctcttcttcgtaggaacgagctgtacgggacaaggtcaggatcttcacttcatgtcctctttgctgtaattcctcccgtagattgcataccgaagtaacaactccgttgatggtcggcttgtaccagtctgttgtgatcaatactttcatcttttttctcccttccgtttattttctctgaattgatctcagcataacagacacaggtaaattccatccgaataaaatcaaaagttttcctaaagtttctgtgagttttttccaaaatgtgcactaaaaaacaacattctccggaaatttccggaaaacgccgtttttaatcgtctttctataaaattattatctttcttctctgaagtacgccagtcccagacttgcggggggctgattctctctcttgctcctcatactggtgatgaccagtaccagtaaggtcacgacataagggatcatcttatacagctcctgatactccatatgctcgataccggtgggcagatacagatacagaatatacagaccaccgaacaggaaagaagcaaatacactgatattcggtctccagatagtgaagatgaccagcgcaatggcaagccagcctctgtcaccgaacgcatcgttggaccagacaccgcaggcataatccattacatagtacagtccgcccagacctgcgatcatacatcccacgcaggtagcgatgtatttgtaccgggatacgttgataccggctgcatctgcggtattgggaccctcaccgactgctcttaagtgcagtccggttctggtatgactcagaacatacgatgccgcaaacgcaatgatcactgccagataagccaggaatccataggataaaaacagcttgccaaaccagccaagttttcccgcaaaaggaagggacttactgaaataactgctggtagcagacagtgcaatggaaggtacatcactgtttaccagcttgatcagggatccgccgaagaagttaccgaagccaacaccgaaggtggtcattgccaaaccggtcacgttctggttcgcccgcagggtgacagtcaggaagcagtacagcaatcccatcaacagggatcctaacaggcagcagagcatcggaatcgcaatggcaagaaacccattcatgttcgccgcgtctcctgctgatctctcatagaagaaagatccgatgacaccacagatacctcccacatacataacgccggggattcccagattcaggttaccggatttctccgtgatgatctcaccggtactcccgtataacagaggaattccctgtacgattgctctcggaataaatgcaagtaaaaatgaccacatgcttactgttcctccttttctgcttttttacggaactgcagtctgtaagtaatgaagaactcacagccgatgataaagaacaggataatacctgtcagaatatcggagtaagaatgattcagtccaaaattggtagagatctcactggctccgcgatccatgaatatgatcaggaagctggagaataccatggtcagaggattgaacttggacatccaggataccagtacagcggtaaatccctgtccacctgcaatcgtggtagtcacagtatgattgatgcctcctaccagaagcaggcctaccagtccgcagagagcaccggacaacagcatggtacggataatgactttttctaccttgatacccacatattttgcagtgttttcgctttcacccacaacagagatctcatatccctgcttactgtagttcaaatatacatacataaatatcgtgatcactactgccactacaatacttaacagatatttggaaccgaagatctgcggtagccagcccacattggtgttctggttgatgataccgatcttaccggatcccttgggaacctcccatactatcgtataaaatgccaccaactgagtagctatgtagttcatcatcagcgtagacagcgtctcattggtattccatttcgccttgaaaaatgcgggaatgaagccccagatggctcctgctgccagacttgccacgatcatgcacaggatcacaactgcgtttgaaagcttatctcccagacagatcatacaggctgctgctgccagcccgccgatcagcacctgtccctcaccgccgatattccagaatttcatcttaaatgccggagtcaatgccaatgcgatcaaaagcaggatcgctatattctgaaaagtgacccaggtcttgcggacggatccgaaagcacccagaacaatggactgatatacctgtaaaggattgattcccgtggtgatcgttgtaatgataccgcacaggatcagtgccagcaggattgccagaaatcggattcccagagctttgtaccaggggagcgcatctcttttaacgatatgaaataaaggctctttattcttttccttcatgttctttgcctcctactctggtcatcagcataccgacttcatttttgtctgtctttctcgcatccagaataccactgacttctccgccgcacaataccatgatacggtcggacagctccatcagcacatccagatcctcacctacgaaaatcacggcaacgccctttttcttctgttcattgatcaggtcatatatagtatacgaagaattgatatccagacctcgtactgcataagccgtcaacagtacagtaggtgcagacgcaatctctcttccaacgagaaccttctgtacattaccaccggacaatctgcgtaccggagtggtgatacccggggttacaacctccagattttctaccacatccgttgcaagctgtttggaaggctttcggttcgtaaacggtgtatgtccctgtcggaaagaacgtaacatcatattatcggtcagatccatattgcctaccagacccattccgagacgatcctccggtacaaaagaaagcgatacacccatctctgcgatcttcaacggatccttgccgatcagcatttccttacttccatcatcttccacatagctgatcgtgccggcttctgttacctgcagacctgcaatggcttccaaaagctccttctgtccacagccggagataccggcgattcccaggatctcaccactattggcggtaaaggagacgtccttcagcttaacgataccttcttcgttacgtacggtcagtccctgtacttcgatacggggcttcggattcacaggttccggtctgacaatattcaaagtaaccgcatgtcccaccatcatattggtcatttccgtaacggtggtatcctttgtcagcatgcttccaatatactgaccgttacgaagcacagccaccctgtcggacagagattccacttcatgcattttatgggtaataatgacaatagccttgccgtcatctctcattttccggagaacgttaaagagcttctctgtctcctgcggtgtcagtacggcggtaggctcatccaggatcaggatatccgcaccacgatacagcacctttacaatctctacggtctgcttctgtgataccgtcatatcatagattttctgcttcggatctacttcaaaaccgtatttgtcacagatctcctctattttacgggatgcctccttgatattaagcctgccttccagacccaggatgatattctcggtagcggaaagtacatcgatcagcttaaaatgctgatgcaccataccgattcccagccgtaacgcatccttgggggatttgatgacctcttccttaccgttaataaagatctgtccctcatccgggaaataaataccggagagcatattcatcagtgtcgtcttaccgctgccgttttccccaagcagtgataatatctcacccttatagatatccagatttaccttatcattggcaatcacggatccaaaagtcttggtaatgtttttcatcgaaaccgcagctacttttgtctctttttccatcctagtcacctttccaatttatccacgacctgcaaattttcaggtcttttaatacctggcataagcacactggccgccccttttctacctcatccatccacaacaaacaaaagatccataaggtagaaaaagggcggcgcggcgataaacgctgcgccgtccgggctatttcaataagtcaattaatactgctcatccaacaggttgattccatcaattcttacattgaagtaaggagcggaacggaatgcaacatcggactcatggaagtatccgtcacttactacctcatggtcgggagtataatcaggatcagtatcgatatcagcttcatagctgtccagggtcttaccgtctacagtaaaggtggtgatatcatatacatgagccttgcctgcgatcagatcagcctttgcagcttctactgcttctgcggtaccatctgctacagcagtaccaagatcgctcagctctacagagccggtctccagagtaccacaccagtcagtatcgataggagttccatctgctacacatttaatagcatactcaaagtaaggctcccagttaactctggaagataccaggaaggtattggggcaggctgcctcagtgcttccgttgtaagatacgttgggaacgcctgcggtctcacatgcggtaggagcacccatggagtctgcatgctggctgatcagtacgcatccgccctcgatcagcttgttagctgcttctttctcagcggtctcatcgtaccaggaaccggtaaaggttacatccatggtaacgctggggcatacggaacgagcgcccaggaagaaggatgtataaccggacataacttctgcataagtataagcacctacataacccatcttagcctgatcctcggtaatatcaccattagcgatcatctcattcagcttcatgcctgcaacgatacctgcaaggtaacggccatcatagatggaagcaaatgcattgtggaagttgtccagaccctcggtatgagccttggttcctgttgcatggctgaactgaacattgggatactccttagcagcctcgatgatgtagtcctcatgtccaaagctgtctgcgaaaatgaaattgcaacctgcatcagcaagctcacaagctgcttcataagcttcctgtccttcaggaatgttggtcttggtcatgtactcaatgccaagcttctcacaagctgcctttgctccgttcaggaagttcagatcataagtagagttctcatcatgcaggaaaataaaacctgcctttacaccactgacagcttcgccatcagcttcagtagtagctgctgcctcagtagtagctgctgcctcagtagtagctgcaacagttgcagcatctgtgccggtggtagctgcgttattggatccgcatcctgccagagcagtaactgcgagagccatagctgcgagtaaacttacgactttctttttcataattctcctctttctgcgctgctgcttcgttacagatccatgtagcagcgcggacacagatctgcagataaaccggtgagtcaacgcaaaaagggtgtatgacaccttcatacgacccctttattgtactctctcaacattagtcagtataagcatttgtctgacttcttgtcaagagaagtattaaatttttattaactcgtttgagaatgtggttctgaatagttatctaacttatctaactcttaagatcgaaatgtgatctctccggttttgtcatccatactttccacaattgcgagggactctacacggatacccttggaacggatcaggtcgccgcccttctggaatcccttctcaacggcaatgccgacaccctctacagaagctcccgctttattgacaatgtcgatcaaaccctccagtgcgcatccgttggccaggaaatcatcaataatcagaatatgatcttccggatgtaggaattttttggagacgatcacgtcatatactctcttatgcgtaaaggattcgatcttggtggaatatacttctccgtcaatatttacggactgggacttttttgcaaataccaccggcacatgaaaatgctgggctgccacacaggcgatgccgataccggaagcctctacagtcaggatcttcgtaatcttacggtctgcgaacagacgcgcccactcttttcccatttcattgaacagatcaatgtccatctgatgattcagaaaagaatctacttttaatacattccctgcttttactgtaccgtctttgcgaatgcgctcttcgagtaatttcattgtatgtctcctcttttgtttctacttaatatattctgtggtagtactttaggcttttatgtctcttattatacgcaggatattgctcctttttcaatagaagaactatatttcttgctattttgattacattttgctatgttaaccatgagaatactgaaattacgaggtgccttatgcctgtcagaggatatatcatagaaaaatataatgctatgaccaacgcttatacctgcaatcgtctggtacaggaagcttctgccctggatatggatctgcggattgtagggatccacgatactatggtctctccgcatggtattataaatcatggtaaaatactggaacctgtggattttgtcatcaaccgctataaatgggggcgggaaaaggatgctataaatgcgcttgccacccgaagctataatcctttaactgcttataatatctatattaataaatttgaacaggtacgaaggcttcattccgaagcctttctgatcccgaaatatcttttgggaacttcactgttgcctttttcttctattgtagaacaactggggcttccttttgtcggtaaaggactggaaagctccatgggcgaggaaatcgtctgcatccgggataaagcttcttatgaagagctctctcttaactacccttcctccaaggaatggctcttcgaagaatttatctcggaaagctacggcagagatctgcgattttacagcatccgcggaaaagccgttgcttgtatgcagcgcagatcccagggggatttccgtgcaaatgtagctctgggcgcttcggtagatccttaccctgtcacgcccggcatccgtgccatagccgcagatatttacgagcagaccggactggattttttgggaattgatctgctttttggcagagaaaaaccttatttttgcgaaatcaatgttatgccgggactggaaggcattgaaaaagcctccggtattaatgttgcagcaaaagttatggaaacaatacgatcagactttgcataaggaactcatctcatatttgtacctgcacagtgtacgaaaatatacgatactatcgtatcagtaaaattgcaggttacggaaaggtatgctcatttttatgaataatgcttccggaacaccactggaatttcataagatcactacgctgaaagaggcggaagactttgtctatgcttcctatctgcgggctgccacacatcaggactatgccgcaaaggatgccggaaaaagacatcctgagctgacgagatctctgctccggcagaaatcgattactccctgtgtcgtcgtcaccggaagcaagggaaaaggatccgttgccaatatgatctcccggatcctgcaaacaaatttatgcgtaggactgatgaccagtcctcatattacggatttcagagagcgcttccgcgtcaatgataccatgatcagtgaaaccgacttttgccgtctgatggcacagatccagccggagattctggacattgcctccgatctgccggattcggtatgtatcagccccatgggcattcaggcggacctggcactgacttatttttcggaaaaacatacagatttcaatgtatttgaatgcggcaaaggggcaaaatatgatgatgtaaacaacattcgtcacgattatgccgtgatcaatcggattttcttagagcatacaagagagctgggagatacgctgactgccattgcagaagataaatcccacgtcatcaccggggagcagaagtgtgtttattttgcggagcaggagccggaagtattgaaggtgctggtgcgccgtgccgaggctatgcaggttccctacaaaatatatagtcgggattttcaggcagaaaatatccgctatacctgttccggtatgctatttgatgtggtgatcggagataacatttatacggatttacagattccgttattgggaaaacatcaggcgaaaaactgcgcactggctctggctctgtgcgtggatgtcatggcggatctttgccgggaatccaatgctccggatatattttcagatacaatgtgcaatcaaattcgccgccaactgtctgcgatccatcatccggggcggatggagattctaagttcggacccttttatcctgttggatgcgtgcatccattccgccagctgtgaaaatgtaaaagaagttctgcatcatctggggatttcgaattgtacggtaattgtggggattccggaggataaagattacgcaggggtgatccggtccatgagggaagttgcgaaccgaatcattctcaccaaatccgggaatccgcattatcatttttcccaaaaacagcaggagtcattggcagaagagggtattggcacgatatggacagattccgtgcaacaggcactgactctggctgattcttgtccggatcccatcgtaatcttgggaacgacttcggtaatttccgaagtagagcggatttttcggcaatcttaacttgctctcaccggatacaggtgctacaatgagggcaaatagaagagtagcaaaacattacgcagaaaggagaagttccatgacaggtatttacggaatcgattattataataattatagtctgaccggcaattacggatacggttattctaccggtgcggtatcttccgcacggtccgaagagaagggtatgatagtaaatcccggaaaatccgatgtggaaaagcccggcaggaaatcttctcccgcggaatgtgagacctgcaagaaccgcaaatatcaggacggttccaatgagatggtctctttcaaatctgcagcccatatctctccacaggcttccgcttccagggtccgtgcccatgagcaggagcatgtaaccaatgcctacaacaaagctgcacagaacaacggtaaagttctctccgccacagtatccctgcggaccgcggtatgtcccgaatgcggcactgtctacaccgccggcggtaccaccacgactaagatcagctacagtgacgagagcaatccttatcagcagaacaaaaaatccgccgatgctgccgcagtgattggacggaatctggatctgagtgcatagacctcattgccccgactacgcataatgtcatccagggaatatgaccatcctcgaagggatcaggttatttctgggatgccttattactatcaccaaaatgccttgggatttctccatc

SEQ ID NO: 11266 - DNA, 27336 bp, Unknown
  gut microbiota DNA sequence
agtggggaaaatcagattttcttctgcttcttcctcatcctcagaaacggcttcctgtgctacttcttccatggcttcctcaagattgtcgaattcatggtctccgttggaaagcttctcacgtaccttggcaatctgcgcaaccttaacaccctcatccagattgatcagctttacacctgatgtgattctgctcaaagtggagatatcctgaacacgaagctgtatgataattccttctgtggttatcatcataatttcgttatcgtcatttacagccttggcacctaccacatcaccggttttttcaacgatcttgtagcattttacgcctttaccgccacgtttctgtacggtaaattcatccatattggtacgcttacccattccattttcagatacgatcaacaggtcactgccctgagtctgtaactgcataccgatgatctcatccccgggagataagttcataccaataacacccatggaagctctgcccgtagcccggacatccgtctcctggaagcggatgcacataccctgtttggttaccaggaagatttcactgctgctgtcagtgattttcacctcgatcagctcatcctcttctcgtaagttaatcgcagtcagtccattctttctgacattggagaactccatcagaggggtcttcttcacaataccggtcttagttaccatgaacagattcttatcatcactgtattcatgaatcggaatcatagcagtgatcttctcaccgggtgccagctgcagaagattcacaatagcagtacctcttgctgtacgaccggcttctgggatttcatatgccttcaacctgtaaactcttcccatattggtgaagaaattcagataatgatgtgtagtcgtcatcagaagatcttcgatataatcctcatcaatcgtctgcattcctttgattccacgaccaccgcggttctgtgctttaaaattatctacggtcatacgcttgatataaccaagactggtcatggcaatgatagtattctccttcggaatcagatcctccatagagatatccagttcatcatagccgatcttactgcgtctgtcatcaccatatttttcagcaatcgcagtcatctctgtcttgatgacacccaataacagtttttcatccgccaaaatagccttcaactccgcaatttttactaccagatccttatgctcgttctccagcttctctctttccagacctgtcagagcacgcagacgcatttctacgattgcctgtgcctggacatcggacagctcaaatctttccatcagtctttcttttgcaatctgtgcattctgactgccacggatgatagtaatgacttcatcaatgaaatccaaagcttttaacaatccctgtaaaatatgatctctttcctctgctttgttcagatcatatttggttcttctggtaacgacatcttcctgatgtttcaggtaataagtcagcatatccagcagattcataactttaggctgattgttgatcagcgccagcatgatcacaccaaaagtatcctgcagctgtgtatgcttgtacagctgattcagaataacattggcattggcatccttacgaagctcaatgaccacgcggacaccttcacggttagattcatcacggatatctgtgataccatcgattttctttaattttaccagctcggcaatcttgatgatcagatttgccttgttgaccatgtaaggcagttcagtagcaatgatctgactcttgccgtttggaagtgtctcaatattggtcactgcacggactctgatcttaccacgaccggtacgataggcttcttcacagcctctggtacccaggataagtcctccggtaggaaaatcgggagcttttacaatgggaagaatctcatcgatcgttgtatctctgtcttcttccacacgattatcaataatttttacgacagcctgtaccacttcacggagattgtgaggcggaatattagtagccatacctacggcaatacctgtagtaccgttgaccagcagattcggataacgactgggcaatactacaggctctttttcggtatcatcaaagttcggtacgaaatctacggtattcttactgatatctgccaataattccatggaaatcttggaaagtcttgcctcggtataacgcattgctgcggcaccgtcaccatccatggaaccgaagttaccgtgaccgtctacgagaggataacgggtagaccagtcctgtgccatattaaccaatgcgccgtagatggagctgtcaccatgaggatgatatttacccatggtatcaccgacaatacgggcacttttacgatgcggtttgtcgggaccattgttcagttcgatcatagaatagagtacacgtctctgtaccggcttcagaccatccctcacatccggaagcgcacgggatgcgataacactcatggcatagtcgatatagaaagtttccattttttctttcagatcgacttcatggattttatcaatctcagcctccgaaggcttatcaaaaatatcgtcgttcatgtttcctcacaatctgtcgtaaaatacgactctctattattaaataccgtaactattcagattctgatttgaaaaatagttgctagatgtccagatttttaacaaactgagcattctcttcgatgaattctcttctgggctctaccttatcgcccataagagtagtaaaggtcagatccagttcggattccgtctcttcatcataattcactctgagcagaatacgtctctcgggatccatggtggtctcccaaagctgctccgcatccatctcacccaatcctttataacgctgaatcttgttattttggtcacggcctacttccgtcaggatactgtcaagttcttcgtcactataggcataccatacctttttgttcttctccagcttatacagaggcggtttcgccaaaaacacatgtccctgcttgatcagctccggcataaaccgatagatgaaggtcagcagaagagtactgatatgtgcaccgtctacatcggcatcggtcatcagaatgattttgttataacgaagcttggtaatatcaaaatcttcatgaatgccggtaccaaacgctgtgatcattgctttgatctcggcgttggcatagattttatccagtcttgccttttctacattcaggatcttaccacgtaagggaagaatagcctgggttgcacgagaacgtgctgtcttcgcacttcctcctgcggagtctccctctacgatgtagatttcacagttcttcggatccttgtcagaacagtctgccagcttaccgggcagagccatagtatccaatgcggtctttcttctggtaagatctcttgcctttctggcagcctctctggcacgctgtgccaaaatagatttttcacagattgtttttgcaatctgaggattctgctctaagaaataagtcagctgctcactgacaatattgtcaactgcacctcttgcctcactgttaccaagtttttgcttggtctgtccttcgaactggggatcctcaatcttaacactgacaatagcagtcagaccttcacgaatatcttcaccggacagatttggttcactgtcttttaacagctttgcgcttctggcataatcattaaaagtcttcgtaatagcatttctaaagccctgtaaatgagtacctccttcaggagtattgatattatttacaaagctgaatacactctcgttataagaatcattgtgctggaaagatacttccacgtacacattgttcttctcgccttcaaaatacagaatattttcgtataaaggctccttactcttattcagataagcaacaaattccttgataccaccttcgtagtagaactcaacaactttctgtttcttaccattttccagagtaatggtatgtatcttcccgattttgccgccggtgcgggctttggtagattcctcagaagtagcaaaagcatctgcaaacgcctcagagtcatccttaacggattcttttgccgcagcatcggaaacagaatcatctgaagatgcagatgtatctttggcatcttcctgtgctctctgtaacagttcgctgatctgctcattttcatattccgcagacattgactccagagaagcttcctcttccgtacggttatctcttaagatgatgcgcagtcccttggtcagaaatgccatctctctgagtcttctcttcagtacatcaaaatcatagaccgttgtttcggtaaaaatcgtatcatccggcaggaaagtaaccttggtacctgtcttttccatagggcaggtgccgatttctttcagtgcataacacacatgtcctctctcgtaacgctgcttatataccttgccgccctggcagatttctacttccagccagttggagagggcatttacaacagacgcacctacaccgtgcagaccaccggataccttgtatcccccaccgccaaatttaccgccggcatgcagaatcgtaaatacgacttctactgcgggaatacctgccttgtgattgatacctacaggaattcctcttccgttatcgataacagtgatagaattatcttcgttgatcgttacatcaatggtatcgcagaatcctgccagtgcttcatctaccgcattatcaacgatctcatacaccagatgatgcagtcctctgctggatgtggtaccaatatacattcccggacgctttcttacagcttccagaccttccaatatctgaatctgatccgcgccgtattcatgttctaccgcggtattgttcctattttcttcgctcatgattcctcacattctgccctacaggctgccaaaattatattcatctgacggagattcttctatatccgatttcagacccatattttcatttacacaggtaactgttccggcggataccttgaatactctgttaatttcaaaccggttatttacaaattcttccagaccggtacaggtaatgatcgtctgaatatctccgatactgttcaacagatagttttgccggttactgtccagttcagacaatacatcgtcaagtaacaggaccggtgtatctttcgtgatcctttttactaattcgatttcggataattttaaagagagagcagcagtacgctgctgaccctgggatccgaactttcgtatatccacatcacctaccaggaaggaaaagtcatctctgtggggtcccacggatgtcattttggcccgcatatcacgatcctggctgttttttaattttctttcaaattcatccagctccacatccggctcatactggatacggatctcttccctgccaccggacagctttttatgaatctcataaatgatctcattgagctgttctacgaacagctttcttcgctctatgatcttacttccgtaggataccagctgcatatcccagatagtcagagtttccttcagatccggattcatatacatatccttcagaagcttattgcgctgattgacgattttgttgtaatgattgagattatagagatagaaattgtccagctgacataattccatatctacaaatcttcttcgttctgcaggaccgtttttaataattccaaggtcttccggtgagaaaaatacgacattacaaagccccaggagatctgcagccttcttgatcttctgaccatcaatagcaattcctttggactttgactttctcagatgcatgtccacgcggatctcttttccatctttttcgagatacgttctaatatgtgcctcttccttgtcaaaattaacaatttctctgtccttgcttcctttatgcgattttgtggtggcagcaacatagattgcttccaggatattcgtcttgccctgcgcattgtctccgtacagaatattggttccacggtcgaactgcaggacgagcgaatcataattcctgtaatctgccaattctattgatttgatgatcatagtaacctgcttactctattacgatggtctcgccatcatattccactttatctccggataccagctttttgcctctctgggtctcggtctgtccgtttacttttaccagaccgtcctgtacggcaaattttgcatctacgccggattctactacaccggctgcctttaatgcctgaccaagctttatataatcatccttcaaacggatcgtatgcatatctataacctcatttctaagctactgtcgtaaagttcacgggaagaatcaggtaaatatagctttcctccacatttttgatgaaacagggagccttgggatttaccatgtacaaatctacttcctcatcatcgataacacgaagagcatcgatcaaaaacttgggattaaatccgatcataagatccttaccctgtttctgaatatcaatttcttcattcatgcttcccagagcggaattgatcttaagttccattccgttgtctgtgatatttacaataataggcttcttgtcgccttcttttaccagaagagtagcacgatcgatacagcttaagaactcctttttattgacctttactttcgtctcataatcgctggaaagcatctggtctatcttgaaatattctccttcgatcagacgggataccacaacggtcttatcgaattcaaatacaatgtgcttttcagtgaaggagattgtaacatcgctgtctgcatctccgggtaaaatcttacttacttcattcagggtcttaccgggtaccactacctttttgggagcataactattcttcatctgaatcttacggatagagatacgatgtccgtccagagatacgatcttgaattcatctccgttaatatcaaacagttcaccggtcattaatttgttattatcattatcagagatagagaaaattgtctgtcttaccagttcttttaaagtaaactgactgatcacaatgctgtcatctctctccactgcgggaagataggaaaaatcttcgccggatttaccaataatagtgaattttgccttttcgcaggtaatgacggtcttaaaagaagcatctgtttcaatggtaatatcgctgtcgggaagtttacgcacgatttcaaggaatatcttggcatccagggcaatgatacctttttctacgatctgtccctcgatggtcgtctcaatgccgagttccatatcgttggcagtaagtttaatttctccgttagtagcatctactaaaatacattccagaatagacattgtagtcttactgggaacagctttggatacgatctgtacgccgtttaaaagatttgcttttgaacagactaatttcatgtgtgcataacttcctttctggttgatttgcgtacgcgtggatacgcgttatataaaaataataaaagaatttcgtagtctccttaataagggatgttgatatgtgcataaccagtcttattatactatttttcaaggaaaaatggaatggaaatcttcgtggatttggcagaataacctaagaataactcttagcttattcacaccgcatcctatccttcatgaagccttgaaatcagttatcaacaacaatacacattttattcccgagatatacacatcaggagggattaatctttttagtgataatatctattttattacgaagttcctcgttggtctgaatctccgctgccactttattcacaccgtggatgatggttgtgtggtcctttttacccaaaagcttacctatattagtgaaggaagtatccgttaattctctgcacagatacataacgacctgacgtggttgtacaaactcggaatttcttttcttggaagtaatatcttccgctttcacaccaaaatgctccgctactacattaataatgagagtaggagtgatctccttgggcttgttgggatagataacatccttcagtgcttcttccgccagagagagagtcagatctaccttatttaatttggcaaaagcaatgatcttattaaaagcaccttccagctcacgaatgttggatttgatattcgtagcaatatatttgatgatctcttcatcaatctgacggtcataggtctcagcatttttccgtaaaatagccattctggtctcataatcgggtggctgaatatctgcgatcagaccccattcgaaacgggaacggaatctttcatccaaagtctccatttccttaggaggcttatcggaagacagaatgatctgtttgtgggcagcgtgcagagcattgaaagtatggaagaattcctcctgggtactttccttacctataataaactgtacatcatcaaccatgagtacatcaacattgcgatatttctcacgcagcttggtcatggaagccgcattaccactacgaatagattcgattacttcattcgtaaattcctcactggtgacgtagagtacctttttgtccggatcctgttctaatataaagtgtccgatagaatgcatcaaatgggtcttgcccagaccgggacctccatataaatagagaggattgtagacctctcccggagactctgctacagcgagagatgcggaatgagcgaatttattgttgcttcctacgacaaaagtgtcaaatttgtacttaggattcagatgggcatcttcataattcacaccgtagatctggtttggagcagccatttcattctctgcaggctcttccccttttacatccttttccaaaataaagctgatatcataaggatgatcaaacatctcggtgatggttacctgaaaaaaactcttatatttggaagaaatataattcagggcatgtgcctggtccgagggaatgatgatacttactacatcatttaccacattgtgaaattctaaaggttctacccatgtatgataagaaatgtcagaaagactgtattctcttctgacagcttctttgatagttgtccaattttctttgattgcttccattgatttcctcccgtgcaagctgacgcatgcgaaactccatttcattgtataatagaattacaaataattcaaatgcaagttatgaacaggtcatgtataaagttatccacaatctgttgataaagttgtttataacttgtaatataaacagggattgtggatagagatgtgtaaatgtggataaataagtgaaattttaagatatccacatttactggatacttgtccacttttacacgtgatttacacataatatccctatgaaaaataaaaatatccacaaataatcaacaaggtgtggataactcgtttgtgggtaaaaatggtgtatatctatgtggataacttaatttaaaaaaattttagaattttaaaaagctcgttttctcttgatttttcagcatttttattgatttttgcttgacattgatgggcttttacattacaatcaatatgctattttccgaaaggaaggcgtatttttatgcgcccaattgttgaaaaatatgtttacctttttatataagaaggtttagagaaggaggtgcctttccatgaagatgacatttcagcctaaaaagcgttcccattccaaggttcacggtttcagagccagaatgagtactcccggtggaagaaaagttttagcagcaagacgtgcaaaaggaagaaagaaattatccgcataggtcacagcaatgtgacctttttttctcttaactttcacggttggaggattgcatgcagttttcggaatcattaaagaaaaatgaacagttccgttttgtgtacaagaatggcagatcttatgctaacaagtactttatcatgtatgttaaggaaaatggccttgataagaacagaatcggaatcagtgtaagtaaaaaagtcggtaatagtgtggtaagacacagtattacacgactggtcagagaaagttacagattacatgaaagtgtattcaatagtggtttggatatggtaatcattgcaagacccggtgcagcttccataggatatgaagaagcggagagcgcattgttacatcttgcaaaacttcatcatattataaagatttatttttataatgactaaattagaatcgtatatgaaaaaaatattgatagccatgataagattttatcagaaatatatttcgccttataagggaaccaaatgtccttatgttcccagttgttctcaatatggtctggaagccattgaaaaatatggtgtgatcaagggaggacttttggcagcctggagaattttgaggtgtaatcctttttccaagggtggatatgatccggtaccgtaaaattttaaataatggcacttattaggaggataaatgaacggtattcttttgacacagaattccacattcattatcggacaggtagcctggcttctgggtaagataatggaaggaatcttcgaagttctgaatatgatcggtattcccaatatcggtcttgcaatcatcctttttacaattgttgttaacctgttgatgatgcctcttaccatcaagcagcagaaattctctaagctgtctgctaaaatgaatcctgagattcaggcaattcaggcaaaatacaagaatcgtaaggatcaggatgctcagttggcacagaatcaggaaatccaggcagtatatgcaaagtatggtgtatctcctaccggcagttgtctgtatatgttgatccagatgcctattctgtttgctctgtatcgtgtaatttatgcaattcctgcttatgtcggcagagttaaggaagccttcttccctctggtagataatattattgatacagtcggtgcaacggagctggttcagaatctgagcaattccgctatgtacagtaagcagttcacgaatgcaggctttgtagccggtactcacagtgaatatgtacagaatacgatcattgactgtctgaacaaggcatctaccgctgattttgcaagtatcagtgagaagttcccttctcttgcagcagatgtgaccaatacggtaagcaagctggaagagtataataattttttaggactgaatatcggcaactctccttcttatgtgttgaaggaagcatgggctaacggagcatggcttttagtaatcggagcaattgctattccggttctgtctgctttgacacaatggatcaacgtaaagctgatgcctcagcaggatacttcttctaacaatggcaatgatcaggcggcagcaatggcttcttccatgaagactatgaatatgatcatgcctctgatgtctgcatggttctgttttacattaccttccggtctgggtctgtactgggttgcaggtagcgttgtcagaagtatccagcagatagtgatcaataagcatattgataagatgaattttgatgatattatcaagaaaaattctgagaagagtgcgaaaaaacttgaaaaaatgaaggaacagcaggaaaaactgaatgcttatgcaagcatgaatactaaaaatcttcagaagaaggcaaatatttcttctaaaacagataatagtgaagtatctgctgacagctattccgaagtaaaagaagcaaaacccggaagtatgatgtctaaggctaatatggtcagagactataacgagaaaaacagccgtaaatagaaagtttccttaataattgaggaggtaaataatatggacatgatcgaagtatctgcaaagacagtcagtgatgctattacagaagcttgccagaagctgggtgttaccagtgataagctggattatgaagtagtagaagaaggttcttccggattcttaggaatcggagcaaagtctgctgtgatcaaagcatctgttaaaaaaagttctgtagaagaagttgccagagtattcttaaacgatgtattccaggcaatggatatggaagtagtaattgccattaagtacaacgaagaagagaagaacatggatatcgaattaagcggtaatgagatgggtgttctgatcggtaagagaggacagacactggattcccttcagtacctggtatctctggtggtgaacaaagaatctgaagagtatattcatgtaaaggttgacaccgagaattatcgtcagcgcagaaaagaaactcttgagaatcttgccaaaaacattgcttataaggttaagagaaccaagagaagcgtatctctggagcccatgaatccttatgagagaagaattattcattccgcattgcagaatgataaatatgttaccacacacagcgaaggtgaggaacctttccgaagagttgtagttactttgaagaaataatcaaagtgaagattacaataatgtgatgaaaagccggtattagaatttcattctatttaccggctttatttacaactgccctttttttggagtataattgtctatattttaaggagatatacaaaaatgaaaagctggtttaaaaataaatggaataagggaaagatgcttgcggaattaaagcctgctttatttctgtctctgactttttgctttatgatttttatttatgctccgctggaattttacattaataacagtaatgaattttggtatgatgcctacttattgttcccttttattctcaaagatttccttttgttttttgtaatcagtcttattggttttacggtagcttattttatagcaaagatagtttatgaaattgcattgtatggttattttgcctgtatgattgcttgttatattcagggcaattttatgataaaaaatctaccgcctctggatggtacggaaattaattggaatttgtatcgtacagaaactatgaaatctacaattatgtggattgcagtagctgtcatttgtcttattggatttttccttttaaaatatgataaaataaaaaagctagtcagttatatcagtatttttatgatattgatgcttggaagtacgatcactgttcttgctgtaaatggtgatatttttactaaaaagcaatatgaaaaatttaataaattagatcaatttgaaatgtctacggatactaattttattatagtattgttagatgctgttgatgaagagtgtttttggcaggtgtgggaacagcatccggaatataaagaagaaatgagagattttactttctataataatactatgtccggatatgcctatacagatcattctcttcctttgatcatatccggagaatggtatgaaaataaagagccctttttggattatcagattagaatatttaagaattctcctttttttgaatatttgaaaaaacaggattatactttaagttattatgaagatgagtataagttcgaagtaggtgtgatggacggggcatttaataatctggcttatacgcagtcttctctttgggatgcccctttatttaataaacgtatcattaaaatggttggtatgaaatatgctccttatttgttaaaaccgaaatgttggtttaatgttgatatgctaaataatcaagagatgactccaaaagatgaagaattattctcctggaaaaataaagcattttatgatgatgtgaaagaagatgaaataagttatgtggatggaaaaagatttaaactgattcatttgatgggggcacatgttcctttctattatgataaggatgtaaatgtaatagataatgccaattactatacttgtattgaatcttctatgacagttactatggcatatctggataaattgagagaggccggagtatatgataattcagtgattattgttctctcggatcatggatataatatagaaggtgatgcgatagatactccacagcgtaatgaaaatgaaacaggtagacaacatcctattttatttataaaaggattgaatgaaaatcatgattttcaggtatccgaagcacccatttcttttgaggatctggttggtgcgtattataaattgttggatggtgcagcatctgatgattgctttgagtacaaagaaggtgatcagcgggagcgcagatatcttctctataaatatcttggagaagatcatatggtagaatatatgcaaacaggttatgcaggtgatgaatctacattgattcccaccggaagagtgtttgatgcaaaatagacaatagtgagcgttaatatggaaaaatatgaaaatgaaacaattgctgccattgcaacagcgttatcggattccggaatcgggattgtaagaattagcggcgaaaatgcaatatatataatagataatatttttcgttctgcagccggcaggagaatcttgacaaaggtacagagtcatacgattcattatggttacattgtcgattcggatgaaaatgtaattgatgaagttatggttgctgtcatgaaagctccgaggagttataccacggaagatacagtagagatcaactgtcatggcggtgtgttggtcatgcagaaagtattggaagcggtactgcatgccggtgccagactggcgcagccgggtgaatttacaaaaagggcttttttgaacggtagaattgatctatcccgggcggaagctgttatcgatgtgattcattcgcagaatgaatatgctctttcttcttcggtaagtcagttaaagggacagctttcgaacaaaatacacacattgcgggaagatattttataccagattgcttttatcgaatctgcattggatgatccggaacatatcagtctggatggatatccggagcagctcgctgcaaaggttatctattttcaacaagagattgcgaagcttttagctacagctgataatggaagacttatcaaagaaggaatatccaccgtgattgtaggtaagcctaatgccggaaaatcttctctgcttaatatgctgctgggagaagatagggcgattgttacagagattgcgggtactaccagagatgccctgcatgagacaatcaatctgcatggaatcagtctgaatatgatcgataccgccggaattcatgaaacacaggatgtggttgagaagatcggtgtggaacgggccaaaaaatatgctatggatgctgatcttattttatatgtggtagatgcttccgggaatattgatgaggacgatcagaatattatttccttactggatggcaaaaaggcaattattcttttgaataaatcagatttggaaaataaaatcacagaagaaagtttgaaagaaaatctggcaaaaagattaaaacatagcgaggatattcgtatccttcgcacttctaccattgatccctcttcggaaaattccggaatggaagaactggaagagaccattcggaatatgttttttgagggtgaattaaaacacaataatgaattggtagttacaaacctcaggcataaagaagctcttcaggatgctttgcatagtctgcaattggtagagagaagtattgaagatggaatgcccgaagatttttattctattgatctgacaagtgcatatgcttctctgggcaagatcatcggggaagaagtagatgaagatgtggtcaatgagattttctcaaaattttgtatgggaaagtaataactaagaggaataaataacatggaactaaaaaaacaagtggatgtatgtgtggtaggtgccggtcatgccggatgtgaagctgctcttgcctgtgcaaggctgggacttcagacagtaatatttacggtaagtgtagatagtattgctttgatgccctgtaatccgaatgtcggtggttcatccaagggacatctggtgagagaattggatgctttgggtggagagatgggtaaaaatattgataaaacttttatccagtccaaaatgttaaatgtctccaaaggtcctgcagtacactcattgcgtgcacaggcggataaagcagaatattccaggacaatgcgtaaagtattggaaaatcaggataatctgttgatcaaacaggcggaagtctgtgaacttctctgggaggaaacagaagatcataagaaaaagatcacaggtgtcaaaacctttaccggagctatctatgaatgtaaggctgtggtcctttgcaccggtacatatcttcgtgcgagatgtttgtgcggtgaatctattacttataccggacctaatggattgcaggcagcaaatcaccttacggattctctgaaagcaatgggaatagaaatgcgtcgttttaagacaggaactcctgccagaatggataagcgttctcttgatttttccaaaatggaagagcagttcggagatgagaaagtggttcctttttctttttccacagaccctgaatctgtacagaaagaacaggcttcctgttggctgacttatacgaatgaaaatacgcatgaaatcatccggaataacttggatcgttctccaatttatgcgggtattatcgaaggaacaggtcccagatattgtccttcgattgaagataaagttgttaaatttgcagaaaaagagagacatcaggtatttattgagccggaggggctgcacacgaatgaaatgtatgttggtggaatgtcctcatctcttccggaagatgtacaattagctatgtatcgtactgttccgggactggaacactgtgaaatcgttagaaatgcttacgcaattgaatatgactgtattaatgcgaaacagttgaatccttccctggaattcaaaaatatcattggactgttcagtggtggacagtttaacggaagcagtggatacgaagaggcagcttcccagggactaatcgccggtatcaatgcggcattgtctattctgcacagagatccgctgattctggatcgttccgaaagctatatcggagtattgattgatgatctggttactaaagataacagagaaccttatcgtatgatgacctccagagcggagtatcgtctgttgcttcgtcaggacaatgcagatctgcgtcttcgtaagaaaggctatgagatcggtctcatctcacagcaggagtatgatgctctgattgaaaaagaagaacttatcgatcaggaaattcagagactgaaaaatacttcagtaggtgccaataaagagatccagcattttttggaagagtgtggcagctctactctgaaaacggcagctactctggcggaactgatctgcagaccggagctgggatatgcggcactggctcctattgataaggaacgaaaacctcttccttcggctgttgtggaacaggtagaaattgaaattaaatatgaaggatatattatcagacagaaacgtcaggttgaacagtatcgtaagatggagaaaaaattaattccggataatctgaattacgatgaagttccttcccttcgactggaagccagacagaaactgaaggaattccgtccgatttccgtaggacaggcctcccgtatttcaggagtatctcctgcagatatttcggtattgttagtgtacctggaacattataatgtaaaaaatcatagttaatatgaattccggagggatgcatggcagaatataacacagaacaatttgaaaaagattgtaaggcactgggtgtaaccttaagtgatgaacagatccggcaatttctgaaatattttgagatgctggtggagtggaatgaggtaatgaaccttaccgcaattacagaatatgatgaagtcatgaagaaacattttgtggatagtatttctctctgcaaagcttacgatgtgacacagaataaaacagtgatcgatgttggaaccggagcaggttttccggggcttgcattgaagattgcatttccgaatctccaggttaccttattggattccctgaataagagaatcaattttttaaatgaggtgatctctgctttagggcttaccggtgtagagacaattcatggtcgtgcggaggattatgccaagcctggaaaatgcagagaaaaatatgatctttgtgtatccagggcagtggcaaatctttccacattgtcagaatattgcctcccctttgtaaaggtcggcggcaaatttatctcttataaatctgaaaaaataacagaagagatgaatactgcacagcatgctgtgaagatacttggtggaaaaatggatggacaggttgaatttacacttcccgattcggatatttatcggaatctgtttattattacaaagcaaaagtccacacctgcaaaatatcccagaaaagccggattgccatccaaggaacctttgtcataaaacgaagagaatccaatgtaaaaattgtgttaagatttatttattattaataaaaagagttttacacaataatattattcctatattataaatataatggaatatttctaaatagaacatatgttctataaggtgatatatgaacaataatttaaatgtacaaaagaatgagtgtaattgtaatatagagaatggtaagaaaattatggagatgttggagacggagagaaaaagaattgtttccgaacttcatgatacttccttgcagaatattgcccattttgttcatatgattgaactggcttccttatatattgataaggatcctgccagagcgaagatggaattgaattctgtgagtaaaggattgcataatgtcattgaagatatcagaagtactattttcaatctgcgtcctatgacatttgatgatctgggattaaaggcttcctttgaaagattactggattttttgaatgctgacagagactacataatggatgtggaaatcgatgatgtttcatgtgaaacagatgattatttttgtattaccttataccgtgtggttcaggaatgtctgttaaatattaaaaagcattcacaggctaccagggtattattccattgtaaaaaaacagagcagcaatatgaaattttaatccaagataatggtaagggatttaccatggaagaagcggaagataaagcaaatagtcattttggattagcattgatccatgagggtgtcgttctactgaacggtacaatacatataagttctgagattggtcagggaactacgatagatattaagattccttttgatttacatttagctgaaaaataggacagcaagacaaagaataaatatatacaagtaagtgaggatatatatgagtataaaagttatgttggcagatgatcatgttcttatgagagaaggaatacgtcaattactggaatttgacggtactatttctgtgatcgccgaagctaataatggtgtagaatgtatggagcaattactttctgtccatcctgatatactgcttctggatattaatatgcctgttatgaatggaatagaagttctgcaggagattaagaagaagaacatctctgttaaaatattggtattaacggtacacaatgaagttgaatatcttttaaaggctgtggacattggcgtagatggttatatcatgaaagatgcagaatccgcagaactgaaaaaagccattaattgtattatgcagggagaaacttatattcaacccagtctggtaccggctttgaacagccgactggtatccagagatattgacaaagaaaaaatcaacagtctgacgaagagagagttggaagtacttattgaggttgctaacggaatgttcaataaggagattgcaacatctctgaatatcagtgagagaacagtaaaaaatcatatctctaatatctttaaaaaaattgatgtttccgatcgaacacaggcagctgtgtttgctatcaaaaatgatctgattaaattgtattaggttattgccaacctttgcagacatctatccactgcaggaagtttgagtatttttctaattcagggattgttaattcaattgcactgttaggacttcctgcagccggaaatacagtttcaaatctttgcaaagattcgtctaagtatactttcacattatcattcactgcaaacggacatacaccgccaatggcatgaccaataattctttctacttcattccccggaatcatttttgcttttgctccgaaaaagtgtttgtatttcgcattatcgatttttgtatccccagcagttactattaatattggctgatcaccaattaagaaggacattgtcttagcaattcgttttccttcacaatgtaaagcttccgctgctaattctacggttgcactcgaaacattaaattccaaaatatgatcatccatctgataggttttgaaatattctcttactttatcaatagccatattaatctccattccgcagaggattcctttcgtcggaggaatcgcaaatcaaaattcaattttctactccaaatcggtttgtgcttacttgtgccactagcattcttatcctagcatagatgttaaaacaaaacaagttacatagatatccttttaaattaatttgttcactagatgtaggggttaattacatagaatgtttcacgtgaaacattctatgagcctatatgaaaatcatactacataatgtttcacgtgaaacattaccacccaagatatagtggctaaatttgtgaaacatattacaaaaaaagcgtgaaacataatacttatgaaaaaaacaacaaatacacagccacaatatctagtattttcctataaatgcgaataaagtatcaactttttgtagtatttttaccttgtaacatagaaatgctcatgctattattatagagtggtttaacatatacagaatggaggattcataatgttagaattcaaatatgatacacaattattaattgaaggtaccaatctggatgaagatgaaattaatgactacattacagaacatttcaaaggtgattgcttgttggcagtaggagatgaagagctgatcaagattcattttcataccaatgagccctggaaggttctggagtattgtgcttctctcggagaaatctatgatattgttgtagaagatatggacagacagtccagaggtttgcacggctaaatcattaagaaagacatggtgaaaaaagtatgggtagaattattgcaatagcaaaccagaagggtggcgtaggtaagacgactacgtccattaatttgtctgcatctctggctgcaaaaggtaaaaaagtattagtaatcgacacagatccacagggaaatactaccagtggatttggtatcgaaaaaaatgaattggaaaatacaatttatgaactaatcctgggagagtgttctatcagagattgtattatttcaaatattatcaagaatgtatcggtagttccttccaatgtaaatctggcagctgctgagatcgaactgattggagtagataagaaggaatatatattaaagaacgaagtggattatgttaaggatgattatgattttattatcattgattgtcctccttctctgaatatgttaacgattaattccatgactacagcagacagtgtgctggttcccattcaatgtgaatattatgcactggaaggattgagtcagttgatccacactattaatctggtaaaagagagactgaatccggatcttagaattgatggtgttgttttcactatgtacgattcccgtaccaatctgtctatgcaggtggtagaaaatgttaaacaaaatctgaatcaaaaggtgtataatacattaattccccgaaatatcagattagcagaagctcccagttatggaatgcccatcaatatgtatgatccaaaatctgccggagcagaagcttacatgcagcttgcagaagaggtaattaaaaacaagtaagaaaatataggagaagaacggtatggcagcgagaggattgggaaaaggtctggattctctaatacctaatgcattaggggacacaaagacaaaaaaagaaacagcagcaaaatcaaagacagagacaacagagggaaaagaaccgcagacccttgtgaagatcacaaaggtagagcctaacagagaacagcctcgtaaaaattttgatgaggatgctctgcaggagctggcagattctattaagcagttcggtctgttgcagccgattttggtacaggaccgcaaagattattatgaaatcattgccggtgagagaagatggcgtgcagcaaagctggcaggtctgaaggaagttccggttatcatccgtaattatacggaacaggagattgtggagatttccttgattgagaatatccagcgtgaagatctgaatccgattgaagaagcacaggcatacaagcgactcttaacagagtttcatctgaagcaggatgaagttgcagagagagtatccaagagccgtgcagcggttaccaactctatccgacttctgaaactgaacgaagaagtacagcgcatggtggtagatgagatgatcagtaccggacatgcgagagcattactggcagtggagaatccggaagaacaatataatctggcacagcgtatttttgatgaaaagttgagcgtacgtgatgtagagaaactggtaaaaaatttacataaacctgcaaagtccaaaaaagtagatgataaaaccatgcaggtgatctaccaggatattgaagaaaaactgaaacaaaagcttggaagaaaagtaaccgttacatctaagggagagggatccggtaagatcgaaattgaattttacaatcatgaagatttggacagactcctggatgtactgaataaataagagagacaagtaaagagaagagatacaaaggagagtattatgacaagtagtacttttttaaatcagatcggtctgggtggatttgacttaggataccttctgatcggaatgacagtgacaatcctgctgttactcatttttctgattctgttgatcgtgcagatccggaagacgagtaaattaaaaaagagactagataaatttcttaccggtaaagacggtaccagtctggaacaggatattgcaggtctatatgaggacaataaattcctcaaggcaaatacagagaaaaataaaaaggatattcgtactttatataagaatatggaatccgcttatcagaaaatgggtctggtaaaatacgatgcatttaatcagatgggaggacagctgagtttttctctggcactgctggatgaaaataataatggatttattattaattccgttcatagttctgagggttgttattcttacactaaggagatcaaactcggacagtgtgcaatcgatctgggagctgaggaggcagaggcactttccatagcaatgggggaataaaagaggaagcagcatatgaagaggatgaaactgagcgagctgaccggaaacgaaattcttgcacagtcattgatgacttgggattatcagatcattcttccggaaggcgtagtattaaaaaaagagtatatttctaaaatagaagaaatgggtatcctggaggtctatgtaaaagaagaccaggcaaatgaaatagtaatactcaaaaatgatatagaaaaaacgataaaaagtaaagtaaaaagtattctcgagagacacacttatcagaataataaagaactgcagggactgacccaggcggcagatgagattattacaaatatactggatgaaaaagaagtcatagaaaaagtatttgacatccgggagagaagtgcagatatctatgagcattccatcagcttaagttccatggcaattctgacagcgcttcgactgaaggtagataaaagtgtgattcatgatatcggtgtaggctgtctgttacatgatatcggactcagatatacgaccctggattacgaaggtaaatccatggaggatatgaagccggaagcactggctgagtataagaagcatccggtctacggatatacttccgtcaaggatgaggactggatctctgatgaggtgaagaagatcattctgtatcatcatgagagactggatggatctggttttcctctcaaattaaaagaagccgagattcctttttcctgtcagatcgtagtggtatgtgatgcctttgatgagatgatctgtggtattgctcagagacgcagtaaagtatatgaagcggtagaatatttaaaaagctttaaaaatgtgaaatataatggtaaaatagtagacgcgtttttaagttttactgcagtctaccccgccggaagccatgtgcttaccagtgacggagaagaagcaatcgtagtatcgcagaacaaagattttcaggatcgtcctgtgatccggattatccgggataaaaacggacagaaattaaaagaagagaagatactggatcttgtgaaagttctgaatgtgtatattgaaaaaggattagaataatgctgttcagatcagaatggaatggcagaatggaggaagtcatgatagacattaaatttttaagagaaaatcccgaggtggtcaaggagaacatccgcaaaaaattccaggatgaaaagctctccctggtagatgaggtgatcgcactggatgccgagagcagaaaggcaaagcaggaagcagatgatctgcgtgcatccagaaaccgtatttccaaagaaattggtgcactgatgggtcagggcaaaaaggaagaggcagaagccaagaaagcagaagtagctgccggtgcaaagcgtctggctgaactggaagcttccgagaccgaactgcaggagaagatcaccaagatcatgatggtcattcccaatatcattgatgaatctgtgcctatcggtaaggacgacagccagaacgtagagatcgagaaattcggcgagcccgtagttcctgattttgaggttccttatcatgcagatattctggatcgtctgaacggtctggataaggagagcgcaggacgtaccagcggtaatggtttctattatctgatgggtgatgcagcaagaatccattctgcaatgatcagctatgcaagagacttcatgatcgataagggattcacctattgcattcctcctttcatgatccgcagcagcgtagtaaacggcgttatgagtttcgcagaaatggaagccatgatgtataagattgaaggagaggatctgtacctgatcggtacttccgagcattctatgatcggtaagttcaagggtcagatcgtagaagaaaagagcctgcccattacgatgacttcttattctccttgcttccgtaaggaagtaggttcccacggcattgaggagagaggtgtataccgtgtacaccagttcgagaagcaggagatggtagttctgtgtaagcctgaggattccatggactggtataacaagatgtggtcctacaccgtagaattcttccgtagtctggatgtacccgttcgtaccctggagtgttgtagtggtgatctggcagatctgaaagtaaaatcctgcgatgtagaagcatggagtcccagacagaagaagtatttcgaggttggttcctgttctaccctgggtgatgcgcaggcaagacgactgggtatccgaaccaagggtgaaaatggaacttatctggtacacacactgaacaataccgtactggcttctcccagaggactgatcgcattcctggagaataatgtaaatgaggatggcagcgtgaacattcccgtagctctgcgtccttacatgggtggtaaggagaaagtcctgcctaagaaatgatagaatagctcacccatgcgaagcatagaaaatgcatctataatggacgatacagatggaaagaaggtgattttttgcataaatatatgagagccatcggattcagtgaatatacggaccgaaagaaattaaaagaattactgacagacgtgatcatgaattccgatcatcgtgcatataccatgaatcaggagggcattctcctaggagaattcagcaaaaatcacacacacactaagggtaccgcagaatccggtacctttggtgtggctgtctgtggagaatttgatgataacgataagtttatctacgaatactattttccgtatctgacgggaagcggcattacttcgtatgaagatgtctctgtggaacgccatgcggataaggattcctatgccggtatctgtgatgatatcaaggtgggaatctctctgattttttatctgcggaatcgtattccctatatcaaagcacaaagcaccggaaagttaccaatccgcggtactacacttaccttatccggattgtctctgaagggcagtattcttctacctataaaaaaggatgaagaacaggtcctgcgcgtgaaaaaagattctgccaatcgtaataaactcctggccgctgccagacagggagacgaagatgccattgagacattgacacttgaagatatggatatgtataccactatctcccggaagatacagaagaacgatattttcagtctggtggacacctattttatgccttacggtgtggagtgcgaccagtactcagtactgggagagattacagagtttcgcctggtgaccaatgatattaccggagaaaaggtatatattcttacgattctgtgcaatgaattgacttttgatgtgtgcattaacgaaaaagacctctacggtgaacctcaggtgggacgtcgttttaagggatctatctggctgcagggatatatcaattttcctgaggaataatgttgcaaaataacaatattttcggtatactaacagttgtgcatatgttcctatagttaaatcacaagagtgattgaattcatagatatggcagccggagccaaaagagctgaaaagcccgaaaatacggcatttgtctccttagttaaatggatataacggggtcctcctaaggttgtgctctaccagctgccttacggggaaaagtgatcgttgccagtctcaatttaatataagtctctgtagctcagcaggatagagcgttcgcctcctaagcgaaaggccgtgggttcgaatcccgccagggacgccagcaaacacgccgaaaacctttgatttatcagggttttcggcttttcttatttctgcggcttttgtggcttttttgcaaaaaaccttggtttgctaacatttgctaacgagatttggccttttgataagaaaggcggtaagtcagaggttcgatttttaccaaaggaacttgcaaacatttgttagcagaaattagaggaagttgcaaacaaaatcgcgaatttgctaacatcgctcaaaaatgctttcagaaccttgctaacaaaaaaagtgtttggtcactgtgcaaagtggttcaaacgaagaaaacctctcacaaagtgagaggcgttcttctgagggagggactttataaag

SEQ ID NO: 11267 - DNA, 11985 bp, Unknown
  gut microbiota DNA sequence
atatgcttgtaagtacataatttttgcagtcatgacacaagaaaagctccctcacaggaaggagctttgtctacagtctgagagggctacctataattatgggtagccctctcaaaatggaagtagcgttatggaggaaagaaacatttccttacatgacaccctttacacaaacatagcaactatcatacaattttctacgattctttctgttgatccttttttttcttgtataacagccatagcgctacgctgaacaatgcaagtacaaaagttactatataaatcaagaaactatcacttgccttaactgccacgaaccaaccgtttgctcctcctgaatgcttcagaatggcaaatccattatattgcgctatcagttttatgattgataaacagatgccaatcacactcagcacagtgagtataatgctacacacttttatttttttcactatcattcctcgctttcaactatctttatcaaataatattatttggtgactatttcctttccattgcgtcctgcaattttgtgtagccaatatatatttcaaagtcttcactatcggtcacatacagctttacttcacaataaggattagccggagggttgttggtgtatatgtaagaacgtgtatttaccgccacttttccagtatagtggtttacttcattttcatgccaatcagaaacaccctctgctttcgtcatcaaattacttgatgagatgttgagattagaagaaatcattgttgcttcaactgtatatccgggtctgttttgactatccatcccgtcataataataattgatcgagcctgttatcacattatcgctctgatatgttgtcacactactgtctattggctcgtcagaaaatgtaacctcctctccggatacttggaaatatatcacatcaaccagttcgcgtccagatgacgcattctgtgcctgcaattcaacttcttctatagcaggttcttggttttcagcggcatatgccgtaacgctacctaaaagcaatgatattgccatcatcagcactattgctctattaactttcttacccattacttttcctcctaaaatgttgtttgtactgtcacagtcacattatacggaacgattgctccgattgactgtgcataagctgcatagttattgagaattgtaaccagcgcattgtctgtcattgcattcttccagctctgtgcatcaaaatcatatgtatccgtaaaagtaatcgttaatgtccatttcccatttgatttcacaccagtggcggaataattgacattattatatgccaaatgtaaatctgttgtgctgttcagcgtcgttgttccagagttcgtcttccttacataatttgttccggtaacatccgacttaaactgatttactatcgttgtgcactctgttgaacccgcaatctgttttgccatatccgttgtggaaccataagataaattactgggattatcctgtaatgaatggttcaacagtgttgctgcagcggtatatcctaaaacatttccacccgctacaactaatttgaactctgccctgactactgcctttgtaatagcagcacgctgttcaacagtatcttcgatgattccttcttcaacagcatattgtgtgaatccttctaaagctgctactgcaaaatcttcgccttcagatatgctggcaggtgcctgctcaagatactgattatataaggccaaggcttcgctgtcatacatagagatagaagcattgtatatatcctcgtttgagtaaaaatcttctgtttcacctgtaatcgcaatatacacaccttcttcagtcggttcaccgctgtattcttctgcatgtacgtttaccggcacgctcatagccattactaaacttaagattactgttgctcttttaatatagttcttcatcagacttatcctccttttattctgaaacacaatctgcgctgttatattagttaggcactggtcctaatcccaacagacccgcaagaaaaaaaacacagacaacaagaagaaaatttcctatgcctacacatccgataattaagaaattgggtatgaactttttcctaatgactctgttgtataaataagcacttaaaaaccctattcctaatgctcccgatatgacaggcaaatatgctaccactgtaaataataccctatccactccaatcctcctttcctcaattcgctataggtcctccaagcgcaaacgcaaaaagcaataacagacagattacgactggaaatagcaatgcaaatattcctaatattagcgtaacataatagcttaatttcatcctgcgcctatgaatggaaagagcaatcagtacaattccaattcccaaaaatataaaaggcatacatacaaaaacaaatgcctcccactgcattagatcaattaaaaaaatcagcaatacaacggatgtaacggatacaacgctaataataatatttcttctctcaatttgtcgttgatgaactaccagactaataacattgtccaatacctccgtagctttatccgctgatatttcttctttgggttctctttctgactgcattatttctaatacactaacctccaatacatcggccaacggttttatggtgttaatatccggaaaacccaatccccgttcccaccgtgaaaccgctttatctgttacacttattttctctgccagttctgcctgcgtccaccccttctctttcctaattgttgctataaattctccaaacttcttgctgtccatactttcctcctctttcagcgtaattagattttattatatttcctcattttatcaaccgatgaatcgtagagttccgcaaaaatcgcataaatacgctctttttcaaattaatatttaacttattatatcaaagcaacaccttctaacatagcctatattccctttgcacaaaattggcacaaaactttcccaacttggcacagctttgcgatttacacggtaaatcccctatgtgaaaatgggtatcgtgaaaattcatacataccagaaacgcaggaacgaagcacaccccggcttctcctgcgtttttattacgcaaagctgacacttacataggtcagctttgtgctgttcaggaggtgacattttgaaaaaaagaatccggcggttgctgctgtccgaaagaggcgactcctcatatatcagcagctttgtctacattctgaggaattgtggtgacacaattcttttttcttagtataataatcccatgaaattcttattaacagctattaatgcaaaattcatacattccaatcctgctatttacagcctgcgggcaggtgtgggagaaaagttacagccttatgtggaactggcggaattcaccatcaatgaatctctggaaagtattctggaggggatctggaagcgtcagccaaaggtaataggattttcctgttatatctggaactggaagctgatccgggaaattctgacggaattgccgaagatcctgccggatacggagatctggctgggaggaccggaggtgacttatgatggaccggggcttttaagcgagttccctcaggttaccggaatcatggtgggagaaggagaagttaccttccgggaggtactgggccaatatgtgcgggaagcagaaagcaccggacagtccgaacagcaacccgaacccgacagcatagaacagcaggcagcagatcgaacgggaacgcttgcaggaaagtctgtggcagagcgctttggacagatccccggtctgtgtcttgcctccggttatacggcaccccgagaactgacggacttgaccacacttccttttctctatgaggatatggagccttttacgaatcgtatcatctattatgagaccagtagaggatgcccttaccggtgcagctattgcctgtcctccatagataaaaaagtgagactacgtgacatagatgtcgtaaaaagagaactgcagtttttcctggatcaaaacgtaaaacaggtgaagttcattgaccggacgttcaattgtgatcacaaacatgccatggagatatgggagtatatttacaaacatgacaatggcgtcaccaacttccatttcgagatttccgcggacattttgcgcgaagaagagattgtcctgctgaaccgcttccgtccgggactggcacagctggagattggggtacagtctacgaatccggagacgataagagccattcaccgtgtcatggatgtggacaagctggagaaaattgttgcggccattcacagaggacagaatatacatcagcatttggatctgatcgcgggtcttccttatgaagattatgagagcttcggcagatcctttgatagggtgtatgcaatgcagccggagcagttacagttaggcttcctgaaggtattaaagggatccgatatgcatgagcacgcacaggagtatggaattcgctatctggaactgccgccctatgaagtgttgtacacgaactggatcagctatggagagatccggagactgaaacggatcgaagagatggtagagctgtattataacagtggccagttcactcataccctgcctgtattggaaaaagcattttccggtccgtttgccatgtatgaggcactggcggattattatcaggaacagggatattttacgaacagtccggccagagcttaccggtatcagatcttattggagttcgcagcgatgaaagatccggccaaccgtgagatttacagagaacttctgacgtatgatatgtaccttcgggagaacctgaagagcaggcctgcgtttgcggcagagatcacggaagaggaaaaacagaatatccgccgtttttaccagacggaagagcaggagagacattatcttcctgcctatgatcagtatgactggaaacagttaagccgaatgacacacttagaaccgttccgctatccggaacctcattatgttctgtttgattatcaagaacggaatccattaaattatgaggcaaaggtacaggtgatcaggaatccgatactataagtacaggagaagatcggttcataaaaattgaggtatgcagtcagaatatatcggaggaaccggctgcaaaatggagatcagtatgtatgacacttatgtcagtatagatttggagaccacgggcctgaatcccaagagagatcggatcatagagatcggagcgatccgtgtggagcagggacagattgtggaagaattttctacgtttgtggatccggggcggaaattggaagaacggatcacagaacttacgggaatccgggatgaagaccttgcggatgcacctcagctggatgaggttttcccaaaattattggaatttatgggagaattaccgttgctgggacacagcattttgtttgattattcttttttgaaaaaagcagcagtggacaggaagattacttttgagagatcggcggtggacactttgcagattgcccggagatatctgccggaactgcctcatcgtaatctggggtatctgtgtcagtattatgagatcccgcatcatgcacaccgggctctggaggatgcgaaagcaacggaccggttgttccgaaagctgatagaactgttttacagggaggaaaccggtggacaggcatcgacagaagctgtcggaaaatcggcaaagaataatttatttgagccgcaaccattacattttcaggtaaaaagagatacgcccgcgacgaaaccgcaaaaagagcggttatatcgtctggcagagcagcataagataactttggaggtcgatgtggaaaagcttacccgcagtgaggcgagcaggcttgcggataagattcttgcaaagtacggacgatagaattacgcaaagcggaacgcagtccttccgcacgttggatcagatcggcaattttgtcatattccttccggccggcatagattttagccagcgcatagtaagtatggctgacgtcggtgccgatggagacggcatacgcgagaaccgtttccgcatcgtctgtcagaccggaatccagaagcagatcggcccactgctgcagggtacgcacaagtacggtgtaattctgatcgtattgggacagcggtgtaatgttcgcagtgccgtattccagcttgaggtcggtattggtgaagcctgtgagatttacgatcggctgtgtagacagagaagtaaggagactacggtattcttcggctctttcgttgtctggaagggcatccacgggaagcttatccatggggatttttacatagtccagatcatccagaggctttttgcggacggagttggctttccgctctctggcccagaactctttttcccggttttccgcgatgcgctgttggcgtttggtagcatgtgccactacggcaatcagtatgattaaacttgccaaaatctttaaactcatatataatatcctttcagagtaaaagtgatttttgaagcatttatggaggtttttaccatgtttaatatgaataataaaaaagtaaaacagcgaatctccgcagctatcatcgtgctgcttgtgattgctatgatcgtacctactataacatctattttttactaattcaactgcggatggaacagtagacgtgtccgaaggaagggcagaggagtattatgaaaaaatatcgtaagggattttacggcattctgttattgactttgacgatgttgttcggaatgacagcgcaggccaagacagatgatactattaagacaggaatttatgccggggatgtggaactgtccggaatgacggcacaggaagcaacagcggttatcgaagaacatatcgaaagtctgaaggatgtggagatcacactgcttgcggcaaatgatcatgatgtgaccaccacagccggagatctgggtgtgacctggaagaatccggagctggtgcaggaagcattggaactggggacacatggaaatgttattgagcgttacaagaccctgatggatctgcagcatgaaaattacgtatatcccattgaactggattttgacttgcaggcgatcaacgatctgctgaccagatgcaccaagtatgatcaggaagccatcaacgtctctctgaagagggacggcggtaaatttaccgtggtggaaggtcagaccggatatgtgctggatgtagagaaatctatcgatgcggtgtatgactatctgacagaagagtggaatcatgaggcctgcagcattcctttggagatcgtagtggatgagccgaagggaagtgctgaggaactggcacaggtaacggatgtactgggaagctttaccacatcttataagacatccggatcctccagaagtgcaaatgtagcgaacggctgtagtctgatcaacggaacgaccctgtatccgggagaagaattctctacatataagacggtatctcctttttccgtggcgaacggctattacatggcgggctcttatgtcagcggaaaagtggtagacagtctgggcggcggtatctgccaggtatccacgaccctgtacaatgcagtattacgtgcggagctggaagtaacggaacgttataatcattccatgatcgtaggctatgtggatccttccgcagatgcagcgatcgctgagagctccggcaaagactttaagtttgtaaacaatacagatgcaccgatctacatagaaggctatacgcatgacaagcagatcacgttcaacatctatggcaaggagaccagagctgccggacattccgtacgttatgaaagtgaagtgctggagacgatcacaccccctgcggatcagatctatgccgatgccggtcagcccatcggttatatcgtaaccgagagtgcgcatatcggatataaggcaagactgtggaagatcacgatggaaaacggtgtagaggtcagcagagagcaggtcaacagcagtacttataagatggtgccccgaagtgctaccgtgggaaccgctacctcggatcctcaggcgtatgaagagatcatggcagctatcagtacagcgaacattgatcatgtgaaaaatgtggcagcagcgttaaatgcaagagcagcagcggctgctgggcagacagaaatcgtagacgactaaaggtgagacaatgaacagcggcaaggtacccgtgaacgtcctgaaacgttccgttctcagacaattgaaaaataaaaggacagaaatagcaaatagcgcaggtctgggggcagactgcgctgtttttgcgcctttttccaagggacagatggtaacctgcgttcaggaaggtgtcgtagaacttcagtgtgagaacgacctggcagaggcggagagagaggatctgtccgtgatgccgatgcgtcgtattttccaaaagtgtgcaaacaatctggcagcggcgggcgcagagcctgtggcggcagagctggtgattttcctgccggagacggtggaggagccggagctgaaggccctgatggaagaagcggaaaaagcagccaccgatctgaatatccagatcatcggcgggcagaccagagtaagctctgcggtaagacagccgattgctacggcaacgggatacggtatcctgagcgaagccgcagtgacgcaggtatccgcagggaaaaagctggcgggtcaggatatcattattaccaagtggatcggcctggagggtaccgcggatctggcggcccggaaccgggaaaagctccttgagagatacccggcatatctggtggaagaagcagaggcgtttgaccggtattattctattttaccggaggccgctaccgccgtgaagtccggcggttgcaccatgcatgatatctccgagggcggtgtatttgcagcgctgtgggagatggcagagggtgcaggtgttggactgacaatagatatgaagaagcttcctctcagacaggagacagtggaggtatgtgaattctgtaatgtaaatccttatgaactcagatccggcggcagcctgatcattgcaagtccggagggaaccgcagtggtggaagcactggcggcagagggaattccggcagtgatcgtaggaagatttacagacagtaatgaacgactgatcctgaatgaggacgaagtccgttatatggatcgtcctcagagagatgagatttataaaaatgtgtaaaattttgcagtcatcccttatgtaagggaaaatgcaatataaaagttataaaggagatagtggcatgagagaagaattattagcgatcatagagaagaacagcaggatcgatctgaaggaactggctgtgatcctgggagtagaagagatcgatgtggtaaatgaactggcagcactggaagcagaagggatcatctgcggttatcataccctgatcaactgggagaagacagacattgaaaaagtaagcgctctgatcgaggtacgtgtaactccccagagaggccagggctttgacagtattgcagagcgtatctacaaatatcctgaagtacgcagtgtgtatctgatgtccggagcgtatgatctgatggtcattctggagggtaagaccctgcgggaggtatctaattttgtatctgacaagctgtccacactggattccgtgctgagtacagcaacgcattttatcctgaagaaatacaaggatcacggaaccgcatttgctacgaaaaaagaagatgaaagagagatgatcactccatgagaaatccattagcagataaagtagtggatatcaaaccatcgggtatccgcaaattttttgacattgtaagtgagatgcaggatgccatctctctgggtgtgggagaaccggattttgatactccctggcacatccgggacgagggtatctattccctggaaaagggaagaaccttttatacctccaatgccggtctgaaggatctgcgtcaggaaatctgcaacacgatccggagaaaacagggcgtatcctatgactggcagcatgaagtgttggtgacggtgggtggctctgaggcaatcgatatcgggctgcgtgccatgtgcaatccgggagatgaagtcctgatcccccagcccagctacgtatcttatgagccctgtgcgatcctggcaggagcgactccggtgatcattgacctgaaggcagagaatgaattccgcctgacagcagaggagctggaggcagccattacggacaagacgaaggtactgatccttccgtttcccaacaatcccacgggagccattatggaaaagtctgatctcgaggctattgcgaagatcattgaggagcatgacatttttgtcatgtccgatgagatctattcagagcttacctataaagagaagcatgtttccatcatcagtcttcccggcatgaaggagagaaccgtttatatcaacggtttctccaaggcatatgccatgaccggatggagactgggatactgttgcggacctgcagccatcattcaacagatgacgaagattcatcagtttgccatcatgtgtgctcccaccaccagccagtatgcggcagtggaagctttgaaaaacggagatcccgacatcgaggagatgcgtacggcctataatcagagaaggcgctttttgatgaatgcgttccgtgagatgggactggagtgctttgaaccttacggtgcattctatgtattcccctgcatcaaggaattcggcatgaccagtgaagagttcgccaccagattcctggaggaggaaaaagtagctgccgtgcccggaaccgcatttggtgacagtggcgaggggtatcttagaatctcctatgcgtactccctggagaagctgaagattgccattgacagactgggacattttgtagagaaactgagagcagaacaaaaaaataaataaagcatttgtaactattcagagctatgcaaaactgcgttctgcgaatgcttgcattcaggcagataagcagttttatatggcgaagtaaccacatgagcaaaaggaaagctacgaagtagcggttttgcgaatggggttctgaatagttacaagcattttcaggtaactattcggaatcacaggcagagaagtggttctggatagttactatgttgtaaaggaaaaaatatgcatattatattacaccagccggagatcccggcaaacaccggaaatatcggaagaacctgtgtggctaccggcaccagcctgcatctgatcgagccgttaggcttccgtttaaatgaaaaagagatcaagagagccggtatggactactggcagcatctggatgtcaccaggtatatgaattttcaggagttccaggaaatgcatcccggagcgaagatctggatggcaaccacgaaagcacaccagacctacaccgatgtaaaatttggaccggacgactatatcatgttcggcaaggagagcgccggaatcccggaggagattctcgtggagcatgaagagacctgtatccgtatccctatgcttcccgagatccgttcacttaacctgtccaattccgtcgcgatcgtcctctatgaggcactgcggcagcagggttttgcaagtatgcagagagacggcgagctgcacagactgcactggaaagatcaggacgagcagaaagatcagcagtaatccgaagcatcctctttacaaatcgtttccgcaaaggtaaaatacttttataatatgatttataaaagatgacccaaaataagtaaagaggatagaagtatggagaaacggaattccacaagaggcaggatcatcaactatatgttgaaccatccggtgacctccaaggcggagctggcgaaggaactgaatattagtatgcctacggtattgaccaatgtgaacgagctgatcgcccagaatctgctcacggagctgggagaatacgaatccaccggcgggcgcaaggcgaagag

SEQ ID NO: 11268 - DNA, 12208 bp, Unknown
  gut microbiota DNA sequence
aactcaacccgaatctttttcgagtcgacctctcccttggaaagcaagacaaccgtctccacatgcaccgtcattccaaactggtccacgccccggaccttccggatctcatacccaccatcacagaggatcttcaggtctctggcaagggtagcagagtcgcagctaacgtatacgatgcgttctggctgcatacggagcatggtgtttaagcaggcatcatcacagccttttcggggtggatccacgacaatcacatccggatggagcatttcatcggaagatgcctctgcagttgccttttcgtagaattccggcaggacttcctctgctttgcccacgaaaaattcagcattttcaatatggtttctctttgcattctctctggcatcatcgatagcctgggggatgatttccacaccgcatacctttttagctttgcccgccaggaagagagagatggttccgataccgcagtagagatcccaaacagtctcttttccggtcagtcctgcatattccagcgccagactgtaaagcttctcggtctgtatgggattcacctgatagaaggagagaggagagatcttgaaggttaatgcatccccggtataagggtaattttctttctgcatgtctcttacgtggatcgtatcctcaatggtgctctcaccccagagattatggatcctggttcccatgatcacattggttttctcggtattgatactgactgacacacttgtcataccttggatttctgccaatgctgtcagtagttctccctgatttggtaaaaactcattcgtattcttctgtactccggcagtagggtatgacatttttgtcattttcttattaataaccagacataccatcagctgtccactggtgaagcctttccggatcaatacatggcgtaccagacctttgccagtgacttcgtcataggcagttattttatttttccgcatataggagagtatggtttcgaggatctgctgattctcagaagcaccgagggcgcagtccgtattggcaataatggtatgggtgcgtccggcatagaaaccggtgatgacgttaccgtctctgtcagttcctatgggatactgtgctttattgcgatagtggaagggttgctccatgcctacaatgggctgcatgcattcatcaatgtactctgcatcgaatccaccgatccggatcagatgattgcggatcttctgttccttgaaatgcagctgctcagagtaggagagtgcctgcagctgacagccgccgcactgtctgtgatatgcacattccggttccacacgaaaaggagaaggctgtaacaccttctctaatctggcataagcgtaatgttttttactttttatgatcttggcttccacctgatcgccgataacggcatctttgataaagagggtaaaaccgtctactttaccgattccttctccgtcacttcccatatcctctatggtcaccgttacacaatcgttctttttaaattccataaatatccttatgcctttccgtaacctgcaaacttttttgtactttagtgccatattctaaaatagcttacgcaggctcttgtttgcgtgtgaaaaattttctcagcaaagttcctcagccagctttccgatctcgcccttgttctgctcattcatggcagacttgatgctaactgtagtctctgtaaatgtcagattcttgcttttttcaaatattccaaggatcagtttgcctgccatgggtgcccaggtgccgttctcaatgattgccaccttacgattctggtaattacgctcggtcagaccttcgataaaactgcgcatgcaggggaaaaggtctccattataagtaatacccgccagcaccagtctgtcataacggaaagcatcggcaacagcttttgccttatcgcatcttgccagatcatacagtactgttttctgtcctttttcctgcaaaacatccgcgaggtattctgcagcatttctggtattgccgtagacagaagcataggcaatcaccactccggattcttccggctgataagaagaccacttatcatatttttccagatagaatcccagattctccttaagtaccggaccgtgaagagagcagatggtctgaatgtccagtcctgccgcttttttcagaacagcctgcacctgcggaccgtattttccgacgatgccgatatagtaacgccgtgcctcatcggtccattcttcctctacgtccaaagcaccgaatttaccgaaaccatctgcagcaaacagtattttctcacctgcttcataagtcatcatgacctcaggccaatgcaccatgggagcatagacaaaatgcaggctgtgctgtccaagctccaggacgccatcatttgccgcaacaatgcgttgttccgcaggtaatccctgttcggcgaaaaaatccgggaaaaactgttccatgaactggaatcccttagctgtggatactactgtgactttgggatattttttcagaaaagccggaatactggcggaatgatccggttccatatgctgtataacaagataatcgggcattttcccatcaagaacctgttccacattgttcagccattcttcggtgaaaaatccatccactgtgtccataacggcgattttatcatccaggatcacataggaattgtaagacattccgttcggaaccttatactgtccctcaaacagatctacctgatgatcgtttacccccacatattttacacatgcactgatttccatatgtttcctctctttcctgcctgttcatagaatttgtagtatttattctgttatttattccattttggtagcgcgcagattggattcaaacaatctgttgtaacccagccagccactgttttcactgttattttccagaatttccttaaaggtctccattttggcatccgtatcatccgcataattcagagccactgcctcgatcagcgccggcacctttggggagccgtattccagtttaccgtgatgtgccagaatgcagtgctgtaattctgccagcagattgtgagggaatccgtcgatcttagcggctcgttccccaaccatctgtgcgcccatcacgatatgtcccaataactgaccgtcatcggtataatcgtttaccggaaatgcagagatctcttttacttttccgatatcatgacacatagccgctgtcagaagcagatctctctgcaaaataggataagcagagcagtagtagtcacacagcttggtaacacttagagtgtgctccaacagtccgcctacaaaaccgtgatgtaccgtcttggctgcagaagagttgcagaatttctttgcgaaatctgcatcgtcaataaacagatcctgcaatagctggtgcaaataggtgttcttaatacttccgatcagagtcattaattcattgtacatagtgtcgatgcctttggagctcaccggcagataatcggatggattatattctccttcatggcagacacggatacgcttcacgctgatctgaagctgcccctggaaatttgtcacatcaccgtatacctctatgtaatccagatcatcataatcaccgatacccggattgttcggctcccataccttggcatcgatagttccagtcttatcctgtaaaatcacactttcatagggtttaccgtttttggtaacagcctcctgtttatgtttgcacagataaatatcaaatactctgtcgccttcttttaactcttttataaatttcatattgttgtccaaacctttctgtcaatctatttcaacaccgttaatgtgatgtcgaatttcatctctttatattcctgctgtgactgccgcataatcgtcagttctacactatctcccggtttcatactgagcagagagttcgtatactcgtcaaagctgatgatcatgcgttcaccgaatcctgtgatgacatctccctgctggattcccgccagcattgcaggagagtccatttctacctctttaatataagctccgtaaggaaccccaagttcgctgttagcttcctctgtgacatccacacccttaagacccagataggcgaatttttctccattcgacattttctcgatatgacgcttcaattccgtaataccgtaagcacaaaccatatttttcatatctgtggcagatttgccattggtaatgataccaatgacctgtccctgaagattgaataatacgccgcctgcattctgactacctacaatattcgtctgcagaatccgataagtggtatccgatgccgccgactcactggcagaagaagtaatgatgccatatcccagtgagccgttcgtacccatgggacgccccaaagccaccaccggaagtccggcaatatctttgatattagaagatcccaaagtagcgatcgtaatatcattcttcagaaaatcttcattcagagtatccagttctacggcgatcaccgccagacctgtagtctcatctttttccttcaaagatgcatctgcctgagtgccatcattaaatgtgacaataatgtcatctacttgttttaccggagaataatcggttaaaatcagtaattgcttgccattttgcgctatgatcacaccggatgactggttcttgctctcatttacattgttgaaccagtccacaccggatgacactcctgtcacagtaaccatggaacggttcatctctgctacatactgggtaagagcactgtaaatctgtttgtaattatccagatccaatatgattccggataacagttcccggatctgctcctgttccataacctcaccaggaacagaagaagactgactgttctgattctcctgctgcatattctctgccaacatctgctccggagacatctcatcctgatcttcggggaataccaccacctgtggttcctcttccgggtacaaccaattactgatcaccggttccaaaaccaagaaagtgaaacaggccaccagaccgaagatcaccgccatggaaaccgtgatcaaagtccggcgcaacagctttttcttatttaccggacgttccttgattttttctatcataaaatttttctcagaaacgtcattttgttccttctgcttattttcttgcgaatccgccataaatatgcctcctctgctgcctacagatacaccggctttttcttaggactctaatatctcaattatacaaaactgtaccaaaaaaggcaataaatatggtataataagctcacccataaaatcctgcgtgactgcttgcaggcaaagcaggatttctatgaggggagcaaatagacatgagcaagaaggacgatagtccggattgcgaatggatataacgatttcgagagtgcgcagcacgaagaaatcgtgttattatgtaaaccagcattgagtagtaccaaaatcgagagatgtcaattcgactgcttgcaggcgtaattgacagatccgattttgatagggcgaaagcccgacagcgaggaaatgcatagcattttcgagcttgtactgcatgagcaagaaggacgatagtccggattgcgaatttcaatattaaggagccccacatgaacacaaaagtactcaccactttagaatataataagatcatcgatctcctcacggagaaggccgactctgagccaggtaaaaagctttgccgcgatctggtgccttccactgatctttccactatcagaaccgcacagcgggagacaaaagacgctttagcccgtctcttccgtatcggcagcacctcatttggaagtaacagagacttaggtttttccatccgttctctggaaatcggcagttctttgtccatgtccgaattgttgaagctggcatcctttttggataatgtcagccggatcaaaacctatggaaaaaaagaacgggaagacctcccaaatgacagcctggatgtctactttgagggactcacccctatgacacagcttgccaatgagatcaaccgctgtattttatcggaagaggagatggcagatgatgccagtcctaaattaaaaagtatccgccgctccaagctgtccaccaatgaaaaaatccatagccagctgacttccatggtaaacggcgcttaccgtacctttttgcaggatgcagtcattaccatgcgtgataaccgctactgtatccccgtaaaagccgaatataagagccaggtgagcggtatggtgcatgaccagtcctccaccggttccacatttttcatcgagccggctgctgttgtgaacctgaacaaccagttaaaagaactggatctgcaggagcaggaggagattgaagtcattctgggtgatctgagcagccaggctgctgttcatacctcagagcttgccgcggatcagaagatcatgactacgctggactttatctttgccaaggcaaaacttgccatggaacagaatgccacagagcctattttcaacactgagcattacatccagatccgtaagggccgtcatccactgttagataagaaaaaggcggttcccattgatgtccgtcttggtaaagattttgacctgttggtgatcaccggtcccaataccggtggtaagaccgtgtctctgaagacggtgggactgtttaccctgatggggcaggcgggactgcatattccggcactggatcgttccgaactgtctattttttcggaagtatacgcagatatcggagatgagcagagtattgagcagagtttgtccacattctcttctcatatgaccagagttgtccacattttgcagcacgcagatgcggattccctgtgtttatttgatgaactcggtgccggaacagatcctacggagggtgccgctctggcaattgctatcttaaattatctgcatgaccgcggcatccgcaccatggctaccacgcattatagtgagctgaaaatctacgcactttccacgaattttgtagaaaatgcctgctgtgaatttgatgtggagacccttcgccccacctaccgtctgctcatcggtattcccggtaaaagtaatgctttcgccatttcttccaaactcggactgtccgacgagatcatccatgctgcaaaagagcagatcagcaaagaggacgaaagctttgaagatgtcatcgccgatctggaacagagccgtgtgaccattgaaaaagaacagcaggagattgcggagtacaaagaacggatccgtaccttacaggaacagttacagaagaaaaacgaaaaaatcgaccaggctaaagacaaaattctccgcgatgctaatgagaaggcaagagccattctccaggaagcaaaggatgtagccgacgaaaccatccgtgatttcaataaagcgggcgcttccgccgacatcaaggaactggagaaaaagagacagaaggtccgtgacaagatcaatgagaagaacggaaagctggctcttggtaatacacaaaagaaacctgctgatcagaagactgtagatccgaagaaactgaaaaaaggagattccgtgaagatcatttctatgaatctcaagggaatcgtaaacactctgccggatgccaggggcaacctcttcgtacaatgcggaattatgagaatgcagacgaatgttaatgatctcgtaccggtaaaagaagagactattacagcacctgccctccagcgtaccaataccggcaagttgaaaatgtccaagtccttctccgtgtcctccgagatcaaccttctgggatgtacggtagatgaagccattgcaaaactggataaatacctagatgacgcttatctggctcatctccccagtgtgagagtcgtgcacggaaaaggcaccggtgccctgcgcaatgccgtacagtctcacttaaaacgtctgaaatacgtcaaagaataccggttgggtgaatacggtgaaggtgatgccggcgtaaccattgttacttttaaataataactgacaggaggcctatactacatggtaagtaaacagaaaattctcattgtagatgatgataataatattgcggaactgatctccctatatctgacgaaggaatgttttgataccatgatcgtcaatgacggagaatccgtgatgccggctatggagacctttgctccgaatctgattctgttggatctgatgcttcccggcattgatggttatcaggtgtgcagagaggtccgggcacaatactctgttcccatcatcatgctttccgcaaaaggtgaagtcttcgacaaagtattgggactggagctgggtgcggatgattatatggaaaaaccttttgattccaaggaactggtggcccgcgccaaagcagtcctcagacgttataagccctctaatacccccacagaaaattccaacgacaagtgtgtggaatatgcggatctgaccattaatctgaccaattattccgtcatttatatgggacacactgtggaaatgccgccgaaagaactggagcttctctactttttagcatcctcaccgaatcatgtattcaccagagaacagcttctggatcagatctggggctatgaatatatcggtgatacccgtaccgtggatgtgcatatcaagcgtcttcgtgagaagatcaaggatcatgccaactggaagatcagcaccatctggggcattggctataaattcgaagtacgtaattaagtcataccaaaagcaggatttgttatgaaaaaaacactttatctaaaatttatactcgcatattttatttttggtgtatttggtttcatcatagttacaacttttgttcccaatatgaccaaagagcacctgatccgggaaaaggcagaaagtctctattccgaagcaaccctgattgccggaacctatgccggcggattgtacaccagtgaaacaactttggagaccgttaaaatgcagctggactccctggcggtctacctgaattccgagattcgcatcatcaacccctccggacgactggtactggataccaatagtcccttagatgtggagaatgtggtagtcatcgagaattttgattcgaccgtaaccagcggctcctattacattgttggtgatttcttcggtaattttgattcggatgtacttactgtatttgctcccattacctccaactacaaggtaaaaggctatgtagtcatccataccgatatgaatgatattcagaaatcctgtaacaacctgctgaatatttcctatatcaccctggcaatcctgttcctgctatccctgatcattctgatctttttcaccgagatcgtatatattcctctgcggaagatcacccatgccacagagcagtatgccgccggtaatatgcattatgaatttcaggtggatagtgaggatgaaatcggttatctggcttcctgtctgaattatatggcaagcgaaattgcccgttccgaggatgatcagaaaaagtttgtagccaatgtatcccacgatttccgttcccctctgacctctataaggggatatttggaggccatgctggacggcacgattccaccggaaatgcacgaaaaatacattactatcgtattgaatgaaacagaacgactgacgaagctgaccaacagccttttaaccttgaataatcttaacaccaaaggaatgctcttagataaaacagattttgatatcaatcaagtgatccgtaatactgcaagtacctttgagggcacctgtcataacaaatccattgctatcgagatgatcctgaccggcaatgaaatgtatgtccatgcagatatgggtaagatccagcaggtactctataatctcatggacaacgccattaagttcagtcaccatgattctgtgatccacattgagacgtcggagaagaaaaataaattgtttgtctccgtaaaagacacaggaatcggtattccgaaagaagatctgaagctgatctgggacagattttacaaatccgacctatcccgaggcaaagataaaaagggaaccgggctgggtctttccattgtaaaagagattatcaatgctcacaatgagcatatcaatgtgatcagtactcccggcgttggaagtgaatttatcttctccctgccgaaatcccatcaggaagacgaagaggattaagccatacggcctaatcctcttttttcatctatataatctatatatccatgacacgatataaataactgtttccctgttttcctatcctttctattgtccccatttcaaataatatattcaataccgtctgtgccagtgagagaggaatatgggctgctttcgcaaaatccttactgtgaaatggttcttccagttcataaggtacaaattgcagataatcctccggctgtctgatttccacctcttcgatcagatccgtaggaatcctgtcatatctcgtggatccttttttcttgtcacgactccaaccgtttaacagccggtattcttccatattcaccaatacaaatttaaaccggatattcggatccttcaggaacattttgatcttatatagttccttaaatgcctgataagtggatcccttttttggggattttcgctttttacttagttcaccgctgtcttcatcgatccagatcagccatttttcataaggaatgggatagacaattgtcaccggatacaaaggtaaaaacgcctgtaactttccccgcatacggttgaactgtctcgtctggatctcgatgatctccccatccttataaatatccgccacataattctctatgggaatctcctgatgatcctcatccggctcataataatccttaaaaatagcatgaaccgtcttctctgagagagttccgattcccagtctctgacggtccacgcctattatttttctcttagcttcttcaaaacgcttctgatccatgtgatccatattttttaatcaatctcggcatgcttcgtatacagaatcttaagcatgataggagtggaaatactggatacgatgatcagcagaatgactgcggtaaaatactcggatccgatcattccaacagacaatcccttctgtgccacgatcagggcaacctcacctctggtcatcataccgacaccgatcttcagagcatccggtcccttgaatttgcagattcttgccatcagaccacagccgatgatcttacacagtaatgctacaacgacgaatccgatagaaaataacacaaattccccgttcagatgatcaaagctggtcttaagtccaatacttgcgaagaaaatcggtccgaagatcatataagagttaatatccatcttctcggctatatattccgaatcccgaatagagcatagaataatacctgccacataagcaccggtaatatccgcaataccgaagaatacctctgctacataagcgaaaataaaacagagcgccagacctaaaataggaatacgtcttgtatgcggatatttgttatccagatactggaataccttgaacaatacaaatccgacaccaattgcgaacaggaagaacagaagagtagaaattactacacttccgggattggaatccggatttttaaatccgatgacaaaagtaagtacaataataccaatgacatcatcaataatagcggcactcatgatcgttgtaccgactttacctttcagttttcccagttctttcagagactgcacggtaatacttacactggtagccgtcataatgacaccgataaatacagcttcatagaatttctcagagccccagggtgccactccgtaaaatcccatgtacaacaatgttccgcctaccaaaggaacaaatacacccatacatgcgatcagaaatgccacaaaaccggtcttcatcaggtccttcagattcgtctccagtccggcagagaacatcagcaggataacaccgatttctgccatctggatcagaaaatccgattgctgtaccagtcccagtacactgggtccgatcaacagaccggcaataatttcacctaccacctgtggtgctttacattttcttgcaataataccaaatactttcgcaaatataataataattgccagatctctgaaaatactataagattccatttttcacgcctcttttattttgataattaattactcatcgtcttcattttcc

SEQ ID NO: 11269 - DNA, 24326 bp, Unknown
  gut microbiota DNA sequence
attacattttaatccatccaaatgcatttgctacagaacttaataaaataatcgcagcaaataccgggcagagatacttgatcatgaaattgaatatctttttgcggcggaaagcggcttctccgtgcatgacttcttcttccacagcctttactccgatgacgcgggataccagcagacagatggtgatggcagcgataggcatcatcacggagttggtcaggaaatcgaagaaatcaaggaactgcatgccgatgatcttcacagcaccaagcggtccgtaacccagtgaggacaacgttcccagtgccagcatgatcacacccatgatcacggtagattttttacgaccccagccaagctcgtcctcgaaagtagacacagcactttcggtaagtgcaatggagctggtcatggctgcgaacagtaccagtacgaagaacataatacctacgaaggtgcccatgcccatgctgtcgaagactttgggaagtgtgatgaacatcagggaaggaccagcctgtaaggtatcgggatctccgccggagaatgcgaacacggcgggaatgatcatcagacctgccatgatggcaatcgcggtatcgaagatttctacatttttcgtggaaccttcaatggagacatcttttttcatataagagccgaaggtgatgagaatacccatggcaatggacagagagtagaacatctgccccatggcagcgaccaccgtcatccaggagaaattcgcgggattcgggatcaggaaatacttcacaccgctcagtgctcccggtctggtaacggaatagactgtgatgaccacggagagcactaccaggatcggcatcataatgcgggatacgcgctcgataccgttgcggacaccggcgtagatgatgcccagagtacacagagtgaatacgataaagcacagctctgtagagacaccattggaaataaacgtggaaaaataaccgtccgctgccagatcatgtccgtgacccttggcatattccaccagatacttgatcacccatccaccaatgacggaataataaggaacgatcagaataggaataatagcgttgatccatccaccgaaggacagccatttggacttcccaaaggtatgaaaggcacccacggggcttttacctgtcatgcgtcccagtgaagtctctgccacgatcatgctataaccgaaggtaagcgccagaataatatagatcaacaggaagataccgccgccgtatttggctgccagatacgggaaacgccagatattgcctaagcctacggatgctccggcagcagacagaacgaagccgatcttgccggaaaatgaacttctgttattatttttgtgattcatagtttaaactctcccataaaaaattgtcgtaaacagaataagtgtaacatagaaataaggaaaatacagtacgaaatagtctgattgagaattgaaaaattcgataatgcaagagtgaaaattgaatggatgcattttaattttaatataaaacaataattctgaggaaaaatacagaactgctataaatataagccagcaatggcactgctgaatgacggtgtatctggcaatttaaagtatattttttcctgcatttcgcatactaactgcaacgttaatgattagtaatgcgagatgatgatttatcttacgcaatatgtcatggaggaaaaaatgatgaaagcaactggaattgtaagaagaatagatgacctgggacgcatcgtgatcccgaaggagatccgccgcacgttacacatcagagagagtgatccgctggagatcttcaccgacagagaggggcaggtcatcctgaaaaaatattcccctatcggagagatgaccacatttgccaaacagtatgcggagagcctggcacaggtgtcgggacatgccacactgatcgcggacagagaccagttcatcgctgtctcaggaggctgtaagcagctgttaaataaatccgtgagccgtcaactggaagagaaggtcaataatagagagactgtgattgccgcaaaaggagaccgcaactatgtcaacattgcggaagacattgccgtggactatgcctggcagctgatcacgccgatcatctgcgaaggggacatcatcggaagtgtgatcctgttggaaaatgacgggaagagcaaaatgggagaagtggaacagaagcttgcgcagtctgcggcaggcttcctgggcaggcagatggagcaataaaaaacagtcgtaaccgggttaagatatcacctggttacgaccgtttgtcttaccgatatataatttctcatcagcttcttttaataatgtatgaacatctttgtcagactcacagaccagtccgaaggtcatatttatcttcacgtgttgcccttcgtagagtgtatccagttcgtggattttgtccatgagaagatccagctgtttccgtgcttctgcaagatctacattttcaaataccagtagaaattcctcaccaccccaacgcgcggcaaagccacggcgccacatatgctgcttcagcagggcagagacatttttcagtacggcatccccacattcgtgaccgtaggtatcattaacctttttgaaaaagtcaatatctccgatggcgagcgcaaaagaatggcgggaggattgggcttcctcgaagatctggcgcagctttttttccccgctgcgtcggttgtacagctcggtcagggcatcctgctcgatcatggtacgaagagagcgctgcatggacagggcacagcgaccgatatcacctaattcatcactgcgttttgttacggaatgatccagtgtggcgttcagattcccggaggctacctccgacaggaagctgtgaatatggagtaatacagccacgaatcttctggtgtaaaaatagatgcagacagccacgagagccacaaaaccgatgatcagccatgtcagcggatagacataacgttgaatggattgagatacggcggcactggattttcctataaaaagcatgccaactatgctgccgtcctgattgcggacaggactataataggaaaaataagactttccattgatcagagtgttgatataaaaatgatcttcaccggtattcagaacatcacggatcaccacatccggagcaccggagccgacaatgcggtcaccctgggcattatacagagtcgtcagaatgcgggtatcctgatagaacagggtgatgtccagtccggtatcctctttgaattgatcaaacagagaatattcacgggtgatatctacatcgcccttatacagaaggtaggcaacatcaccttccagccggtaatcgccgggataggcagcgttcagaagtgtagtggcacttttggtggcatcatacaattcacgttccacttcctgatacatagtttttgtgaaccattgggaagtgaaaaataacatgacgatccccagcgtcagcaggggaatcaggccgatcgcctgcagagtatatgatattttaccgccgcttcttttcggcgtattttgcgtattttccatagaatcgctgccccttccggtaagatcggtacacatatcagtcttaaaataattatatgaaataaatgtcggaaaagcaagaaagaaaagctttctaagcaaatgataacatccggcttgacaacgcaaaaaaatgagatatataatagcggtatatcaaaaatgcattgacgaagagagtaacttttccgcagaaaggcaaagcgagccggtgatggtgagagaccggtgcgagtaagggaatcgtgaaaatcacttctgagctgtcagaacaaaagcccaggtcagtagttctgaacggaatcccgccgttaccgggaagcatatcactcctgtgagatgacacatgtggaatcatataggaagtatgttgtaagaggtggttaacgaatgcatgagcttcgtcctgttacgggacggagcttttttcatcctcagtttcagaaaagaaaggaagcgcactatgtacaagcaggtacccacaagcctgaatttcgtagaccgtgagaaagctgtcgagaaattttgggaagacaacaacattttcaaaaaaagtatggaacaccgtaaggaaggcgagacctataccttctacgacggaccgcctaccgccaacggtaagccccacatcggtcatgtagagacccgtaccatcaaggatatgatccccagataccgtaccatgaagggatatatggttccccgtaaggcaggctgggatacccatggacttcccgtagagctggaagttgagaagttgctgggtctggatggcaaggagcagatcgaggaatacggtctggcacctttcatcgacaaatgtaaagagagcgtttggaaatacaagggaatgtgggaagatttctcccgtactgttggtttctgggctgacatggataacccttatgttacctacgatgacaacttcatcgagtccgaatggtgggcactgaagaccatttgggataagggacttctgtacaagggcttcaagatcgttccctattgccctcgctgcggaaccccgctgtccagccacgaagtggcacagggctataaggcagtcaaagagcgttccgctatcgtacgtttcaaggtaaagggcgaggatgcatatttcctggcatggaccaccaccccctggactcttccttccaacgtggcactgtgcgtgaacccggaggagacctacctgaaggtgaaggccgccgacggttatacctattatattgcaaaggcactggcagacaaggttctgggacgtcttgcagaagaaggcaaggatgcttacgaagtactggagacttatgttggtaaggatctggagtacaaggagtatgagcctctgtacaagtgtgcgggagatgccgccaagaagcagaagaaaaaggcacatttcgtaacctgcgacggttatgtaaccatgaccgacggtaccggtatcgttcatatcgcaccggctttcggtgaagacgacagccgtatcggacgtaattacgagctgcccttcgtacagttcgtagacggcaagggtgatctgaccgcagagaccccttatgccggaaaattcgtaaaagatgcagatcctctggtacttaaagatctggatgcagagggcaagctgttcgatgcaccgaagttcgagcatgattatcccttctgctggagatgtgatactccgctgatctattatgcaagagagtcctggttcatcaagatgaccgctgtgaaggatgatctggtacgtaataataagaccatcaactggatccccgcttctatcggtgagggacgtttcggcaactggctggagaatattcaggactggggcgtatcccgtaaccgttactggggtacgccgttaaatatctgggagtgcgaatgcggacaccagcattccatcggcagccgtgaagagctgtacaagatgagcggcaatgagaaggcgaagaccgtagaattccatcgcccttacatcgacgagatcaccatcacctgccccgagtgcggcaagcagatgaagcgtgttcccgaggtgatcgactgctggttcgactccggagcaatgccttttgcacagcatcattatccgtttgaaaacaaggatctgttcgagcagcagttccccgctgactttatctccgaggcagtggaccagacccgtggatggttctactctctgctggcagaatctactctgctcttcaataaggctccttacaagaacgttatcgttatgggtcatgtacaggatgagaatggtcagaagatgagtaagagtaagggcaatgcggtagatcccttcaacgcactggagacctacggtgcagatgccatccgttggtatttctacactagttccgcaccctggctgccgaagagattctccggcaaagccgtacaggaaggacagcgtaaattcatgggtaccctgtggaacacctacgcattcttcgtactgtatgcaaacattgataattttgacgcttccaaatatacactggaatacgacaaactgcccgtaatggataagtggctgctgtccaagctgaactctaccgttgcagaagtagacagcaatctggaccagtaccgtatccctgaggctgccaaggctctgcaggacttcgtcgatgagatgagtaactggtatgtaagacgcagccgtgagcgtttctgggcaaagggtatggagcaggataagatcaatgcctacatgacgctgtacaccgcactggtgaccatctgtaaggcagccgcacccatgatccccttcatgacagaggatatttaccagaacctggtaagaagcaacgatgcaaatgcacccgagagtatccatctgtgtgacttcccggtagtgaacaaggatcacatcgacaagaagctggaagaggatatggaggatgtactggatgctgtagttatggggcgtgcatgccgtaacgaagctgccatcaagaatcgtcagcctatcagcagaatgtatatcaagtcagacttcaccttaagtgagttctaccaggagatcatcgaggatgagttgaacgtcaaggaagtcgtatttaccgatgacgtacgtgactttacctcttacaccttcaaaccccagctgcgtaccgtaggacccaagtatggcaaacagttgggcggcatccagaagcaccttgcagcactcgatggcaatgcagcaatggatgagctgaatgcagacggcgcattaaagttcgatgtagacggtgtggctgtggaactgaccaaggacgatctgctgatcgacatggcacagaaggaaggctatgtatctcaggaggacaatcggatgaccgttgtcctggataccaacctgacaccggaactggtagaggaaggcttcgtatacgagatcatcagcaagatccagaccatgcgtaaggagagcggcttcgaagtgaccgatcacatccgcgtatccatcaatggcaacgataagctgtccgagatcgcacagaagaacaaagaagccatcagcagcaaggttctggctgacgaactgacaagcggtatggaatacggcgtatcgaaggaatggaatatcaacggcgagaacgcagtgatcgctgtggagagagtataaagataaagattctgtggttttccggaagggggaccgcagaatcttttctgtttcggaaaaacatttacgaaacttacgaaaaccggcgaaaacagttggaatgagtgtatatatttgttataatattacctgtatttggttaagaatatggatgaaatcataacgctatccggcgcggaatatcttgagaagagtacaataccggagaggtaatggagaggagaacataggtgaaaaaatcagtagcagacagcgagaagccggtaaaggcaaaagagttcgataaggagctcttcaagagaagtgtggaatataatgtgcgcaccctgtatcgtaagaatctggaagaagcagatgcacagcagatcttccaggcagtatcttatgcgatcaaggaccgtatcgtagagaactggatggagacccagaaggcatatgagaaggaagaccccaagatggtctactacatgtccatggagtttttgatgggaagagcactgggcaataacctcatcaatttaaaggcatataagcccgtagcggaagctctggaagaactgggactggatctgaacctgatcgaggaccaggagccggatgcagcactgggtaacggtggactgggacgtctggcagcatgtttcctggattccctggcaacgctgggatatcctgcatatggctgcggtatccgttatcgttatggtatgttcaagcaggagatccgcgacggttatcaggtagaggttcccgataactggctgatgaatggtaatcctttcgaactgcgcagacctgagtatgcgaaaattgtgaaattcggtggctatgtcagtgtgcataccgatgagaacggcagaaacgtatttacccaggagggctatcagtccgttaaggcggttccgtttgatttccccatcgtgggttatggcaatggcattgtaaacaccctgcgtatctgggatgcggagcccgtagagtgcttccagctggattcctttgataagggcgattaccagaaagcggtagaacaggagaacctggcacgtaacatcgtagaggttctgtaccccaacgacaatcactatgcaggtaaggagctgcgtctgaagcagcagtatttcttcatctccgcatccgtacaggaagctgtagagaagtacatgagaaagcatgatgatatccataagttctatgagaaggttaccttccagctgaatgacacccatcctaccgtagcgatcgcagagctgatgcgtgtgctgatggatgattattatctgacctgggaggaagcgtgggagatcaccaccaagacctgtgcttacaccaaccacaccatcatggcggaagcattggagaaatggcccatcgaactgttctccagactgcttcccagaatctaccagatcgtagaggagatcaaccgcagattcatcatcgatatccagcagaagtacagcaatgtacccggtgtggatgtacaggagaaaatccgtaagatggcgatcatctacgatggacaggtgaagatggcacatatggcaatcgtagccggatattctgtcaatggtgttgcaagactgcatacagagatcctgaagacccaggaattaaaggacttttatgagatgttcccggagcgcttcaataataagaccaacggtatcacccagagacgtttcctgctgcatgcaaacccgctgttagctgactgggtaacggctcacgtaggtgacgactggatcaccgatctgcctcagatctcccgcctgaaggtatatgcggatgacaagaaggcacagcaggagttcatgaacatcaagtaccagaacaaagtacgtctggcaaaatacattttagagcacaacggtatcgaagtagatcccagatccatcttcgatgtacaggtaaagcgtctgcatgagtacaagagacagctgctcaatattctgcatgtaatgcacctgtataacgaactgaaggagcatccggaactggatttctaccccagaacctttatcttcggcgcgaaggcagcagccggttaccgtaacgcaaagctgaccatcaagctgatcaactccgtagcggatgtggttaacaacgatcccgctattaacggcaagatcaaggttgtatttatcgagaactataacgtatctaacgcagagatcatttttgcggcagcagatgtctccgagcagatctctaccgcaagtaaggaagcatccggtaccggtaacatgaagttcatgctgaacggtgccctgaccctgggaaccatggacggtgccaacgtggagatcgtagaagaagtgggcgaagagaatgccttcatcttcggcctgtccgcacaggaggttatcaactatgagaaccatggcggatatgaccccatggagatcttcaacaatgatcaggatgtccgcaaggtactgatgcagctgatcaacggaaccttcgcaccgggagatcccgagctgttccgcccgctgtacaattccctgctgaacacccagtgcacggccaaggcagacacctacttcatcctcaaggacttcaagtcctatgcagaagcacagaagagagtggaagctgcttaccgcgacgaggacaactgggcgaagagcgccatcctgaatgtggcatgctccggcaagttcacatctgacagaactatacagcagtatgtggatgagatctggcatctggataaggtagtactgaaataattaagaacttaaaaaagaagtcataccgcctagagagactgttgcgctctataggcggtattttttacgtacactcaagtgcaaaaacatcctataagatcattgcatctgagaaaacaatccagtataatgaaagaaatgcacacaagatgcactctatctatgcataagaagtggaataacaggaggacgagcatgattcagttaacacagggcggcgcttacctggtaaacggtacagatattgtagcggatacctccgaagcagccagacagatacaggcgaagaccggcattacgatctccagagaagaagcagcgaaaaacaccatggcatatggtatcctgcgggagcataatacttccggcaatatggacaagcttaagatccgcttcgataagcttaccagccatgatattacctttgtaggtatcattcagaccgcaagagcatccggactgcagaagttccccatgccctatgtactgaccaactgtcataactctctgtgtgccgtaggcggcaccatcaatgaggatgaccacatgtttggcctgacctgtgcgaaaaagtacggtggtgtctatgtaccccctcatcaggcagttattcatcagttcgccagagagatgttggccggcggcggcaaaatgatcttaggctctgattcccacacccgttacggtgctctgggtaccatggctatgggtgaaggtggtcccgagctggtgaagcagctgctgaatcagacttatgatatcaatatgcccggcgtggtagccgtatatctgaaaggcgcgcccgtgaagggtgtcggtcctcaggacgtggcactggcaatcatcggtgccgtattcaaaaatggttatgtgaaaaataaagtaatggagttcgtaggtcccggcgtggcttccctgagtgctgatttccgtatcggtattgatgtcatgactacagagaccacctgcctgtcctccatctggaagaccgacgaccagatccgtgagttttatgagattcatggacgtacggaagattataaggagctgaatcccggtcaggtaacctactatgacggtctcatagaggtggatctggacaagatccgtcccatgatcgccatgccgtttcatcccagcaatacttacaccattgaggagctgaatgcgaatctgatggatattctggatgagaccgagaaacgtgcgaaagtaagcctggacggtgccgtagactttactctgaagaataaagtaaaaaatggcagatttatcgtagatcagggtattatcgcaggctgtgccggcggcggatttgagaatatctgtgcagcagccgatatcctgaagggcagatacatcggtgcggatgaatttactttaagcgtatatcccgcatctatgcccgtatacatggagctgatccgtaacggttgtgctgcgaccatcttagagaccggtgcagtcatgaagacagccttctgcggcccctgcttcggtgccggagatacccctgccaataacgcattcagtatccgtcattctaccagaaacttcccgaaccgtgaaggctccaagctgcagaacggccagatcgcttccgtagctctgatggatgcaagatctatcgcagctaccgcagctaacaagggcgtgctgactcccgcaacagagttcgacggcgacttcggaaaatataaatatcatttcgacagcaatatttacaagaaccgtgtattcgattcccacggtgtggcagacgagagcgtagagatccagttcggccccaatatcaaggactggcccgctatgggtgcgctgcctgaaaatctggtattacaggtagtatccgagatccacgatcctgtaaccaccaccgatgagttgatcccttccggtgagacctcttcctaccgttccaatcctctgggactggcagagttcaccttgagccgtaaggatccgcagtatgtaggacgtgccaaagagatccagaaggcagagaaagagcgtatgaacggcggacatccctgccaggcggttcctgtactgaaggatgtcatgggcgaagtgaagaaacagtatcctgaggctgaccgtaagaacaccggattcggttccacaatcttcgcagtgaagcccggagacggttctgcccgtgagcaggctgcttcctgccagaaggtactgggcggctgggcgaatattgccaacgaatatgctaccaagcgttatcgttccaacctgatcaactggggtatgcttcccttcctcatccagcccggggatctgccttttaagaatctggattatctgttcgttcccggcatcaagaaagccgtggaagacaagacagaagagatcaaagcttatgtggtaacacccggagagggcatgaaggaattctccctgaagttaggcgaactgaccgatgaagaacgccagatcatcctgaagggctgcttgatcaactataaccgtgtataaggagcaaaaatatggaatttaacaaaccggtatccaacccaatgatggtaggatctatcgaattattaaaagcagaagatacaccggaacacagacagatgttcctggaggagcttcagaaagcaaagttcctggctccggtagtgatcgatcctgtgccccagccggatgaaaagggacaggtgagaattccccgtgatgcaaaagtccagttccccatgttatctacagaggacggacggaaattcttcatggctttcacagactggatggaattaaaaaagtggaaggacgaagagaaccagcagacgttcgctatgaattttgacgattatgcgggaatgctgctgcgcaaggatgcacagggcaatagcagtccggcactgggatttgtcatcaatcccttcggtggcaatatcgtggttaccagagagatggtagccggcatgatcgccgcgaagctgaaagcagccgggaaaccggtacctcccgcacccggtgcacctgctgcacccacacagcaataaattcagactaaacaaaacgccctatatggacgatataagtagcagagaggtgacaaggccggtcacttcctgctacttattttttatatagttttataacgacaccacggatggtaatcggatagaataatattaaaatattctgttctgttaccatttttttgacttaaccgttcaaccatgcaatatcacatgtggtagcgaacgattaagctttacaggaagcgcgccctgtatggtgaggtcggggaaaggagaaaattacagatttgagaattgattccgcaagcataggaatggattccgccagaagttatcatacttctaagacaagcgtcagacgctttgagataacggattatcagacagggctgacagatgtatccacgaagggacagaagacaccggaaggagaggatacagcacagaacaccggggaacaggagaataccgcagagaatactgccatgaccgcaaaagactggcagagccgttttctggtgtcctccgcgagatggaatatgcgaagcagcgccagtgaacagacgctgtccaccatccgggaatatacggtacgttatatttttgatttattgttcccatcccagaacagtactctgcatgactggatgcaggaaaacggttggagtggcggcacgcaggaaacagctatggcaacacctgcatcggatgtatttcctcaggtgacgtcccgtgtaaaagtattgaactatgtcggggagagctggagcatagagcaggaggacaccagcttctctaccgtgggaaccgtgcgtaccaaggacggcagagagatcaattttaatgtcaatgtaaatatgagccgcaggtgtgaggaatactacagagaagaactgaatgtagcacagtttgccctatatgatccgctggtgatcaatctggataccgatgcgacggagctgtcggatcagaccttttattttgacctggatgccgacggtgaggaagaagaaatctccatgttaaagggcagcggttatctggcactggataaaaacggagacggcatcatcaacgacggcagtgaactgttcggaaccgggaacggtgacggatttgcggacctggcacggtatgatgaggacggcaacggctggatcgatgagaatgattccatctggtcaaaattaaaaatctggtgcaaagatgaaaagggcaatgacgtattgtacaaactttccgacaagggtgtcggtgcaatctgtctgcaaaatgtttccacagattttaccttacagggagacagaacggcccgggacggtgcgacagaagccaatgcaacgaacggagcgatccgtaagaccggtattttcttatatgaaaacggaaatgtgggtactgtgcagcatgtagacatggcagcttatgcccaaaaagcgtaacaccaataaagatcaatggaaaatgcatcctgaataaaaccttcgaatcgggcaagactataggataaaccagggaaagtggttgaaacgattgtatagcaggaagttggttcagggaacaggaaggatgcggatatgagaagaaataaaaaaagcggtattcataaagagcgtattataatgttggcctcttcggcctttgttctggcagcgttgaccatgacgggggtctatatgaaggggcagaatgtggagtccaaggatgatggctataccttggacttcactgcacttgaaaacaatgcggatgacaaaatgcaggaaatatccgaatataatgaggagcatttgctgaaggaggaagagaatattccggaactgaccgcgaataacacagccggaaatgagatcgcggcagcaccggtcacggaggatgatctggattatcttccccaggaggtgggctccggccatgtggagatcccaggactgacagatcaggagaccttacaggaggctgcggaggcagagcagcagatgccggagctgacagtagagaaaaccttgcattttacggaaagcgatggaatgcagaaaccggtacagagtgatattctgatgcattactctatggacaagagcatttactttgccacactggatcagtacaagtacaatccggctacgatcttttccgcggaagaaggcatgacggtaaccgcctgtgcgcagggaaaagtaacttcgatttttgaaaatgaggagatcgggaaggcggtgacgctggatctgggagacggctatgaggccacttacggacaactggcggagattaccgtcaaggaaaatgcttatgtgaatccgggtgaaactatcggcagtgtagcaacgcctacaaaatattacagtgctgaggggagcaatgtgtattttgccctgacgcataatggggatccggtaaacggggaggcattgttccactgatggatatacagaatacctatggaaattttcatgtggaccgtttatactattatcaatggaaaaatcgtgtactgtaatctcccgggagattgagcggaggaccaatttgaaatacaacagaaaatgtgcagcaatattgtcgctgctgttcatcgtgaatatcatagggaataccgcctgtggcaatacctctgccgagacgggacatgtcagtattgcggatatggcaatggaaaataccccgataatcaattataccattccgacacttactcctaatgtactggtggatcagcaggggtatgcaggagacggagaaaagcaggcaatcgtcaaaagccgggaaccggtggaaagtttccggctgatcgataaagagtccggagagatcgtatatcgggggaaggtaaagcagccggagtacaacgaggatctgcaattatacatcggaacagtggattttacggaatataccagcgagggaagcttttatctggaatgcgaccgggtggggcagtcactctctttttccataaagaagaggtattatgaggaattgtttaaagcattgtgcgaaagggtgcatgaaagctgccgggagcgcagcattacagaggatgaggtcctgacactgctggaggcatgcgaatggtattcggaagtttttacggacgataatgggaatgagattccggatatgctggaatatattgcggattggctggaaaaaaccgtcaatgagacagaggataaggagccggataccatgacgtatgtggctgtcctggcaaaattcagttatctgtatcagaaatatgatgtacaatatgcaacgcaatgtcttcagcacgcatccgcaatctacacaaagctggcagcagcatccggcagagatgcggagaaattcatggctttgacggaactgtaccgggctgcgggacttccttcctatcgttcgcagattttggagtataaggaatttttcgaagataatacaagctatctggaggaaactgcatatctctacggttccatgacatatctggctaccagacagccggtggatattgatctgtgcacagcattcatggaaggtatcagagatcagggagaggaactggcaaaacgttccggtaaaatgatcgacgccgtgacttccgtcaacaacggtacggaagatctgctgaagcgggcggaggaactggcctgtgccaattatatcttatacagttatcagtatacggagatattggaagattttttacattatctgatgggcagaaacagagattccgtgtgctattatccggaagagggaaaaacgtcggattatcttcttctgatcgcccaacaggtctccctcaccggaaaacattagatattagatcagttctttgtttttgaaataggtctcggagattatattctgtacataggtgcccatgctcttgcgggtctccttgtccagatccttcatataaatgggcttaccgtattcaatgactacggtggccttttttattttgggaaaatggtcttcaaaaatagcggcagagttcacaatggtcatgggaatgatgggaacattgcctttttcggcaatcttgaagctgccttcatggaaagggaggaaagtatccttggtcttattccgggtaccttcggggaaaatacagatagaaataccgtttttcaccttatcaatggcagccaggatcgttttcagcccggccttgatatcctggcgatccaggaagagacagtgcagatccttcatccagatatttaacaggggccatttcagcatttcttttttggcaacgtagccggtaggcctgggaacgcggacgtaggtcaggaccacatcaaaaaagctgcggtgattgcccacatacagtactgcagtatcggtgggaatattttcttcaccgatggcgatcactttggtacccgccaggcggatcacctgacggaatgcccagttgacaatggccagggaacttttgtccttcagccccggattgaacttgccaatgatccattccaccagcataagcggagtggacaggatcaggaataatacaacaaataatacaacgaatataaaacggatcataaatacctctttctaattcatttgctctaataatatcatttctcgataaatagaacgcccagtgtaccgggtccgcagtggctggatatgacaccgccggctctggtctccagtatttcgttgaaaataccgaggctctccagataggaacgaaccgactctacaatttcacgatcacagccggagtgcgtgatgaagactctgtcgggaaccgcatttttcaggtcttcttccatatcttttgtgtaggacagaatgacagaactcagcttaccacgatattttttggaggcatccatggcgccgtcttcgactacgatcctgggatgaagctttaacatggtgcctgccagggctgcgacagcattacatcttcctccacggtagaggtaggtcagagtatctacggtgaagctggcacgtactctggggcggatctcttcgatggcagcagtgatctgggctctggttttcccctctgcggataaaagggcagcctgtattacctgcagaccgatgccggtagacaggttggcggaattgatcacagttactttatcagaagcttccagttcttccgcagccagacgcatgacattgccggaggtggacatgctgtcggaaatagagaaacagatgatctcacggccttcatccagaaatggcttcatcacttccatggcctcggtcatggaaggtgcagaggtcttcggtgtggtcttattttcatcggaccatcggaagatctcttcgggggtaatgtccacaccatcacgatactctgtctcccctaacaggatgtgcaggggcaggatggcaatgtcatatttttccaataaatcttttgacagatcgcaggtactgtcagagatgatcttaactgtctgtgccatagaatataccttccttttttagcgtttcatcttgtattattattcattgcttttgacgatctgtctggctacatagacgccgctggcagatgcatgggacagggaatgggtcacgccactgccgtcgccgatgatatataatcccttatgacagctttccaggtgctcgtccagttctacttccatgttatagaatttcacctccacaccgtagagcagagtgtcgtcattggcggtaccgggtgcgatcttgtccaaagcgtagatcatttcaatgatgccgtctaagatacgcttgggaagtaccaggcttaagtcaccgggggttgcagccagggtaggctccaccatgccctcggcaatacgctttgcattactgcggcgtcctcttaccagatcaccgaagcgttgcacgatgacaccaccgcccagcatattggagagacgggcgatgctttcgccgtagccgttactgtccttgaagggctcggagaaatgcttggcgactaacagtgcgaagttggtgttctcggtctgtttgtcggcaccttcgtagctgtggccgttgacggtgacgatgccgttggtattctcatttactacgataccgtgcggattcatacagaaggtacgcacggcatcttcgaatttctcggttcggtatacgatcttactctcatacagttcatcagtcagatgagagaagatgacagcgggaagctccacgcggacaccgatatccacacggttggacttggtgttgatatccagatccttacagatctgttccatccatttgctgccgctgcggcctacggagatgatgcattggttacactcgtaggaggcgtcctcgcagctgatgcgatatcccggatccagtgcttccacagtttttaccggagtatcgaaatagaaagtcactttatctttgagttctgcgtacagattctccagcacgataaagttgatatcggtacctaagtgacggacggaagcatctaagagggtcagcttgttctgcatgcagagctttttaaaagaggtacctgcggtggaatacagtttggtgccctctccaccgaatttcatattgatgtcatccacgtatttcatgagatcgatggcttgatttttgccgatgtattcatacaacgtaccgccgaaagcgttggtgatgttgtattttccgtcggaaaaagcacctgcaccgccgaaaccgctcataatggaacagctcttgcagttaatgcagctcttgatcttatctccgtcgatgggacagtggcgcttctccagaggatgaccggcttcgaagacggcgatcttcaggtcgggattctgctgtaccagctcgtaagcggagaagataccgccggggccggcaccgataataatgatgtcatatttcatagggaagagttcctttcatagtgttcttttttcacttttgtaaataccaaaaacatccaaaatatgatgtcggggtcaaaagcccccgactctgatgcctacggattgttccgtgctacgcactctcacttctacgctccgcttcggtccgtgctaaacatgtgccactggcacatagcaccctaccctctattcgcatatcgtgggattatcatcccacttttatgctcatatcggggcgggtcctaaggtctttcacccacttatgagcaagctcatgtgggtttagaccttttgaccctggcatcaaaatatagtataccatatttttagtaaaaaaggggaatggaaatatagtaaaatatgtgatagaatcataagtcataggcttgtccggaaatggatggaaaggtatctgaaatggaagcagtacagaagaaaaataaatatgagatagatatgtgcaacggcacgatcatggataaattaatatcctttgccctgccgctgatggtgtcaagtattttacagctgttgtttaatgcagtggatattattgtggtcggaagattcaccggaagtcaggcactggcggcggtgggatccaccacggcactgatcaatatgtttgtgaatctgttcatcggggtctcgctgggtgccaacgtattgtctgccagattctatgcggcaggcaaagaacgggagatgagcgagacggtacatacggcgatgacttttgcactgatcagcggtatcgtcatggtatttgtgggactgttctgtgcccgtggggcactggaactgatggatactccgacagacgtgatcgaccaggcagctctatatatgaaaatctatttttgcggaatgcctttttttatgctgtacaattacggagcagctattctgcgggcagtgggcgatacgaagagacctcttctgttcctgatcatttcgggagctgttaacgctgcactaaatctgtttctggtcattgtcttttccatgggagtggcaggtgtggccatcgctacggtgttctcgcagatcatctcctgtgtgctggtgctgggatgtctgtttggcacggacagctgttaccgcctgcagatcacaaagcttggaatcaaatgggagtatctggtgcagatcttccaggtgggagtgcctgccggaattcagagcgtggtgatcaatttttctaacgtattgctgcagtcttcggtgaattccttcggatccattgccatggcgggatacacggcggcgaacaacatcttcggattcctgttcgtatcgatcaattccatcacgcaggcgtgcatgagcttcaccagccagaactacggagccgggaagaaaaagcgtatggaccgggtacttgtcgactgcatgatcctgtcagtgatcgtggcggtgactcttggtggcggtgccaatctctttggcccccagctgcttcatatctatactacggaggcggatgtgatcgcctgcggtacggaaatcttattgtatacgacactgacatattttttatgcggaatcatggatctgatcccgggagccctgcgtggaatggggcattcggcggttcctatgatcttatctattatcggaacggtaggtacgaggattttctggatctattgggtgttccccatgcaccggtcactgatggtactgtttttatcctatccggcatcctggaccgtgacgatattgctacaggcagtgtgcttctattttgtgaggaaaaaagtacacagtaccatgccacaggaagaaacataagtacataagacaggcggctgcagagtgtggaagactcatgaccgcaaggcacagacagtgaaagaattgagggatagtatgttaactaaattcaagaaaaaatatatcggaaactgggagttctaccgcagatatctgctgcttgcaattcccatgatcctgcagaacgccattaccaatctggtaagctttttagataatattatggtaggacagctgggaacggagcagatgtccggtgtcgctatcgtgaaccagctgatctttgtatacaatctggcaatcttcggagccgtatccgcagccagcatcttcggtgcccagtattttggcaagggcaatcataagggacatatgtattcgttccgttttaaattatatgcgaccctgttggtgaccggaggagcgatattactgtttttgaccaaaggttccgcactgatctccctgtatctgacggatacggtggggaatggagctacggatgtggcattgaaatacggtcaggagtatctggcgatcatgatggtaggcctgatcccttttgcggtgaaccagtcttatgctacgaatatcaaagagaccgggcagacttttattcccatgttagccagcttcgtagcggtgggaaccaacgcactgttagattatctgatgatcttcggcatcggaccttttcccaagatgggggtagctggagcggccctggctacggtgatcgcccgttacattgaggcattgatcgtgatcatctgggcacacatgcacagggcgaagaaccgctatctggaaggagcctataccggcttcggtattccttttgcggaactgaaagcaattctcgtcaagggcttccccctgatgatgaatgaagtaatgtgggcagcgggtatgactaccgtgacccagtgttattccgtcagaggactggatgtggtggcgggactgaatatcgcatccaccattacgaatctgttcaatattgtatatctgcagttaggctcctgtatcagcattgtggtaggacagtatctgggcgccggcaagctgaaagaggcgaaggatgcggacaataagatgatcgtattcagtgtcttctgttgtgtgatcatggcagcattgatgttcgtggtgggaggatttttccccggtatttataatacttcggaagagatcaagggactggctacgcagttcatcgcagtctccgcaatcatcatgccgttctgtgcattcagccatgcctcctattttaccctgcgttccggcggcaagacggtggtaacgtttttgtttgattccgtatttacctgggtgatcgtggtacctgcggcttatctgctggcacactttaccgggctggggatcgtaagcatctatttcctggtgcagggtacggagatgatcaaggtcatcatcggctactacatggtgaagagtaatgtgtgggtagtacagatggtatagagcggaaccacagaacagatgtggaagaaaggcatggcatttcgggaaatgagggtgtttccgctggtgagagcagagcatcctgcgtcccaggagtttcaaaatctgtgtattggagccggatggtctcaaagatacggttgaaatccgattccagagtataccagtctgctaacggaagtgtggattccagctgcagggtatttccctgcaaagggatgtcgggatcggacagggtaatgtaaatccagtacttttgctcggtctggtagatctcggtgtgtttccagccattgaggccgctgtctgtcagagtaatcttctcactggtgacaccggtaccgcagatccccggtacgggagcatagaccagagtaaaggtatcctccggatatgcgatgttccagaagacgatggcatcggtagtcatctcactggtagttacgttgcggatttcatagtcccaggtctccggaagagacagggagaaccgcaccgatcccaggtcgcagagagcttcactccctatggctatcgccagatcatcctcagcctcggattccgggcactccgtcggagcgagagattctgcaatcaccggagcgatcgggcctgcggcttctgtgggattctgtgaatctccggaagctccgcagccggtgaacgacagcacaagtaaagtgcaaagcgataacagcaaaatatttttcttcataaaaataccctcccaaagtcgtgaataagtaacatgatctatactatagaacgacttccgggagggaaagtttcagagaattgaaagttacgagccatgcatagtcaaaacggaaacagcgatctgggagcttgctcacaagtcgctgtttttgtttttgactatatactgtgcgtccaacggacacactcgacagccgtcaatgaaataaatgtggagcgccctttgcgacacatttatgaattgggggcagggctcgtaacgtagggggccgtaaaatccacgcagaaaggactgcccgccctggacgcagatgctagctacaactgtggattttctaaaggaaagtggcgaagtgcttctcatcatgacggggccgcctttacgctaccattcatgtcgcttaccggctaacgcgaacatcgtgttcgcgttgcccctgcggctcaaccacttcccaagaaaaactcacagtctccgccgcatctacgtcaggggagcagtccttttctgctgggttatgaaagacatcccaattatttagacagagcatttgagaatacatgtgcggaagttaa

SEQ ID NO: 11270 - DNA, 29594 bp, Unknown
  gut microbiota DNA sequence
attatattaattaatcatcaactattcttgtttttaatctcttattcttgtcattttcgttattatcttctattttcacaagttttattcctatgttttgtatatattatacaattaaaacaattgatttgagttaaattagcttatttaattaactaatttttctttctttacatcctttgacattgaaatagcttaaataatggtttataatgtatttaagcttacttcattttttcaaaaaagcatgtttctaatgtgaaaaacaaatttttcacatgaagttttgttcctgcacaagctgctaaagcagccaaagtttgaagcttgcggaaaggcaaggtttttgtatgaacatttccaccacttttcttaacgcattgaagcacacttcctccgatgtggagggacaacgttccccagagatcctactgggacagatctacaaagtatccctggaagacaaaggctttttactgcctctggccggtggggaattccgcctgttaaatcccttttattatgaatggaacccctttccttcttatctgctgctctacaccttagagggtagtgctctccttaccacccgggacaatgaggtgatcctggatcacgagcatctgttgttcttagattgcagtcagggtttctccctccggctgttgcagggaaagtggcgctttcagatgtttttcttaagtggaagggaactttcttcttattatagcatatttgaagcttattttacctgttgttatccgattcccatcggttcctgtgtctcacagcgcatgcagcagctaacaaaatttccctttaccccgacccccgcagagcagctgcagattcatagggagctgaccggcatgttcaccgagctggcattgtctgccctgtccgtttcccgggatgcgaagcccattcctgcttatctgctgtccatgaaagcggattttgaggaaaactatgcagaaaatcactctttggaatactttgagcaggctttaggcatcagccgctaccgcctgtgccgggaattctcctctgttttccatatttctccgctccagtatcttcaggagaaaaaaatagaagcagccatatcgctgctcctatctacggatgatccgatccacgaggtggggtctatggtaggcatcgacaataccaatcatttcatccacctgttcaaaaagcacactggtgtcacaccctttgtctaccggcagaacgcgccgcagtctatacgtgagacacactgtccttcagcaccaggcggccttccaccacggtgactccccctttgaaattatcactggtgatcttcttgatcatattatgaatagctcttctcgccatctctcccatatctacttcataagtagtaatacggatatcactgagtccgggatacaggtagttatcaaaacctaccacggaaatatcctccggcacacggtatccgttctctctcagcttcttgatgagtaagctggcggtcagatcgcagttgcatacgaatgcggtaggcatatccttcggaagctgcaacatattcaccgtatcgatcttgccggtctcaatatgacggtcatccagcacccattccttcttctgttccagtcccagctctaaaagagccttttgataaccgaaatatcggtccgtaatgctctcggtggccagcagggttcccacataagcgatcttgcggtgtcccatccggtacagataataggtcagctcataggttccgtagtagctgttggagatcacggaatcactggcttctctgccgttataataatccagatagatcacagggatcccagcttctgtattcaaatgctgcaggtaatcatccatcattttaccaatgacgataatgccatccaccttgcgttcctgtaccagcttcggcaatctgccattctcttcctctgccattccgatgacctccagcatggtaaagcattcctttgctgtggctctggtagctaccgactgatacatctgccagtaaaaggactcatatttatccaaaaatctctcagagatcaaaatgccgatattgtagctcttctggttctgactttttcttgccgctgacggctgctgataacccagttcttccgcaatactgtgaattttttcccttacttcctcactgacgcctttttgtccggacagtgcttttgacactgttaccgtgctgacccctacccgttctgcgatatctgctaattttactgcttttgccataatttcgtactccttatcgctattttcactgtcatctccgttaaatcatcaaccctacctaaatcttagtaatctgaaaatcttttgtcaaggcatgctcctgcccagttttacgcctcagtcaaatggatcagcctgctgcggtagtcaccccacaaaggtgctattaacatgccggcctgcatcagcacatcaccgccgagtacttctccggtctcctctatgcggtagcgattttccggtgacaatcctttcagacgcactcttctgctgtgaaaattcggtcttgataatacctgtacataagttatcagcgcttcctttttatccttggaagctaccatgtagcagtcgtagctgccgttttctaaatatgacgcgatccgccagtaatctcccctgcggatcagatcgttgtatttgtgatacatagcggtctgtgcagggatctgctgcctgtcctcctcaggaatcttcgtgatatcaagctcgtagccgaaggtacccgccagtgccacatgccccctggtctcaaaaggtgtcactcttcccaaggcgtggttggggcaatccgatacatgggctcccatagtggataacggatatagcaacatcgtgccttcctgaatcttcaaccgttcaatggcatccgtatcatccgagcaccagatctgcggactataatacagcatgcccggatcgaatctcgctccaccaccggaacaattctctaaaagcagatgaggaaattccgcaagcagtctctcctgcagttcgtatacccccaacacatatctgtggtacaactctccctgacggtctgcagggagatccatgcttccgagatccgacagctgacggttcatgtcccatttcacatattcgatattggcgctgtgcagcactgccgccacactttcaaaagcatgatctctgacttcctttcgggacagatccagtacatactgattccggcacaggcttcctacacggcccggaatggagattacccagtcgggatgctctctgtacagatccgaatccggcgagatcatctccggttcgaaccagataccgaacttaagtcccatggcatttacctgatccaccaaaagtttcagacctcccggcagcttctgctcattgaccttccagtcacccaggctcgtgctgtcatcattacggtgtccgaaccaaccatcgtccatgaccaacatttcgatcccaagctttgatgcctgctttgcaatctttaataatttatcggtgttaaaatcaaagtacgtagcttcccagttattgatcagaatcggacgctttttatcccggtattctccacggatcagatgctcgcggtacatatcatgataatgatgtgtcataccgctaagcccctctgaagaataagtcattactacttcgggcgcagcaaagctttctccctgctccagtttccatacaaaattctccggatggatccccatagtcatacggatggagtcgaactgtgacagctctgcctgtgccaggaaattaccggaatatacaaaatgcatgccgtagacttcaccggtatcctgcgttgcattttctgacagcaatgcaataaacggatgctcctggtgggaggattctcctctgacagacccaacgctctgcttaccatgcatcaggcttctcctctccatctgacgttctctcccccaggaaccgtgcaaggtaaggatgtcatacttttcatccgtgcaatccagatccaggcaggcagacataacttttgtcagataaatcggctgttctgctgtatttttcaggattacactgcgggtgatcacatctactttttcaaatgtagtatagatcagttctgccgtcaaaccggtcgtctggtcctccaggtgcaggatcagggtgtcgcaatcctcctctcccggaaaagtagaaggcagcccgggaagcgcgggcttcccctttacgatctcatgggagacgtaatttagctgcactcccacatgtcctcccacggtccggatggagacagcactctctctgtagtctcctaacccgttccccggatactccatggggaaggaatccaggaatgccacacgctctctgttgttctgtgacgggacgaagggtgcctcccccgtacgcattaaatataacggagccggtgcattttcggtatactgcaatttctgaccgtagtatacatgccccacaaaattctcctcatccacaacagccatgatgtagctggtgtgttctgtatccagccagaaggttctgtcctgttctatgtatctgattgccatacttttacctctttctttccggaataaaaatttttctaaaaatcgtcatttccaaacttctccgagcggcaagtgcgcccctgtcttttatgctttctgttgatatatctgtcacaaatgtaaaaaagcaaacggtgcttccgtttctgccttcaaaaactgcatcagcatcagtccgcagcgcatggatacccgctcttgtctcaggatccggagtacctcctgtctgtccgccaggatcacctgaatatcctcagtgttctccatctgctgtcccacctgctccgtcaccgtgccgaagatcatactaccgctctcgtccgtcagcccctgcgccaggaaaaagcctctgcggaatgccggctccccgccttcatataccttcagttcccaaccggtctcctcgatcatctcccggcaggcagcctccgaagccgtctctcccggctcgatcaatcctgctggcagttcatagagataatcgtccatggggtaacggtactgccgcaccagtaccagatgttgtccatcctccgttaccgcatagaccgccataccttcggggcgcaggctatgagtcttatgtttgatattatcctcaccattgcgggaagcaaaataatagtgaaacggcgtcccgtcccgccccagtgcatcgatatgatacaaatttaaaaacggattgtccgtcagcttttctatgccccggtaatgtttttcatccttattccgcattcaatatttcctccaacagtgccaccgccagttccgggtttttcatgccatccgccagtcctaccgctgccgtgtgctcataccagccggtcttttgcacccagacattatcttccagcctgattcccgccacgatcgtctctcccgtcatggtatttaacactttgatctgctgatcttcatatctatccaatagttcctcaggcatataatcccttaaatttaccagataatccgtgccgcccatgagcttcaaaaactcttcgtcagaaaaaaacacatccaccgaccgggtcatgaacaatacctggatcgtgctgagattcgtggaatccacgtcggaatccgagttcggatcgatccagatcgtataattcaggttcaccacatcccgtttggacatcacaccgtgttcccgcaggaaatccgtaaaataatccggaccggtggcttcgatgtgctctccgtccgtattcactgccatgactcccatgacgaagcttgtcttggtggcaaaatgcacgatcaggaagatcagaatgacgattcccgttgtcacgcctatggtaacccgcagataatagtctataaaatactgccatttttcagaaggagacagttgtttccattgttctttctgccggatacggtcttccttttccaaattgctgtctcccttctgtttctcaaatcttccatctgataacatcctgcttttagtactatatcaatctttagtatatcaaactaatttaatcttgtatagcagactttttaatatattttaggcttattattgttaaaaataaacagacaaagccctgtcatgcacttaaattgacatgacagagctttgtctgttctatttctttgatcagataagaaggggaaatgctttagcgatccatctccgcaatgcgtccggtggacttatgctccttgatgatcccctggatctccttcaggtcagtgcacagcaggtcaccggggatggtgttcttaagtgcactgatggcattaccgtattccagtgcccgctggtactcgccgggatgtgccagcagtccatagaggacacctgagatataagcgtcaccgcttccaatacggtctacgacttcgatatcggtgtaaggcgcttcttcataataagtatcgtccttggcactgtaaatgatagaaccgaaggtatgacgcttcgggctatgtacgatacgctgtgtggatgccacgatggagatcggatactcctccgtgaagctcttcataatgctcttggcatcgccttccttcaggaaagtcaggcgtgcggtgtcctcggagcagaagaagatatcaacataaggcagaatggattcgatgcattccttcgcctcagcaccggtccacagattgccgcggaagttcacatcgaaggagatgatggctccctgcgccttgaaacgcttgatcatctcaatggcggttgctctcagttcggggctcaacgccagtgtaatgccgctggtatggaagcaacgggtatcactatacaggctgtcatcatagtccgcaacactcagtttattgatagaagtattcttacggtcatagacaatacggggttttctcggataagcgccattctcataatagtacacgcccagtctcgcatccttatcatcgtcatataccagatagtcatcgctgacgccgcagagacgtacacggttcttaatatatacaccaaggtcattggccggcagcttggagatgataccgcaacgcaatcccagcattgccgcaccggtgatggcattcagttctgcacctccggcctgcttgctgaagctgtcgcctctggtgatacgctcattatcgggcggtgataatctcagcatgatctctcccagggagagcaggtcaaattcctttttctcagtcagttccataatataaactcccatctgcatttttgccaaatgttgtatcggaatctctccggtgttcctcacagtgtgccattgaaaccccttacattttctctttacatttgtactataacacaaatatatggcgtcggtaaaggtgccagacataaattaaaaatttaacgaaaatactgaatttgccgtcaatatctgctataatcaatctgtattatcattctaagaaatgaggtatttttatgcattcaaaattcctttccgatagtaacactttttacagacgttattgtccggttctgattctgttactgggagcacttctgcgtctgttatacctgtcccgggtgcccggtggcctacatcaggatgaggcttttgtcctgctgaactcctatgaccttttacacgaaggcagggattccgcaggctatgcattccccatctatatgtccagctggggagacgggcagagtgccatgtactcctggcttctcactcctctcctactgttgaacaaagggattcccactacttttctcggaaggcttcctcaggcactggtaggtattctaacgctttggtgcgtctattgtctggtaaaggaaatgttcggccacactgcgggtctctgggccttattcgccttaagcgtctgtccctggcacatcatggcctgtcgttgggcattggatgccaatatggcccccggctttctcatgttcggtctgtactttttcgtacggggcatgaatgacaaccgttatctgttgctctcggcacttttttacggtctctccctctattgctacgcagtgatctggccgatgcttcccatcctgctggctctgcaggtatgttacgggatccgctatcataaaatccattgcaaccgttacagcgttctgtctgttctgctcctgtttgtcctggcattaccgttgcttttatttgtcctggtcaatcagggactgttgccggagatcgccttaccctggatcaccattcccaaaacacagaggtatcgcggcggagagattgctttttccctaagttctgtttatgcgaatttcaaaaacacggcacatttattgttattgcaggataccggaagtccctatgactttctgccgccctggggtttattttacgacattggccgccttttcatcctgatcggaatcgtctgtatgctgtaccggctgattcgttctgtgcggcagcatgtgttttgctgggaattcttcctgtttgcccagctgatgggaggtggaatcacctcgctgctggtcaccgccaggatgcatcagatcaatgatctctatatcccgcttgtcttatgcgaggcatatggtatctggaaatgttcctgcttcctgaaggggaagtctcaatctctcggcaggatttttacaggctgcaccactgcattcttcctcatctgtctggttctgttccaaaaggactattacaccaagtatgcggaaactacaaacgcttatttttcccaaggtgtagaagactgtgttgcgtattcgatgaaacagtgcaagacgctcggtctgactacgatcagcgcggaaaaggcaacgcaatggcccagactgcttctgtatacacggacattgccttcccagtacctggctaccgttacctatgatgttgccccggctccggctgcctttaccaccgctgacggaatccgggtcaacacgcgcatcaattacgataccatatccactgacagtatttatattatttactacacagaggccgatctgttcaaagacaggttcaccctgacacctttttatgactggtatgttgctgtccctaaatagcctccatgtaatcaaaatagtcatcttcgctggcaaataagatatattcgttctccacatatcccatgtatccgctggctgttacatatcccttcatcgtaaaatacctccttatcagaagccttttgtttgctgttctgataagaaggtatctcttttaatgtcccataaaattctcttaattttcctgagccggcaatttttccagcaccagttctttcatttcttccagtaattcctctgttttccccatcaggagttccgcatcggtctctaccagtcccgtttttttgtatttataggtaaaaaacggattgccgtatgcggtgaagctcatttcctctccatgctttttcagaaacgcggggatcttcagcgggtctatggatgcatccggtcggaaattaaaggtgatccggccgtttttgcccttgatctccgtcatatccagtgcgtgtgccgccatgcggatcagtgcgatccgcagcagattatccactgccttggggatattgccaaaacggtctaacagctcatccttcatctcatcccgctctttcagcgtctcaatgccggcgatgcgcttataaatatccagtttctgcgtttcattcacaatatattccgccggaatatatgcatccacatccaggtcgatcaccgtggtgaaatccaccgtcgtatggattcccttcagattctgcaccgcctcattcaacattttgcagtagaggtcgtatcctacggcttccatgtggccatgttggctcatccccagcagattcccggccccacggatctccaggtcccgcatggcaattttgaaaccgctgcccagatctgtgaattccttgatcgccgccagccgtttctccgctacttcctttaacattttgtcccgcttgtacatcagaaacgcataggcattccggttggagcgtcccacgcggcctctgagctggtacaactgggacagccccagattatccgagtcatgaatgatcatggtgtttacattagagatatccagcccggtctctataatagtagtggacaccagcacatcgatctctccgttgatgaaatcaaacatgatccgttccagttcatgctccttcatctgtccatgggcataggccacatttgcttccggcaccagtttcgcgatctgtgccgcaatatccgcaatattattcacacggttatagacatagtagacctgtccgccccgggccatctcccggacaatagcctctctgaccagttcgtcgttgtattcgcagacaaaagtctggatcggcagcctgtcgttgggagcctcctccagcacgctcatatcccggataccgatgaggctcatgtgcagggtacgggggatcggtgttgccgtcagggtcagcacatccacgttctcttttagtttcttgatcttctccttatgagccacgccaaaacgctgctcctcatcgatgatcaaaagccccagatccttgaacttcacatccgccgacaatactctgtgagtgccgatgacaatatcgaccattcccttttccaggtcctttactgtctttttgatctccgaaggtgtgcgaaaccggctcatcagggcaatattgaccgggaaatccttcattcgctgcacaaaagtgttgtaatgctgctgcgctaaaatggtggtaggcaccaggtataccacctgtttgccctcctgtactgctttgaaggcagcgcggatcgcaatctctgtcttaccatatcccacatctccgcagatcagacgatccatgatccgatggctttccatgtcggccttggtgtccgcgatagcactcagctgatcctccgtctcctcgaagggaaacatttcctcaaactcccgctgccataccgtgtcttttccaaaggcatagccctcactctgctggcgcaccgcatacagctccacgagatcctttgccacggcgctgaccgcactgcggaccttggtcttggtatgttcccattctttgccacccagcttattcagcttcggcttcttcgccgcatccgcagaggcatatttctggatcacatccagtccggtggcgagaatgtacagattgccgccgtcccggtactcgatcttcaggtagtccttgacaatgttttccacctctaccttctcgatgcctttgtatatccccaatccgtgggtctcatgcactacataatcaccgatcttcaggtcattgaaatcgttgatcttctgcccctggtagagttttttctttttcttcttacgtttctccgacccgaaaatatcactctcggacagcaccacgaatttcagccatgggtattcgaatcctttatttacatgaccgtaataggtcaggatctctccgggctgtacttcccgcatggggtcttccgtatatactgccgtgagtcccgcaccgccgtcttccgcattccgcagatcctctgccagacgtcttgcgcgggtacgggatcctgacagcagcagtacccgatatccgctttttttatattttttcagatcttttaccagggattcaaagctgttgttatagggggcaatattgcgggctgcaatatccacatgtttttccgtccggaaatagccgtacttggtctccatggtagccagtgtcaccacggcatttttctccaatgtggccgccacctgctctccgctgtagagaatattcatctgtcccggcagcacatagccttttctcgcacgctgctccatgctctcccggaattccagttctatagcgtcagcctgctctttcacccgcgccggttcatcaatatagaaaaccagagatcgtcccgccatatccgccagcagctccggcatagtcaccgtattttcataaaaatatcggatatatccttccaggttcgctttgctctggaattccaacagctgttccttcaactcgcttacctgggtggcgatcctgtgggcttcctccggctggtgggcatcccggaaaattttctcctgtttggcggcttccttctccagtctggcgattcccttgcgaatctgctcctcagacaacacgaactccgtcgccgggtagaccgtgatactctccagcttctcaatggaacgctggcttaagatatcgaagctgcggatggattccacttcatccccccacagttcgatacggtagggattctcctccgtcaggtcaaaaatatccacaataccgccacgcacggagaattgccctgggctttccacctgataggctttctcgtatcccatagctaccagccgggatgccagtttactctcgtccaggcttccgccccgttcggtgcggataatatcctgctcctgccacaatacctggggtgtcatcagcgccgcgtaggtggtgacaatggtgacaggcttgccctccacgactctgcgcagagtcttgatccgctcctgcaccagctgattaccatgaatatctgcctggaaaaagatcaggtccttcgccggatacagcatgacatttctatcataaaaccggtattcctcgtagatttccttggcttttaagtcattataagtaacgatgaccttgtatttcaggccatcgctgagtccgtagatcatatgaagcttctgtgagtccacgcagccggacagagcgatggttccctttccctgtctgacgcctttacggatctcatcatattccgccacttctttcaatggtgcaagtagtgcctgcattttttcacgctttcttactgttaaaatggttcatggctgcatctgcgctctccgtgaggatcatacggatcgcttctgcggcggtcttcgctgcttcgtccatgacggtgcgttcttccgaggggaaatgtcccaatacataatctgccaggtcataattcttcggcttctcgcctactcccatacggacgcggataaaagtatcatgccctaacatcttgatgatattcttaagcccattatgcccgccggcgctgccctttttgcggatgcggatctgtcccacatccaggctgatatcatcggagatcacgatcagctccgaggtatcgtccaccttataataatccacaatctcacggatgctctctccgcttaagttcatgaaggtctggggcttcgccaggatcaccttctgccctgccacatagcctttgccgatcaacgccttgtgtttgctctccatgacagcaatattttcttcctctgctaatctgtctatgacatcaaaaccgatattatgtctcgtattttcatattcttttccgggatttcccagccctgcgataatatacatatacttctccttactttcttgcaatcaatgcgttatcttatattttcgcatttttacgcagaaaatgcaactattggatattttgacacagggcttgacttttcccagattattgttatactgaaacagttgtacagcccataaaaacaaggtcttacagggctcgccgatttccggcgtaaaatgaatcgagtgttcgtgaccttccactcgtaaaacaaaactaaaggagaaaacaaatgaacaaaaaagtactgtacctcgtacacggagcggtgatcgctgctctctatgttgtgctgaccatgttagccaacgctctgggactggcaaattatcccattcaggtccgcttctcggaagccctgacgattcttcccgtatttacccctgctgccataccgggacttttcctgggatgtatcatcagcaataccatgaccggctgcatgctgcttgacattatcttcggcagcctggcaacgctgatcggtgcctttggcacttatctgctgcgtgataagaacaaatggctggctcctctgcctcccgtcattgccaacatcatcatcgttcctttcgtgctggcttatgtgtatcatttagaaggtggtattccttatttcatgctgaccgtcggcatcggggaagtgatctcctgcggcatcctgggcatgctgcttcgcaccgtgttgcagaaatatcgcaaatacatttttgatgtacagaaataagcaatttaattctctgttctcatgtatgtgatgaaatgattgccattctcagcaaaccacgctgtggcatcattcattcccttcttatacagctttccggtggcaggttccataatgaccacattgaattcattaaatcctgtcaccagaactgcttccccgtcctccaggatcgccagtaccgggatatcctgattcacataatacagcaccgcatccagcgtacagccgcttaaatccagcacctgtactcccgtcatattttccgacaggatcgtagtagcggtcttgccctgcgccagatcgtactcggtgttacgggtaattccggcatgtctgagaatgttatccaggcatacagccaggctgttcttctgctccgtgacgctctcttccttgatggccatgatctgattcctgctgacacggtttcctttgagccataccgtaactccgcggtcattggtcacaatgccggacgtgtcataggcttccttcaccgccgtgcccggagcactgtagataccgcatacgccatacgcattgcaaacataataccggggcacttcactgaccgcatccagttccagctctctgccgccctcgaatacaacctccttggggttcagcaccttgatggtcttcgcatcaatggaagatttcgtctgaatctgcacatagcgctcataaatatcgatatttgccgtgaccactttattctgtccggcttcttcttccacattgttcatgatctggtcatccaggatctcctggtagctgccgttctctgtccgctgcaggcgggacagtgtgatctggttgctctcgatcgtacatcccacgacatagattccttcctgcccgtattctttcagactggcaccggaagaattactgatacataccttatacataggatagaagatctgtccggaattctccgtgcggatatcgctctcccttgccactccgtagatgatgtcctctcccataaagccaagaggacggatggcatccccatcctcagcccggatcacggtctgttctccggtattcaggttccgcacattcagctgattactatgattgatatcgtccccttcctgccatacgatgatctcatgattctccgatacctgaaggctgtcatcctgccggatgcttaccagctgctctgcgcttcggttctccagatccacatcatagacaccgttttcgaggaaaaagtacagatgctgctgcctgttccggtacaaaagctggcccatctcgtctttcagcaccgcataactcttggaatatggaatatagacctcttcctcgatggtgttcagcgaattgtcgtaacttaagatctgaataccggtctcgccctcatgtcttccgcggttcatgtagccgtatacggcaaattttacattgccgccctcgtccacatcgaggatcttgataccgtgatggtcatacagcgtacgacagtccgcattgtccttatcatagaaagagaagatcaccgtaagcccattggtcaccgcgttatagcaaagcagctgtcccctatcggaaaataccacggtatttccatcggtgctctccatcatgtccacattttcatccgtgatccccaggaggatcttatcattggcatacatccgcccggtatccgggatctgcgtcatggtccgctcataatccagcagatacattctctccgaggtatatctgacgcgatagtattcttccacgctataatatatcttatttttcccctcaccggtagacactacaaaatccatcagcagggaagcaatgttcccattcacctgtaccaggcgcagggaagctgctccctcctggacaggctccaggttaccccaagtaatctgttggaaattgctgtggatgttcactttgtgaaaagtaccgttatccgtcagtttcgaattcggttccaggtatttagtcagttcctttgccgcttctttgtcatacagtttcccgtggaaatccgatgcgaactccaggatctctgcgatatgcaggtcgtcgttccacaggatcgtcgtataatagtagaccttctgttccccttccaattccaggatcagggtcaggctgtactgtgtattggtatcgatcaggtcttttaaagtcagcgtgaccggaaagcttttacctcccgccttccatccggtgacttctccgttctctataagtcgggaaccgtcaatgctgcggacttccatggaaattcccgtgatttctctgccataagtatccacggtaaaatttgcctgtctgcccgcacccagcatagtcacagtatctttttggtatgcgacatccatttccactgtgttgccatgcagctcgttgcatgccacaccgccgctctccatggtgatcacgggaagtgtcgccggagccatttccatggtcatgttattatgtccctgattcataatgccgccgatgataaacgctgacgctgtaaacaccacaacgcacacggcaattttaataatcgttttcttcattctttttcttacgggtcatttcccgccttctatctatttattttgcaacagtttttccaatgtcggtgctacatgcaaaagctccgtcacagaactgatatcattctttttggatataccggaaccgctttgaggacgcatgccgtttttttcactgcacggatcaacaggttcttaggtgtatgttccatgtcgatgaattccagtatctgtgtctcgtacccctgctgttccaggagattcgctctgagggcatctgtaagcagtgccgcgatacgttccttgatgatcccatatttcaataccggcttcagagaatcacactgaatctgtctgttcagttcgtgctgacagcagggtaccgccaggataactctggctccccattttaccgctttgtccagggcataatccgttgccaggtcacaggcatgcagtgtcaccaccatatccgcgacatccgttccctcataggtgctgatgtctccccgttcaaattttaatctgtcatagcccagcttctccgccagttcattgcaatgtttgatcacatcagtcttcagatccagtccggtcacctgaatatctctatgctgtaattcgtgcagatagtaatacatggcaaaagtaagataagatttgccgcagccgaaatcaatgatccggatcgtccggtctgtcggcagttcattgatcacatcctcgatgaattccagatatcggttgatctggcggaacttatcgaatctcgccttcgtcacacggccgtccggcgtctgcacacccagtcccaccagaaaatccacaggctttccttcctctaagatataatgcttggtacggttatgcgaaagtgcctgcagatcctcctgttcgggagcggtacttttccccgcttttgatgcaccgttatttttcaccttcagagtcagctttccttttttactgactaacgccgtagcctgtaagctttttgccgtaaattctccctgccggaactgttcctgcaatgcggcacagattccgtccgtcatctgcgccgctgtataattctcatgaaatacctgcgttcctttgtatctcgtctcctgaaacaataattcgtcccggatcaataccggtcggatctttactttctgtatctgttccggattacgactgttgcttagaatgatctgttgcagatctttattcaaaattttctgtaaaagtattttcaattcttccatagtttatcctgcttccatacgcttcatgcctgatgaattcacagtgttcattgtaacataaatgcttcctctttgctataaaaatgcaatcattccgcgttttccgccgtgtcttctcttgtagatctcatcacacaccagtacctggatcagatctccggagacttttcccgattcccgctccaggatcttaccaatggtatcagcgatccggtagaggctgaagcggtccggatattcgtcatagatcatacttccttcgtaatcgtatttgtccaatatttccgcaatcctgcgctgacagcgtctgacttctccgggataggtctgctgcagatattccaagtcatttaatatttctttttcatccattcttccgggatatccgggcaatgtcataaaaaacggtcttgctaccattttaaaatgcctcatgcttttttatagcatatgcattttctctctataaagtgaaaaacaggtgctgcgaaaattatcgcaacacctgaattctcgccattgctctctgcaatgccgtctctgctctggcaatatccgtctccggcgtcttgctgcgcagtctctcttccgcacggtgcagtgctgcctccgcacggttctcatcgatctcattgggccattcgatgatctctgccagaatgataactccctcgggaaggatctcggcgaatccggaatgcagtgctgcctccttctctccgtccttctccgtaatatgcaggatacccggcttcacgatcaccgtcaggggaatgtgtcccggaaggacaccgatctgtccttccgtggtattgaattctaccatatccacagttccctcatagaatactctttccggggttatgatacgaagttgaaaatctttatctgccatatctgaactcccctctcatgctatgcatgaacctttgccagtacatcatcgatgcttccggcattcaggaagtagctctccggaatatcatcatgcttgccatccaggatctcacggaatccgcggatggtctcgctgatcggtacgtattttccctccagaccggtgaactgtcctgccacgaagaagggctgggacaggaatctctggatcttacgggcacgggatacgaccagcttgtcttcctcggacaattcgtccataccgaggatggcgataatatcctgtaattccttatatctctgcaggatctcctgtacaccgcgggcggtctcataatgctccttacctacgattctgggatccaggatacgggatgtggactccagaggatctactgcgggatagattcccagttctacgatagaacgggacagaaccgtggtggcatccagatgtgcgaatgtggtcgcaggtgccgggtctgtcaggtcatccgcaggcacatagactgcctgtacggaagtaatggatccgttcttggtggatgtgatacgctcctgcagcgcacccatctctgtctgtaatgtaggctggtatcctactgcggaaggcatacggcctaacagtgcggatacctcacttcctgcctgggtgaaacggaaaatgttgtcgatgaacagcagcacatccttaccacccttgtcacggaagtactctgccatggtcagtccggtcagaccgactctcattctcgctccgggaggctcattcatctgtccgaataccatggtggtcttgtccagtacgccggactcctgcatctcgtgatacaggtcgttaccctcacgggtacgctcacctacaccggtgaatacggaatatccgccgtgctcggtagcgatattacggatcagctcctggatcaggacggtcttacctactccggcaccgccgaacagaccgatcttaccacccttctgataagggcagagcaggtcaacgaccttaataccggtctccagcagttctgtgtccgtagactgctctgcgaaggtcggtgcagcacggtggataggctcgtaagataccccctccggtaccggcttgttatcaatcggctgacccagtacattaaatattctgcccagggtattttctcctaccggcacggaaatcggagctccggtggcgattgcctccattcctcttaccagtccgtcggtagtacccatggcgatacatctgacagtatcatcacccaagtgctgggagacttctactaccagttctcctccatctctggtagggatgcggatcgcgtcattgatctcgggaagtttgccctcatcgaatcgtacatccagtacggcaccgatgacctgggtgatccttcctttattctctcctgccatttctacctctttcctgcccactaaagggcatgttccaataattaaagcgcctctgcgcctgcaatgatctctgtaagctcctgggtaatgcttccctgtcttgcgcggttatacttcagtgacagatcactgatcatatcctccgcattgctggtggcattatccatggcctgcatacgggcaccgttctcactggctgctgcttccatcagtgcaccatagatcagactggaaatatatttcggtatgatcatatccagtgcttccacatcttccggctcaaaattcatcagtgcgtcagcaccctctgcggagtctttcgcgtctgcatcatattccacaggcagaagcttcaacagcttcggctcatggctcaccgtgtttttaaaatgtgtatatgccagatagatctctccgatctctccggctgcaaatgatgtcaacagcttctgtgacagaagcattgcttccgcataagccggttcctcaataacctccggataggattccttcacggtatatccttttctctccaggatctcccggcccttattaccgatggcatagactaccacgtcttctgtcttccagtcctcctgtccggtgatcagtttggctacgttggaattgtaaccgcctgccagacctcgattggaggtaatgacaatgaccgcctttttcggggaagcacccggaactagatatttgtgttccagatgacctaccctggacaggatattatttacggtatcatacatacagtcaaaatacgtctgagaacgttctgcacctgctctggctctttgaagctttaccgtagataccagcttcatggccttggtgatctgctgtgtgccctgaatgctggtcttacggcgcttgatatcacgcattgatgccatagttacctctcattctgccgtatatcacggctgacacacttatttcagaaactctgccttgaaatcattcagtgccttcacaagcttttcttccgtagcatcggagatcaccttttcctcagcgatggctgcaggaatctcgggatgcttagtatccagataatcgaagaattccttctcaaatctggtgatgtcctctaccggcacatccagcaggaatctcttagtcaccgcatagatgatgataacctgatactgtaccggcataggctggtactgaggctgcttcagcacttccttgatacgttcgccctgcgctaacttctccttggtatctgcatccagttcagatccgaactgtgcgaaggaagccagctctctgtactgagcaagctcggtacggatcggcgccgcgatcttcttcattgccttgatctgtgccgcaccacctacacgggatactgacagacctgcatttaccgcgggacggaaaccggaattgaacatttctgtctccagatagatctgtccgtcggtaatggaaattacgttggtaggaatgtatgcggatacatcacctgcctgggtctcgatgatgggaagtgccgtcagggaacctccgccgtattcgtcactcatgcggaccgcacgctctaacagtctggaatgcagatagaatacgtcaccgggatatgcctcacgtccgggtggacgacgaaggagcagagagagtgtacggtatgcggtagcatgtttacttaagtcatcatacactaccagtacgtcttctccgttctccatccactcctcaccgatcgcacagccggaataaggagcaatgtactgtaagggagccaggtcacttgccgtggataccacaacggtggtatatgccatggcaccgaactcctccagtgtctttacgatatttgccacggtagatgctttctgaccgatggctacatagatacattttacgttctgacccttctggttgatgatcgtatcgatcgcaatggcggtcttaccggtctgacggtcaccgatgatcagctcacgctgacctcttccgatgggaaccatggagtcgattgccttgatacctgtctggagcggcgtgtctacgctcttacgagtgataacaccacttgccacacgctcaatcttgcggaatttatcggtctgtatggggcccttgccatcgatgggctgtcctaaggagttcactactcgtccaagtaatgcatcacctacgggcacctctaccacacgtccggtggtcttgacgatatcgccctcttcgatattgctggcactgccaagcaatacgacaccgacattatcttcttccagattcagcaccatgccatacacatcgccggggaactgtaacaattcaccctgcatggcattttccagtccatgtacacgagcgataccatccgctacctggatgacggttccgacatcggagacatccagctgggaagaatatctttcgatctgttccttaatgacggaacttatttcttctggtcttaaattcatggatctgtcgcacctttctttcagccggtcatcccagctgaatatttaataattgtttcttcatatcttcgagtttggtccggatactgctgtccactacccggtcacctacccggatcaccattccgccgatcagtgtcggatccacatggtaatacacatcaaaggactgataagaagtcgtttgaagcagcttttctctcactgcctgtttctgttccttcgtcagctccactgcggtacttacatatgcggttcccattccttccgattctctgaccagttcggtaaaataagcaaaaattgcctttaatgaaccgtagcgttccttggtcaccacgatcttcaaaaattctgccagatcgtcgcttaccctgccccggaaaaccttctccaccatggagagtttctcctgcttgggaatcccgggatgcttcatcagcttatcaaaatcgggattgtcttccaggatcttctgaagttctgcggtctcattcatcagacggatcgcattcccatggtcgaccgccacttcgaaaagggcttctccatagactttggaaactaattttgccatgtgtcctcacccatttccttcagcgtctcttcgatcagactgttctgtctggcggtgtctatggacgcacccacaagcttacctgccatgacagatgccacggatacgatctcctgtttgatctcgtcggacattttctgtttttccagtctggcttcttcctgtgctcttgccaggattctgcctgcttcttccttcgcctgtgcgacgatgcgctcctcgttctggagtgcccgtcttctggcatcacttaagatgtcctctgcctctttgtcgatgtctttcagcttcacctcatactgttccttcagttctgcggctttttcctgactggtcttcgcttcttccagttctcctctgatcttctctttacgatcatttaagaactttctcgccggattgaacaggaaatagctgagcgccaggaacaatacgaagatggcaatgatcatcaggcaggaatctgccagcagctgccagtccaggtcaaacagtcttgacatggtctcgccttctgttaatagtatcattttcatccgcattcctttcgtttaatcagggaagtaagggctttacgaacaacagcagcatagcgatcagcagaccgtacagaccggtggtctcggcaactgcctgtcctaataacatggtggaagtgatctcggacttagcaccgggattacgtcctactgctgcggcagcatgtcctgctgcgataccctgtcctacaccgggtccgataccggcgataactgccagacctgcaccgattgcggaacaacctaagataaagttttcattaaaatccatagtaaatcctcctattattgagattctttcagaatctttctagcattttaagcttacgcgtctcctcttgcatttgcgatataagtcatcgtcagcatacagaatacgtatgtctggatggctccggagaacaggtcaaaatacacatgcaacgctgcaggccacgccgtagcgatcacacctaacaatccgtagatcaatgccatcattaccgttccggacaatacgtttgcgaacagacgtaaagacaacgaaatcggtacagcgatctcactgatcaggttgatgggcagccagatcggcagccagggcggcagcggggaacacatgccttcccagatctccttcggcttctggtacttgaactggttataatgaatcaatagaaaagtcagtacgccgaggggcagtgtcacaccataatccgctgtggggggacgaagtcccagcagaccggaaatattactcaccagaatgaagatgaagatcgttccaatgtagttatagaacttcggtgccgccttgcccatgggagtatccaccatggcgtccagcttctccacgatcagctccaccacattctgaaagccttccggcacttctctggctttggccatacagcggttggcgacaatggcaaaaccaatgatgatcaacatgacgatcaacacacacacatgtgtggtcgttatccatacctcatgaccgaaaaaggaatacttaaacacgccatgtatcataaaatcgatattatcggcaccggataacaaaattccatgttccatcgtttcacctccttattatttattctgttgttctgtcacttctccgttcttttcggctccttccgggttctccggggcattttcgcctccggcagtctcctccggcatcgcctggggaatcggatccgtttcatgaaacattttattacataatttatgggtaagcggctgtagaaacgccgttactttcatacatatcacataggagaaaaagaagatcagaggattcatcacctctgtcttcataagcaccagcaatataaaaatcagtatcacataacgcaggatatatccgcggaagatcatcttctgtgcagtcttctccggctgatccagcgcccggtccagggaacggtacatatgatatgttgctgcaagcgcaagcaaggcaccgagccacaggctccctgcatacatcattttatccttcacgataaaggctccgatgatctgcgccagcactcccagaaacaggatccctaagaccatctccaaaacggttctatttatcttttttagtgtgtttctcattgctgtcatcataaattgtcctggccatacggtatacattctgccctccggccactgctcccatacagaaaagcaggatcatccagaagttcgttccgaaatgtttgtccatccagacacccaccgccgacatcaggcagatcggcaccagcatgttgataccgaattgcatgatcagcgcaatcgaacggaatacggttctgtcatagggtttcttttttcttgacactgctttctctccgtgttgatttctgctctaagcatatatttttgtacatttttaaatatattttgtccccgcaagacatacctatagtcattataacgaaatctgaacactctgtccagtaaaatccccttgctgaaatcgtaaaaaaaatataaattccacctaaaaaaaagattgacttggatactttctcggaagtactatttgagtaactattttacagaaattatgaatgatcacagaaagagggattgccgcaatgcagaccactgccaatgatgaaattaagatccggaccgccacaccggaagatgccgaagccctggctgccatttacgctccctatgtggagaacacctcgatcacttttgaatacacggttccttccgtgaaggaattcgccgaacgcatccggcataccctcgcccgttacccttatctggtggccgagaaaagcggtattcccataggttatgcttacgcttccgccttcaaaggacgtgctgcttacaactggtctgtggaaacctccatttatatcagtcaggatgttcgaagcagtggtgttggcagccttctttatcagaagctggaggaatatctgacagcacaacatatctgcaatgtatgtgcctgcattacttatccgaatccgcccagtattgcttttcatgagaagcacggttacaagaccgttgctcattttcatgcttccggcttcaagcagggggaatggcatgacatgatctggatggagaagacattgtgtcttcacaccgtgccgccactgccttttattcctttcccggaactttgaacgctatcaaattgatacaaaggagaaatgctatgaacaacgaacttcagatctaccggaaacgcctgatcccggaagaatgtattttgttaaaagatgatattatcgtagaacagaacgatgattatattttgacaaaatggaaaacgctgaatcccaagactactttttcccatggctgttcctgctattatctgaaggaagggttcaagatcagcaagttctaccgtcatgacgggtctctgttgtactggtactgcgatattgtagaatacacccgccgtccggaggacaatgccctgatcgttaccgatctgctggctgacattatcctctatcccgacggaagaatgcatgtcgttgacctggacgagctggcagaggcactggaaaaaggtctgatcacgcaggcacagatgactgcctgcctgcgccagttaaataacctgatcacgatcatctatcgtgacaaattcgacagactgcagagtcctttggaaaaaagcggactgtaattactgaactattcagagtaacgcattcgcaaaaccgcacttgcagtgcttactttttgctcatgtgtttactttactctgaataattcagcaaatctccgatgcaatgtcccagcagcgtcagcagggtgatgtcttcatccgaccacttacggttacgattgaacacttcaaaattgaccattgtataaggaattccttcttttctggacaggcactgaagagcagccccaacctcctgctcctgtgtcacagcataggctgccgggttctgggaacgaagttttatcatattggattctacaaaaataccatcatcaccaaacagtgccagatacccttcatcttcaaacccgggacgaccatccggagcctccaccacataattaccgtttctgcagacaaggttactacctctgtccgaaaaaatagtaataccatccagatcaaacagactgcggatctgttgcaggcgctcttcatttttcacaatagcgttcacgcccgatacacataattttgtgatcatatctgtgatagcttcccgttttttctccttggataccgcataggccatagccatgttctgcatatcgtcggtctccagctttccatgcagacgctcttcatatataatgtgtcggttcttgcctttttccttggcaagatacagagctttatccgccttgcgcatcagatactcatactctgttccgtccaccgggtattccgacacaccgatagaagctgtcacatggatcttcggatcgaatgccagtctgagttccttcgcaatggtcttaagcagggtcttcagctgttccctggtctcaaccttctctaacagaatcacatactcgtctccaccgaatctgccgatgacacctctctgtcctaccagctcctgcatgatctctgccactccacggatcaccttatctccgaagatatgtccataggtgtcgttaatatgtttgaactcgtcaacatcaatgatcaccagccagcggacccgaccgtccttccgattcagctgttcgatggtatattccgtccatgcccgcttattcagcagacctgttccggcatccctggctgccggagtcagatagtaggcttcctgctcacggtttttgtccgaatctatgataccggccagcatgttccggtttttcggaatccgggaggctctcaccgtccacattctctcgtcttcatcctgaccgttgaatttcatttcaaaggaatctttgccattacgcaaatgggcacaaaacgcccgcagatgttcttccatttcggcaatgttactgtctgtatgtgcgttctccaccatccggatcagatccttcaacgatccctcaaactgattcattgcccgttcattgacatatttatacactgtgatatgatcgctgtcgatcagatattcaaagtaataaacatcttccaatgtcataaaatgacgatactttaaaatgctctgttccagctgtaccgttctattctccagatcatgcagatccgatagtgtgatctgatacaaaggaattccgtcctctgtctgttcactctgttccatacgcagatacacattccgggtactatctttgagattgctgagaactgtcattaattccagtggagcgagcaattccgccgcaacagcctctttcaacaattcaccatcctccggcagcaccagttcactcaccgggcgaaaagaattttcctcgataaattcatagtaatattccgatgccttggctactgtcagatccttcctcacatagatcttccaattcataattctgttggaatacccttctcgttctacgatgttgattttcatagattatcactttcaccttagtaaaatatatggccaccgatactgatgccggtcagtccttccaccggggtacggaaatacacgcaattgcctacattcgtcactccggacattgcctcatccgccgcctgatagcaacggctcgtggccttgttcgcagccagagccagttccaaccgtccactggctaccggtgagaactgtttgttctgatagatcacacccaccaccgtgttgggatagaccgaacttctgacacgattgatcacaacgctggctaccgccagttgaccgtcatagggttcgcctcccgcttcacagtagatcagattggctaacagatatctgtctccctcttcgaaagagatatcggaaatatcccgccaggtggcatttgccgctttctgggacatagcgatctcttcggcaagctttttcctgagggtttccagattatcctcttttttcttgatctccgcttcgtatgccagggctctctgttccgcttcggagatgtctccggcatatttggcgatattgttggatgtctggctgatcagaccggataccttgcttttctcggcttccgcttctaatttcagattatccagctctgccttctctgtctgaagccttgcctcttcctcttcgatcagctgacggttttcttcgaattccttcagctttttctggtcataggcagcgatccgttcaaaaaagtccgcagcattcaacacctggtcaaggctctgcgcgttcagaagagcattgatgtaactggtctcgttccgttcgtacatatcccg

SEQ ID NO: 11271 - DNA, 60827 bp, Unknown
  gut microbiota DNA sequence
ctcatcacttttcgtagaaaattcacatccggagaccttacatcgagacatgtgtatcgcatgctccgggagttcgtggatttttccaatatatttcactaactctcaatttagtactcttccgcaatatcaatctcttcctgctcggcagctgtcgtgtctgcggaatagggggttctgtggaggtatgccagccagtaaccgcatccgacaattccggcaccgcctacgatgttacccagagtgataggcaagagggcttttacaaggaaattgaaccaggtcaggctctctgcggtaattccgtaggcctgtgctgtcagcagaccgcatacaccgaaatacatatctgcaatactgtgctcaaaaccgcataacacaaacagcatgacaggccaataactggtcagaagcttgccggagacacgcttcgccgcaaaggacatccataccgcaatacacaccagaatattgcacagaatgcctcgcacgaaagcctctcccacgcttaaattcgtccgggctgcagcagcattgactattgcctgtgcaagctgctctccgaagagatccggtgtccgtcccactactaccaacaccgctacaaacgcagctccgataaagttgccgatatagacaaacagccagtttttcaacattttccatacggtaactttcttctccaataccgccagtatgatcaggttattaccggtgaaaagttcactgcccgctacaagtaccatagccatacctgccgggaataccgcagcgcccaccaactttgccaccgatgcaatgccgatagtgctggatgccgtcgtggatgcgatccccgcaaagccgatgaacatgccggcgaagaatcccaataaaatcgtcttgaagattgacagatttactttatggattccgacttctatatagtttcttgcaatttccaatggtgaatgcataaatagagtcctcctgattttccgaagccgacccgtaaatacaagattggctttctataatttctgcataaatttctgcatatttaggaacagttacatcttgccatatttcaattacacttgcaagcaaatatgaaaatatcagaaaagagtataccctctcttgattttcgcacgttaatttgctatagtggttgaagaacaaacagacatcttccgactttgtcttactatttgtttacagtaaataacagaatcgaggaaaactataatgagtactcttacctttggttttatcggtctgggtctgatcggtggctccatcgcccgggcgattcgtcagaatctcccccagtctcagatcattgcatacgatattaacgcagacaccttaagtgaagcttcccagtgcggcgtagccaatacaatcaccacgaaaatcgatgcttctttttccacgtgcgattatctattcctctgtgctccggtgcagaaaaatgacgaaaacctctccgctgtaaaaaaaattctctcaccgaagaccctgctcaccgatgtgggaagtgtcaagagtgagatccatacggagatcaaaaaagccggtctggaaagacagtttatcggcggtcatcccatggcgggaagtgaccgggtgggctttattaattccaaagccgtccttttggagaatgcctactacattctcacccccacagcttccgttccggagaataaggtcacggattataagaatctggtgcagcagttaggagccattcccctgatcctggatccggcacagcatgattacgtcactgctgcagtcagtcacctgccccatatcattgcagcctcactggtaaatctggtgcgggacaaagattctgcagacgggctgatgaaaatgatcgctgccggaggcttcaaggatatcaccagaatcgcctcctcctccgctacggtatggcagcagatctgtctgacgaatacagaaaatatttcgacacttttatcttcctacattgcttccctccagggaatccaacaggaactaaacgccaaacgcggtgatgatctgtacgagctgttcgacagtgccagaatctaccgtgattctttcatcaataccgccagcggtcccctgaagagttcctatgccattaccatcgacattgccgacgaacccggtgaaattgccgccgtggctacgattcttgccctgaaaaatatcagtatcaagaacatcggcatcgtccataacagagagtacgagggcggcgtgctgcgcatcgaattctatcaggaagaagccatcgaaagatccacgaagattcttagtgaaaagggctacagtctgcacaacaagaactagaaacccgacttctgtttccttcgccgtaccattttctccgcgcaggcacatacgagcagtccgaacgcaccaccgcaggtatccagcatcacatcggcaaaacacccatagcgtcccggaatgaagagctggtggaattcatccgctccggcggagacaaacacccagcatacgatcaaaagatacagtttccatcctctctccttccagggtctccacacgccgtacaataatactcccatgcaggcatactcagaaaaatgggccagcttacggatgggatgttcaaaataagccgccatactgtcgataacattctgcgtccagtgtttcccggagatagcattcagaagctctgcacatttttccgagatcatagcactcagtgagccggattcctcaccattctgaccggaaaatgcaaaaatgagcagatataacaatacaagtaaaatagcagccattacactgactgccattttacatctcttactacttctcatcattgattgtctgatacacgcggattcttgccgcatcgctctccgacattccgatgaagacagctccatacgtataagaatctcccttcatttcgatccggacgatctgtaagaacgcatgcagtacttcctgcgtccaaatcctcagcttcgattcatacactgcaccgatacttaacacttccttgcacaaaaatcccactccgttgggagatacatctatgatgtcaatgctgacttcctgcatgtctccctggtccaggcgttttaccatcagggtggaactcatttctgtacgcttgcttcgtcttctttcttccattatttttctccttttaagtcagcgatgaacatggcgtctccaaagctgaaaaatctgtattcttcacggattgcttcttcgtaggcatgcaggatatgttctcttcccgcaagtgccgataccagcattaccagagtagactccggcaaatggaaattcgtgatcagtgcatccagcaccttgaaacgatatccgggataaatgaatatctcggtattgtcacagccgggctgtaccatgccctgctcgtccgcagcactctccacggtacggcagctggtggtgcccacgcagatcacacgaccaccatttctcttcgtctcattgatcgtgttcgccgcttcctccgtcacctgataatactcggaatgcatatgatgctccagcacattttcttccttcaccggtcggaaagtccctaatcccacatgtagggtcacataagcgatcttaatgcccttgtccgcgatctgctgcaaaagttcccgggtaaaatggagacccgctgtaggcgctgccgcagagccctcatattttgcataaacggtctgataacggttcttatccttcagtttatgagtgatataaggaggcaggggcatctcgcctaacttgtccaatacctcttcaaaaatgccctcatattcaaaacggatcaaacgattgccttcttctacagtctcaagcacttccgcctttaacagtccatctccaaaggtcaggcgctgaccgggcttacattttttgccgggctttaccagtgtctcccagacatctgcttcttttctttttagcaaaagaacttccacatgtccgccagtaccttcccgctctcctaaaagtctcgccggaataaccttggtgttgtttaacaccagacagtctccgggatgcagatagtcgataatatcccggaaaatatgatgagagagttctcccgtatttttatcgagcaccagaagcctggaggaagaacgatcctccagcggatcctgcgcgatcagttcctggggcagatcaaagtaaaagtctgattttttcagttcggtcgtctctgccattacaggctcgctccttccacaaatgctttatatccgcgatatgtttcatatacgtcggccttactggtagcttcccagggtgcatgcatgttcagcactgccacaccgctgtcgataacgttcatgccgtacaatgccagaatatatgcgatggttccaccgccgcccaaatcgaccttaccaagctctgcagtctggaagttcacgtctgccttgtcgaagatatggcgcagatgtgccagatactccgcattggcatcgttggaaccggacttgcctctggctccggtgaatttattgatgaccataccaccgcctaaatatgccacgttctttttgtcgaagctggacgcataggtaggatcaaaagcactgctgacatcggaagacagcatacagctgtgtgccaggcatcttctcacatgcagttcactgtattcgcctgtcagattcatgacctctgctacggcattttcgaagaaatgggactgcatgccagtagcaccaacagaaccgatttcctccttatccaccaggatacagcacatggtacggtcggtcacatcactgtctaacattgcctgcatggaagtatatgcacagactctgtcatcctgtccgtaagccagtatcatgctgcggtcaaaacccgcttctcttgccttgccagcgggaacgatctctaactctgcggagacgaaatcttcttcgtgaatgtcataggtctctttcaggatatccagaacacctgcctttaccgcttcttttccggcttctttctcatcttttttcttatcctttttatcaatcagcagaggcttgttgcctacgataatatccagagcttcgccctcgatgacctttgctgcctttttctccagctgctcctgtgccagatggatcaacagatcggatacaaagaatacaggatcatcctcgttctcgccgatattgatctctacacaggtaccgtcttttttcacgatcacaccatggattgccaggggaatagtcacccactggtacttcttcacaccaccgtaataatgggtgtccagataagcgaatccgccatcctcatacaggggattctgctttacatccagtctgggactgtcgatatgggctccgaggatgttcattccatctgtcatgggcttacggccgatctggaacatggcgatggatttgttcatccatacgctgtataccttatctccggttttaagagcagtgccctctttgatcaggctctccagttcacggtaaccggacttctcaatggtattgacaatggtgtcaatgcactctctctcggtcttaccgttgtctaagaaatcacgatactgtgcgtttattttctccagctcttttaactgtttggaagaataggtctcccaggtgtttttcttttccatatttatcctcatttccgcatccgtcttccggatactcttttactataactacaacaggagaggttcctcgccctctccgtatcagtgtactacatttgcgtccgcagttcaattcctgtctgtcagattttcatccttctccttaggatccctgtcgatctccgtataatgttttttttctgcgctggatcttcttgatctcccggatgcgtctacggttctctctcgccagttcgctcttactgctggcatgatttaccagcaccctgttcaccggacggaaataccggttcagataagcaccgatcagaatgatatacatacagaaatacatccacagcataatgatcacaataatggtcagacttccgtaaatactatacccatttccataggacacatacatggaaaatccccaggaaaatacactccatactaccgcagcaaagcaggctcccggaacctgttccgtgaatttcagctttgtgtccgggatatatgtataaatcagtccaaacaaaagaatcagcaccgcccatacgaacagaaagcggaaattcatcaggagactcacaaacatctgtagctgcggaatcctatgtaatgcaatatccaccagctgattgccaaataccataaaaaacagcgacaagatcaacactacaagcatgatcaacgtataaaagcttgcaataaaacggatcacgaagtaattacgcttctcgtccacaccattgaccgcatttaatccccgcatcagtgctatgacacccttcgccgccgaccagaccatggcgatcagagccacaggcaggattccaaccgaactctcatacacatccacgaccagactctccaccatggcatccgcaatatccggcgtcacatctgtcagcgcagtgatcagattctgctccgtcaccggggtataaggaatcaccgcgcagactaccatcagcatcggaatcaccgacaaaaacaggaaaaatgctgtactcgatgcataagcgctgatattctgttttttcatctggctggaaaaatcccgccaaatgctgattattgtcctgagcatatctcgcatccttcatagaaaaagttaaggatctgttccgcgccaagcccctgcagtgccatatttttagcaccgttctggctcattcccacgccatggccaaatccaccgccgataatgttatatcctatcatatttttcttatcatggctaggttcaatcacaaaaaatgcactgggcaggaggctgggcatgcttacttcactgccgtcctgtctgaccaccctggtcacgccatcacatagtactgctctgatattatattccgagatgatcttgtaggttcctttatctgtggcaatgaccaattcatctgccacaccgccgggtccccgttttacaatggtgatatccgtaaccttagaaaagttttttatgctttgactgctgtagtcaccatccttcagagtcaagatcagcttcccgttggcttcataacgattcttcagggtctcaagtatccggtccacatcgatctcttttaccgtatatgtccaacggtaccacccttcctgcgcttcataatcctctgcatgagtttgggtaataaaatcccgaaaggactcttcttcgctcagctcctctgcagttgtttccgcggtaatctccgtactgcctgcagctaccgccccgtcatccgtctgcaccggattctccgggcttggcctcagccggctgcttttcagataatcaagcatctgcgcctccgcagttttccatatgcttgctgtagttcccacaccgcaggaggtcgaataataataggtgttcgccacagtgccttcgtctgtcaaaatcatttgtccgtaggtttcctttaccgccgtagtggtgctgtctgcctctgtgatgttgttatagacctgataggaagtgctgtcatccacatgggctccataccgggggtatcctgctctgagcatatgtccgtaggcataggttctggcgcagattgcctgcgctttcagagcttctaacgggtaagatgacggcatctcactgggcaccacactgaagagatattcctccagcggcagctcattcaccacggcgatgccctctgctgttctgagcagttcgatatgacctctgtaggaaggtattccctggcttctgtttacactaagcagctgaattctgcccgtcaataccgcaggaactatactgatacgctcccccacaaaataatcactgtccatgtctatggtaatcttgtctcctttggggaacaattcttcctgtatattttccccacttccgtattgcagcaggaaatcgctgtctgccgtcagtgttacttctgtatgcagaatatccgcataatccgaagccttaatcaacacccggatgtcttccatattcgcctctctggctaagagaataccgcagatcgcaccattctcctggataaaatccgcattggcatagccaaaggtcagatccgcgaacgtgcacatggtaagctcccgatacaaacgatatcctttgtaatcctctgccagaggaattctgccccggccttcgatctcaatgccgttttcattcgctgacagcactcttcctgtaaacttatccgtcttcagagcaaccgcactcaccagttcatctgtaagttctacatccgccagctgttcccgcatctgctccggtgccggaacagaatcggaaccttctgtttctgcctccaggaaaaaggtctccttctctccgtcacagaaaatagtgatccggtcagcttccgcatccgtgatccatacatttttaagtttctgtactaccgggatatgctgcggcgaagtctccgacatctcgggggtatccgtgccctcccatccacagctatgtaacaaatttaggaaaagcaaaaaaagaagaaatgccacagctaaaatgcacaggtatttcttcagctgtattctctgtcctttcggaagtttataataattctcaagtagtctgtttttcttaaaatttttcttcaaatgatccccgcctgtttttatattttgactttaaaagagcagccctaacggactgccctctcttttgtattgttatccccaaaatgccgcctcttaccttttgactcctagcaatgctaggtgggtaaccgcaaccaaccttttgccttcccttccaatcctccttgcggagtgagggcttgacagccacttggcaatataggaatcccgtttaaagtaaatgtaggttcaaaactggtaagagttatcgcacatctcaggttaagtatattatatctactctgtttctattttacaactgtaatttttaccaaaaaaggctgcctccaaagagacagccttcctatttgcatttgtctgtaagtaagattacagctgagggccagcagcaaccagagccttacctgcatcatttccttcatatttagcgaagttcttgatgaatctctgagccagatcctttgccttctcttcccactgggaaggatcagcgtaggtatctctgggatccagaattccggtatcaacaccggtcaactcggtaggaacctcaaaatcgaagtaaggaatcttcttggtaggagcggtcttgatcgcaccattcagaatagcatcaatgataccacgtgtatccttaatggagatacgcttgccggttccgttccatccggtatttacaaggtatgccttagcaccgttcttctccatcttcttaaccagctcttctgcatacttggtaggatgcagctccaggaatgcctggccgaagcaagcagagaaggtaggggtaggctcggtaataccacgctcggtaccagctaacttagctgtgaaaccggacaggaagtagtactgggtctgctccggagtcagaatagatacgggaggcagtacgccgaatgcatcagcagacaggaagattacgttcttagctgcgggtgcggaagaaataggacgtacaatattcttaatatggttgataggataagatacacgagtattctcggtaacgctcttatcgttgaaatcaatcttgccgtcagcatcaacggttacgttctcaagcagagcatctctcttgattgcgttgtagatgtcgggctcggaatccttgtccaggttgataaccttagcgtagcatccaccttcaaagttgaatacgccgttgtcatcccaaccgtgctcgtcatcaccgatcagcagacgcttaggatcggtagacagagtggtcttaccggttccggacagaccaaagaagatagcggtgttctcaccgttcatatcggtgtttgcggagcagtgcatggaagcgatgcccttcagaggcaggtagtagttcatcatggagaacatacccttcttcatctctccgccgtaccatgtattcacaataacctgctcacggctggtaatattgaaagctacacaagtctcggaattcagaccaagctccttgtaattctcaaccttagccttggatgcgttgtaaactacgaaatcaggctcgaagttcttcagctcttcctcggtgggtttgatgaacatgttggttacgaaatgagcctgccaagctacctcaacgatgaaacggatagccatgcgagtgtccttgttagcgccgcagaatgcatctacaacgaacagtctcttgttggacagctccttcttagcgatatcctttacagcagcccatgtttcctgagacatacgatggttgtcgttcttgtactcatcggaagtccaccatacagtgttcctggagttctcatcttcaacaatgaacttatctttgggagaacgtcctgtatatataccggtcataacgtttaccgcaccgagttcggtctcctgacctttctcgtagccttccagttcaggcttcatctcttctttgaataattcttcataagaaggattgtgaacgatttctgtggttccggtgatgccgtacttgcttaaattaatctctgccatcttacattaacctctttcctttattctttatatgtgtctttatcttctgccacatcgtgtgtattatctcaaaacccagtaaaaaagtcaagaaaccgttaaaaattttataccaattttatattctctttacttcactccggtttctgccgccagccattctttttcttcctcattcagataaggagaaatcttctcgtagacggtcttctgatactcgtgcagatattttatctgggtatcgttcaaatatttttcgtcaatggcttctctatcgacaggcacccaggtcagagtctcgaaatgcatgaactgaccgtactcgttcttcacatcgtttttcgccagcatcacgttctcgatacgaatgccgtggctgccctggatgtagataccaggctcattggtgatgtccatgccgtcttcgaacacggcttccaccatacctccagtgaatctccaacgcatgttctggggaccttcgtgtacgttcagaatgtatcccacaccatgcccggtgccgcactggtaatcaatatccatatcccagataggctgtcttgccagaatatccagattccgtccggtacagccgtagagccagtgggcgtgggtcagctgcatcactgcagcagccaccatggtataatgcttttttatctcatcggagacaggacctaatgcgatggttctggttacatcagtggtaccgccaagatactgtccgccggaatctaccaaaagcattccttccggctccagagttgcacagttctccggtgttgcctcgtaatgcatcatggctgcattggacttatagcctgcgatcgtcgggaaggacagatctaaaaattccggaatctctcttctcttctgttccagatagtctgcagcagtcacttcagtgatcttctcttttcctacatgggttttcagccagtatatgaatttggttaccgcaacgctgtccttcaggaaaatttcctgcattctcgcctgctccaccggatttttgatggctttcaacagctcggtgggattcttaccctctatcagatgctggttcttctgcagtgtcttatataaagtataactgcaatatctgttatccacgaggatcgcattgcctgcgggaagtgatttcagaaagtctacgacagtgtcgtattccttcacatcgatgtgatgtgctgcaaggtattctgacacctgcgtatccagtgccttctgctggataaacaatgtagcggtatcctccgtgatataggcataagacattgccaccggattgcattccacatcgcagccgcggatattgaagagccacatcagatcgtccagtttggtcaaaagcagtgcattggcaccgtcctttgtcattttttctctggtctctgtgagtttctcttccacgctcttgcctgcaattttctcgtccagtaccgttacttttccggcagggaaatccggtctgtccgtccagatactgtctgccagatctttctcataagcgatacagatctgcgcctttgccagtaccttttcgtattttttaccgtccatggctgcaatgactctgccgtcgaagcctaaggtctgaccctgctgtatgttttgctccagaaactcttcgatggtaggaacaccttcctgcaacatgcggaacagttctacgcctgttccttccaattctgcctctgcctgaatgaaatatctgccgtcggtccacagtccggcgccgtccttccatactaacagtgtaccgttggaaccggtaaagttactgaaatattctcttactttaaaatagtcatttacgtattcggagttatgaaaatccgctgtgggcatcatatagaaatcaatgccttcctcctgcatctttgctctgagaagagtaagtctgtcctgaattactttgttttccattgttttgttcctttcaaaaaacttaatagccttcggtaagttcgcccttacagaggcctacggctctggaggtaccgatacggtcacagccaagctctaagaacatctcgagatcttccatgctggacactccgcctgccgccttgatctttaccttgggaccaatgtattttttgaacagttctacatcttctttcgtggcaccaccggttccgaatcctgtagaagtcttaatgaagtccgcacctgcatccgttactgccttacacatggcgatcttctcttcctccgtcagatagcaggtctcgatgataaccttgaggatgtgatctccacactcttttttcagtgttcggatctcttcttccactttgtcaaacagaccgttcttcacatcactgatattgactaccatatcgatctcgttacaaccatcttccagtgccttacgtacttctgccacctttgcttctgtcacgctgtagcctaacgggaatcccactacggtacagatattgatcttctccccgtaggcgtcatggattctcttaatataacagggaggcacacatacactggcggtatgatattggattgcctcatcacacaacttctgaatatcctcccaggtagcgaatgccttcagttgcgtatgatccaccttaccgagcatttcttttgctgtcatattattctccttttctatgtatctatttcatttaatgattttgttactacatactaaccgcgattattataacaaagaacccatttaatataaagactaaagttttattttaacttgaaagttacgagccatgcaaaaatagaacggaatacctcggtgggagcttgctcacacaagaggttgtttcgttctatttttatacggcgacagccgtcaatgaaataaatgtggagcgccctttgcgacacatttatgaattgagtgcatggctcgtaacgtagggttgccataaaatccacgaactcccggaacatgcgatacacatgtctcgatgtaaggtctccggatgtgaattttctacgaaaagtgatgagtggttctcaacatgacggggccgcctacagtcgacatccatgtcgacaatcggctgacgcggacatcgtgtccgctttccccctgtctttcagcacttttctagaaaatatcaacatcctccgacaaacatcttcgacatggcactgcatattacgggagttctgcgttttgaaaagctttcaaaaaaccagtagccatctttctattgctttggtggaaatcgtatcaaaatagcaaaatccgtacaaaaaaacttctaaatcaaacatttttgtacggattttattattttttccatttcagcgaaaataacctcttatataagcctaaaatctcctgtttttgtattttttcagcccaaaatagcgattttaatacaaaaaagcttgcctcttcacacacagtataaagtcaaaaacaaaagcagcgacttgtgagcaagcacccaatcacggttcttattttgcctatgcgcggctattctttcgtaactctcaagttaacgtaaaaacacgttgccgaaattggcaacgtgtcctaaatttttacgctagcatcatgcggtcattggcgaattctccgccgctgacttcttcaaacttagcaagcagatcctttacctgaagattcttcttctcttctccggccacatcgtagatgactttgccttcgtgcatcatgatcagacggttgccgtgtacgatggcatctttcatattatgagttaccatcatggcagtcagctgattctcagcgatgatcttgtcactgatctccagtacttttgctgctgtcttgggatccaatgctgcagtatgttcatctaacaacagaagcttcggctgctttaaggccgccatcaaaagtgtgatagcctgacgctgaccaccggacagaagacctaccttgctggtcatacgatcctccagccccagtccaagcgtctgtaacttttcacggaacagctctctgtcctctctggagacgccccagcgaagagttctcttctcgccgcgtcttaaggcaattgccatgttctcttcgatatccatagtggcggcggttcccgtcatgggatcctggaatactcttcccaggtactttgctctcttatgctccggcaggcccgtaatatccgtgccgtcgataataatcttgccggaatcgatgggccatacaccggcaatggcattcagcgtggtggatttaccggcgccgttacctccgatgatggtcacgaaatccccgggatttaaatttaaatttaccccatttaatgccaccttttcattgatggttcctctgttaaatactttatgtatatcctgtatctccaatgcgtaagccattattttgacgctcctttccgaagtgttctcttctccttcaagtaaggaattgccaggaaaatggcaactacgatagcggagaacaatttcatatcctctgaaggcatcttcagccacagaacgaactgatataccatgtagtagatcactgcacccagaattacggatgccagagtaaatgcaaaagcaagttttctcttgctggcgaacttaccgaacagtacctcaccaataataacagctgccagaccgatgacaatggctccacgtcccatattgacgtccgacgctccctggaactgtccgtacagcgcaccacacagacctaccagaccgttggagatcatcagtgccagcaccttgataaagttggtattgatgccctgtgctctcgccatattgctgttacagcccgtagcacggatagcatgtccctgttctgttccaaaataccagtacatcacagcgatcagtgccagtaaaaatacgatcattcccaggaaaaagagaagtctgctcaccgaaccgtccgtcacataacgcaaagataccaccagcggataattatctacgctgaccggctggtttgctttgcccatgatattcagattaatggaatacagggagatctgcgtcagaatacttgccagaattccggggattcccagtgcggtgttcaacagtcccgttaccatgcctgccaatgctccggccaggaaagcaatgggcagcgtagctataggagaaactcccgcacgaatcagcataacggataccgcagcaccggttgcaatggaaccatccacggtcagatcagcaaaatccagcaggcggaacgtaatatacactcccagtgccatgactccccagatcattccctgcgctattgatcccggcattgccctgaacagggaaaggggattcagtgacataaagtaagacatttctttttcctcctaaaacttccgatagggataccgcttatctggcgctatccctatcgaagtatattttgtttccgtacttaattgactgaatacttactgaattgctacataatcatcgggaacagtgatgccaagttcctcacagatcttcgcattatatttcttggtaacgttgggagcgtagcgaacatccatggtagtgatgtctgcgccctcagccaggatctcgtatgccatctcaccggtagcatatcccagatcatagtaactgatggataaggtagctacgccacaaccgttgcagataccctcttcacctgcgatgacaggaactttagcgggagctactacgttgtatacggtctcggttacagatgccagcgtgttgtcggtaggaatatacagaacatcgcactctcctgccgctgcagtagttacagactgtacttcattggtatcagcgattgcatactctttataagcaataccgtccttgtccagagcagcctcaaacagctggatctgatacagtgagtttgcttctgcagaacaatataacagaccaacctgctttacgtccgggaacagttcctttaacatagcttcctgctcttcaatgggagccagatcggaagtaccggaaatatttctgccggtagcaccggaccagtcagagatctctaacgcggtagcatagtcggttacggaagtacctaagatagggatcgaggtcgtagctgctgctgcactctgtaaaggagacgtagcatttgcaaggatcagatccacaccatcagatacaaaaccattacagatggtagctgcggtggtctgctcaccctgtgcattctgcagatcgaattttacattatcaccaagcttgtcttttaatgcatcctggaatccctgggtagctgcatccagagcctcatgctctaccagctggcagataccgatgttatataccttgccgtctgtggaagctgctgcttcagtctgtgctgcgctacctgctgtggtagaagcagttccgttatcggtgctgccacagcctgtcagaacagtcgctgccattactgcggtaagtacaacagataataatttctttttcataataaatgccctcttttctgccgatctttcgatccgcttactgtaatgcatagacgctttaatccgtcaaagcgttgcactgataaatatcataaaccataaaagggcattcgtcaaactgatttcatcgatgcattagataatattgatcaattttttaaatattagattttttcacaacctcaccgggtctcttgaagatatgtccggcaggaatcacacctctgacgcaagaggtaggatacacattggaattacgtccgatgacagttcccgggttcagcacgctgttgcagcctacttccacatggtcacctaacatggctcccattttcttcagtccagtctcgatcttttcctcgccgttcttcacaacaaccagtgtcttatcgctttttacattagaagtaatagaaccggctcccatatgagacttaaagcccagcacgctgtctcccacataattataatgtggcacctgtactttattgaacaggaccacgttcttcagttcggtggaattgccgactaccgcaccctttcccacaatggcattgccacggacaaatgcgcagtgacggatctccgcttcctcatcaatgatcagcggtccgttcaggcaggcagtaggagcaacttttgcgtttttagccacccagatatcctcgcctcttttttcatagatttcctccggcagtctcttgcccagttccaaaataaaatcgtggatccggggaagcacctcccagggatactctgcctcggtgaacagttctgccgcaatggtctctgtcagatcatacaaattttcaatcgtaatattttccatgatagtttctcctcttctttattctttatttttcgcattggattgcttttgtttcttctggtaaaactcttccgtagcctggaactgtctccagagcactccctgattgttcagtccacgcacggcaacggttctcctgcccacgaaatccgtaagcttccccatgtaatcatccggtgtgatgacaccgtctgccaccatggtaagtcctttttcccagctggctgtcaatgccggattcaaaagcggtcttatggaatccgataccacatcgtagatcatctctcccatttgggtaggcgtcagtacctgggtctttttattcagtgccagatactcgatgttcaccagtttcttcaggatctccgctctcgtagcgctggtgccgataccacttcccttgatctgtgcccgcagttcctcatcttctatgaattgtcccgcattttccatggtcaggatgatgctgcctgaggtatatcgcttgggtggagaagtctcgccttctttgatctcgtaggtatctacggataaggtatctccttttttcagatgtgtcagcagattggtaagctctgcatcacatttttcatcggcactttcattctcgttctctttgtcctccttcggggccgtattctcctttttgaaggagaaatcagtcaccttcagatatccttcctgtatcaacaccttgaagctggcaaaaaagctttcttcctttacttgcaatgtaagtgagaacttctgatatactgccggcggatagaaaatacttaaaaaccgacgtacaatgacctcgtatacttttgccgcagtaggggccagccccgccagattgttcaggccctgtccggtagggataatggcatagtgatccgtgatctgcttatcgttcacataccgggtctttgctatatttttataggtgccctgctctaatacttctttggcgaaaggtgctgccagggcataattacgaagtcctccgatatttttatggatttcctttgccaccgccgtagacagaactctggcatccgttctggggtaagtggtcatctttttttcatataattcctgaacgatcctaagcgtctcgtccggactgatcttaaagtatttggaacagtcattctgcagctccgccagattatataaaagcggcgcatttttgttctcttttttcttctcgatgccgatgacggtcgccggtcccgcaggttccgcagaaagttccccgatcagtcgctcggcatcctcttttttcttaaaaccgttctccttatacaatacaggagaattatagtattttgaaccctccacggctctccactctgcggtaaatggcttctcctgcagcttaaaattgccgatcacccggtaaaaaggagtcttggtaaacgaccggatttcccgttctctgttcacgatcatgcccaggacgcaggtcatgacacgccccacagagatcaccgcacggtccctcttcaggtaatcctttacagtcttgccgtatttcaaagtcagtgccctggagaagttgattcccatcaggtaatcctccttggcacgcagataagcagcattccccagattatcatacgctgagagatccttggcttccctgatcccacgtaagatctcctcctccgtctgggaatcgatccatacacgcttccgctctttgccctgcacgcccgccatctgctccacgagccgatagatatattctccctcccgcccggagtcagtgcagacatagatggtagagacatcctctctgtttagcagggaactcacgatggtatattgtttcctggcattttcaatgacttcgtatttgaattccgccgggagaaaaggaagtgtctcgaagctccatctcttaaatttctcatcgtacacctccggatagctcatggtcaccagatgtcccacacaccaggtaacaatggcttcttccgactccagatatccgtctttggaacgcatattatattttaaagcgttggcaaattcccttgccacgctgggtttctctgcaataaataattttttacccacgtattaccgtcttcctgtcataaatcacacacccacgctgcgaaactgtagctttccggacactttctccgccagtgcattttcataaccattctcacaaaatattattatctcatccgtttccatccggatgcttttcaacgctgtctgcagtgcgtcataatcttccgaagtataacataccgtaccggaataatccactatgatcttttttcctgcagtatctttgcataaaaaatatgttctcccctgtgccgccttctgcagttccaccgtatggaaatctgcctgcagtatctcctgacagattctccggtatgcggatctcacaaagctactgtaatcctcacggatatatgtttcataaaaagctctgccgttatctcttctccaggcagtctggtgaggaaacagaaaacggaaataaaaccgtataaaagaattgctgatctcataggttccgggcagtactttttccaccagctccagttccatcagattcttcagatagacactgatcttcgcccgggagaatccggtacgggcatacatagcattcagcttgccgttcttctcatctgctatggtggcaaggatggtattgtagacagcagtctcccgcagttcttccgacagccatttgatcatcagttccggaagaaaactgtttttttctaaaaaaagcgtcgtcagattctcctccacagaagctgacagttccaacagtttccataatcccggcattccgcctaacaccgcatagagttctatgctcttctgaagcgtcccacctgggaaaatccggcgcattactgaaaaaggcagctctttgaccttcagaaaaccactgacagaaaatgccaggttccctattttagagatcatactgttctccacccatccggatgcataggtcgtaagaattacaagaagagaaacctccctgtgttccttcagataacggatcaattcctgtaaaaaaaaggtatccccctttagcagataatgaaaattttctatgatcagaacttttttgcgatcacttttttctccggatacacactgtaatacttcttcccaggaagggtaccgtgaaatctctttcccctgttctctaagctcctgtccccactgatagcacatttccctggaagagcagttgggagcggtatatcgtatggtctgttttttttccgcaaaagcggttaagagagccgtcttaccaacgcctctctgtccatataccaccagtatctgactccccggtctcttataatgattttccaaaaaagctgtttcctgttcccttccagttaacatggcagcctcattctttctgcaacaactgatcagtatatcttctgtaatagctgttcgatctcctcctgggacagcggttttccgaacagatatccctgaatgatatcacagccgatggcacgcagatatttatactgctgttcttcctccactccctcggcaatagattcaaatcctaaggatttcaccatactgacaatggattccgtaatgattctggtagcggaatccgtaagcagcgtatccgtaaaggatttatcgatcttcagcgtattgatcggaagcttcttcaagtaagacagggaggaaaatcccgttccgaaatcatctaaggaaatgcggatgccatattcttttaacagctgcattttctcagtcactgcccggaaatcatcgatcagtatgctctctgtgatctccagttcgatctcctccggagacacatcatatttgcggataatatgtaacagcgaatctacgaagtcttccttctggtactgcagtgcggagatattgacagacaatacaaacggaacgccgtaccggttcctccattcggaaaatgtccggatgctctgctccagtacccagttgccgatagggataatcgtgccgtttttctctgcaatcggaatgaacttcgctgggctgatcattttcccgtcgccgtccttccagcggatcagcgcttccattccgcgcagtttctgattccccgcgtagtactggggctgataatacagaataaagttatgatcaaataccgcttcttttaatttgctgtccagttccacatttttcagaaaatcattcaggatcggcgtatcgaaatactggatccggttcttgcccatggacttccctttaaacataacgatctcggcacagttgatcagttccagtgcggatgtagcagcttccggatattccgcaacgcctacgcttacagtaatattcaatacctgtccgcccaccagataaaaaggttctctggtacgcttcacgatctccttatgaatgtgttccacgcttctgtcaccgcaggaatcatagattgccatgcagtagacatcactggtcagatggcagacgatcacatcgtcactgttgaattcctttaagaaagatccgaactgctgtaccagttcgtctcctgccacgattcccagtccgtcgttgaccttacggaaatcgtcaatatcgatgaccagcacactgaccagccggttatcttctttcgcgcgccgtaggaactccgtcaggagacgtacaaaatagttccggttgtacagtcctgtaagtccgtcataatacgccatatagagaagttcttcgttctgcgtcttcagttttgtgatattctgtaccacaatgatctgatccgcaggtctgccgtcctcatagaatatcctgcaggagaactgcagccaggtcttcttccccttctgcatgcattccacagaagaagtttcctgacctcccttctccaaaaacagcatatccctaagaggcagcacatatggctcatctaccatctctaaaagcttagtaaagtcccgtctgtcccgaatctggaaatcgaaaaaatcatcccattttccaagcgtcgtgacagaatttttctcaaaagaatagtagatataagcataatccatggtatcgcacaaaaggcggtacattttctccctgtcgcttaatttctgattcattgcgcgcataagatccagctgatagtgtaactcgttcataaccccactcaccctttattttttggtgatgtaaccctgtgctttcaaaagttctgcgcaaagcaaagcgcccccagccgctccgcgtaatgtattgtgtgaaagtcctacaaacttaaagtcatatacggtatcttctctcagacggcctacactgatacccataccattctcaaaatccacatccaaagctacctgaggtctgttgtcctcctccagatactggatgaactgcttcggtgcgctgggaagtcccagtctctgaggttctccgctgaaagaagttaacttctcgatcagctgttccttagtgggcttcttacggaattttacgaatacagctgcagtatgtccgttcagtaccggaacacggatacactggcaggtgatcacgggagaagttgcaggaacgatcttgtcgccttcgatcttaccccagatacgtaaaggctccttctcactcttctcttcctcaccgccgatgtaaggaatgatattgcctaccatctcgggccagtccttaaaagtcttgccggcaccggagatagcctgataagtagtggctactacttcatagggctcgaattctttccatgcggtcagtaccggtgcatagctctgaatggagcaattgggctttacagcgataaatcctctggtggttcccaatctcttcttctgtgcttcgatgatctggaaatgctcgggattgatctcgggtactaccataggaacatcgggagtccatctgtgggcactgttattagatactacaggggtctctgtcctggcataagcttcttcgattgccttgatctcgtccttggacatatctacggcactaaatacgaagtctacctgtgcggctactttttccacttcgttgacattcatgacgatcagctttttcacagcttcaggcatgggagtcgtcatcttccatcgatcacccactgcatcctcatacgtcttgcctgcggatcgggggctggctgcgatagtcgttacctcgaaccatggatggttctctaacagagagataaatctctgtcctaccataccggttccacccaggatacctacacgtattttttcactcatttttcatttcctcctcagctctatacatttcctttttatctgaaaagacattctttcctgattttacgaaagtctgtcttccaaagactgttgatactcttctatggcatcatttttcaggtattctttatttttctcaatgacctgtttcatcattttctcacccggtgcaccgatggtcagacgcttctccacacaggtcttcagtgagatggcatcatagatatcttcgtcgaacttatcactgatggaatgcagttcctctaagcttaaagcatcaatagaagtatccttctcaatacagtacaataccagcctgccgataataccgtgggcatcccggaaaggcacacccttacctaccagataatctgcagcatcggtggcattggtgaatccgttcatggcactcttcgccatgcggtccttgcggaacttcatggtctgaatcatgcctgtgaataaagtgatgcagtctgctgcggtatccatggcatcaaatgccatctccttgtcttcctgcatgtctttattgtaagccaggggcagtcccttcatggtagtaagtaacgccatcagagcaccatagactcttccggtcttgcctcttaccagctctgcgatatccggattcttcttctggggcatgatactgcttccggtggaataagcatcatccagctctacgaactgatattcattggaattccagatgatgatctcttcgctgaaacggcttaaatgcatcatgatcgtggaaagtgcggaaaggaattcgatcaggtaatctctgtccgccacagaatcaatgctgtttaacgtcggtccttcaaagcgaagaagtctcgcggtatattcacgatccaaaggatatgtggtgcctgccagtgctccggctcccagagggcaataattcatacgcttatagatatctgtcagacgctgtctgtctctcttgaacatttcaaaataggcaccgtaatgatgcgccagggtaatgggctgtgccttctgtaaatgggtgaagcccggcatgtaggtatctaaattgttctccatggtatcaagaatggcttccaaaagctttttcagcagtccgtcgatctctgccactcttgccctggtatagagacgcatgtccagtgccacctggtcgttacggcttctgccggtgtgaagctttttcccggcatctccgatccggtcgatcagggtagcctccacgaaactgtgaatgtcttcctgggtctcatcaattgccagtgttccgtcatccacatcctctaagatcccagtcagtccttcgacaatactcttcctctcctcttcggtgaggatcccctgctttgccaacatggtggcatgtacgatactgccggtgacatcttcgtgaaacagtcttttatcaaatgttatggacgcattgaaatcaaataccagctgatcggtctgtttcgtaaaacgtcctccccataactgtgccatggtcattctcccatctttttacgttggtagtctatcagataaaatttctcacagacattgattgcaattaatcatatcacaaacgacactttaatgcaatacagtgaatttcatcactttccgctacagaaaacactttttccactggaattcatacaataactataaatattcatgttaaggaagtatgcctttttatgggagctcttatcgaacttaaaaatataggttactcctatcacacactgtccggggagaccggtgccataaaagatatctccttctccgtggaggaaggggaatttgtagcacttgtcggacccagcggctgcggtaaatccactctgctgtccattatcgcagggctcctcgcccctgagaccggaaccattgtcgtaaataatcccgacggttcccttcattatccccgtatcggctatatgctgcagcatgaccatctcttcgaatggcgcaccatctatcagaatgttacgttgggtctggagatccatcacgccctcactccggagcgcatcgcccatgtggaacaacttttgtccgattacgggttggaaaaatttaagaacaagcgcccttgcgaattatccggcggcatgaagcagcgcgctgctctgattcgaacccttgccctggatccccagctgctgttactggatgaacccttcagcgccctggactaccagacgcgccttatggtatcttcggatatctgtcagttgatccgcaaggctgggaagaccatgatcatcgtcactcacgatctgtcagaggctatcagcctggcggataaagtttacgtgctgtctgcccgtcccgcaacgatcaaaacggtattgcccattcagctcaccctgacggacagttctccactcgccgccagaaacgccccggaatttccatattatttcaaacaactttgggaggaattaaccgatgaaacctaagaatgtgcaaaatgaccacccgttgacgatccaggaacaatatcttcgcaagcacaaaaatcatcatagacaggttgcctttctgcgtatctttctcctgggaatctttctgattctctgggaaatcagtgcagatgcatactggatcgacagtttctttttctccagcccacgcagagtcgtcctatgtctgatacagttgtggaccgagcgatctcttccgatgcatatcggcattactttattagaaaccatattaagtttccttttagtgttcgttatcagtctcctgctcgccaccctattgtggttctctgacaaactgtcggagattttagagccttacctggtactactcaacagtctaccgaaatctgccctggctcccctgttcatcgtctggctgggcaccggcatcaacaccattatcatcgccgggatctctgtggcagtcttcggctccattatcagcttttacactgcctttcaccaggtggatccggaaaaggagattctgatccgcactttgggtggaaaccgcagagatatctttttcaaagtcgtccttccgggatctgttcccacactgctcagcaccaccaaggtcaatatcggtctgtctttagtcggtgtcatcatcggagaatttctggcagccagacgagggttgggttatctcatcatctacggttcccaggtgttccagctggatatggtgatcagttctatcttactgttatgtgtcattgccatgctgctctatctgctgacccagtctctggaacattgcagcaaaaagcatcgcaactgatcataatgttttcttcggagatctgcaggatggcatcttcgtcttacagtctcctacataatctacagttctgcgaaacgaacttttaaaataataaattttacagttgcaaaaattcccaagaacatatataataacctagtccgctgaaatagctcagttggtagagcacttcactcgtaatgaaggggtcgtgggttcgagtcccattttcagcttatctatgaaaaagagaaagccaaaaagctttctcttttttgtatttttgatgaatgcagatacaaaaggtcagatcagggaatgcaatgaccagacatactgttccaatacttccaatccaatcacgccccaggcaaatcccagtgctctgtcatttgctttttcccgaagctcctgtcctaataagatcacggatatgaccacacagaacaataaaaagctataggtacgataagaagatccgtaaagggtctccgaaaaccccatggccatacgacttcccgctcccatgaaaaggagacagaggatggtatattttctccatgtcgtatctactgccagccagacgccgataaatacgaacgccgtcagcagaatcgacagcaagaacagacctgcattttttccctccgacaaaggtccgatctccggcatccccagtgccagtccgggaagcggctgtaacagatctgcccctgtccctttcagtaacagatggaatcccaacggaatccccgtaaaaaagacggcccgtttcttcccttttccggccaccaaaaacaaaagtacgaaaaacacagtcaataagggaatggatctataatacaagtacgccactgtggcagtataaccgtggaacagcttttgtcccactgtccactgtgcataatccggaatccaggttccgtaggtattcatgcggaaacaatgtcccggtgcaaaatacagcgccgcatatccgagtactgatgcaatctcttccagacacaacaggcctcttaccttccgaaggctatcgtttttccaagatacaatcagtaaaatcgtcaggaaaaaaatcagggagatagcatattgatcctgattcgtggtataaatgattgaaaggatcacagcaagatacatccaccatggagtctttcccttgacaatcttctgttttatggcggtgaacactaccagcatcgtaaaaaacggatacaggtagttggcgatggttgcaatatatccggctgttgacagaatctgaaacggaaacagtaaaaaggcaacgcacacaagcagtgtgttctcctcactgtttttctccgtaaacagatacctgagcatccccacgattccgacgataaccgcaatatccaacagtttccatagcttggaaggcaggaaacaactcacccatgccactgcatctgtcagcactcttccgctgtcctgccatcttttttccacaagttccccaaaggtctggttcaaaagcttcagatcatccccgctgtaatgaaagctgaaatggattcctgccagcagcagtacaaaagcaacccatacgattcctctcctgcgaagatcatcttgctcccttgtcatagattacccccaaagctctcggtgcaccattctgtttggaaaagaataccagcagtaaaagtgtcagtacgtacggcaggatcatcaccagatcctgataactgcttggcatctgtaatacctgtaccagtcggtagccgccggatctggcgaatccgaataacaggcatgctcccagggtcggaaggattcgccagttaccgaagatcagcgctgcgatggccagatatccgtaacctacatagatactggaagaaaagttcgcggaaatagaatatgcaaagcagataccgccaagtcccgacaacgcaccgcagatcatgatagctgccaggcggatctgtcccacctgtcttccggctgcatccaccgcatggggattgtcaccgcaggcgcgcagatgcatgccgaagcgggtcttgtacattacaaaccatgcaatgaatgctacggcaacgatcaccagttcaaaaggatacagattggtaaatacagctcccagtaccggaatcttagaaattcccgggatggtaattctggaagatacggtcagaacaaacttgtcagaggtggcaccgaatacaactctgttgagtagtttggtcaaatatgctgtcaatgccatagccagaatattgactacgacaccactgatcacctgattggctttaaacttcaggcacagcagcgcatggatcagggcaaaaatacttcctcctactgccgccatgatcatggcaatgtagaaaggtaccggagaatctccggagaaattccctgcaatggcaactgccacaaatgctccgataaaggcaccgaagccctgcaatccttccacagctaacatagtcacaccggacttctcgcaataaataccgccaattgccataataaataaaggtaatgcaaaggataacccgtcaatgatcacaatatccatttatttgtcctcctttgtcttgttcgttttctctcttctgcctcgttccatcttccatttgatataagcattacatgcactgaacaacaaaataattccggtaataaccgatgcgatctccgcatcgacaccggctgcagatttcatgtaagtactgcctttactgatcaaggtgatcagcatggtggaaaatacgattccgaagggattgttgttgccaagcagtgacactgcgatagcatcaaatcccgtgctgatcagtaccttgggctgaatagaacccacataacccagataataggtcacaccggcaagtcctgccagagcaccggagatcatcatggacagcaccatgcttctgccgactttaatacccgcatattttgcagcactgcgggaatagcccacagccttcagttcgtatcctaatttcgtcttctctaataggaaccacactgccactacagtcagcagagccagaataattcccagcggaatatccattttcagattgcccaccatggtatccatcagcgtcagtctggaagacgcagagatctcctttgactgtctggagaccggatccacgaaaaaggtattgataaagaagctgatcacgtattggaacgtgtagtttaacataatggacgaaacaacttcattaatattaaaacgatacttcaaaaagccgatcagtgcacccaccagtcctccaacgatcagaccgatgatcactaccagtggctttgccagtacagcatttaaactgctgtagcccacaataatacttgcagtgaacccggctgccagcatctgtccggagacaccgatattgaacaaacccgcacgcagagctaccgctactgccaatgctgcgaagatcataggggtaaaatagttcacataactcataaagtctgtcagcatgctcttatagcttgcataagaagacttgggtgacagtccgctgccctgcagcaaagcgtagtaagccttgaaaggatttgaaccggtcacggcgatgatcacaccacccaccaccaggctgcaaaggattgcaagaagagggatctttactgcattccagaattttgtcatctttttcatggtcttatgcctccttctccttgttcttaacgcccatcatgaactcacccacttcgttagtggtcagttcactggctttggcgatcttctgtatgcttccgttataaataacggcgatggtatccgcacagttcatgatctcatccagttccagagagattaaaaggatagccttgcccttgtctctctccgcaatgatctgtttgtgaatattctctatggcaccgatatccagtccacgggtgggctgaacgaagatcatcagagaggaatcctgctccacttctctggcgatgatggctttctgttgattaccgccgctcatggagcgtaccaccgtcttgctaccctgtccgcttcggatatcgtatttttctatcagtttttcactgttatcttcaaaaatcttttggtccagcactcccttatgacagaaaggctctttgtagtagttacgcagtgccagattctccgaaagggtaaaatccatgaccagtccataattctgtctgtcctcgggaatataggaaattccttctgtggtacgttccctgatggacagatccgtaatatctctgccgtttaacagaatcttaccggaacgtgccgggatcaatcctgcaatagcatcggcaatctctacctgaccgttgccggctacgcctgcaatggctacgatctcaccggaatgcacctcaagggatacatcctttaccacctgaaaatcctgcttgttatagacgttcagatgctgtatatcgaggatcgtcttacccggtttcgcgggttctttttctgtctcaaaattcacttcacggcctaccattttgtttgccatgactttggtggatgtggttgccacgtccataacatccatcagacgtccgcggttcaggatcgcgcatctgtctgcaatacgtttgatctcttccagtttatgtgtgattaagatgatggtcttaccgtcatcccgcagagatttgataatgtctaataaaaagtcgatctcctgaggagtcagaaccgctgtgggttcatcgaaaataaggatctctgcttctctgtaaagcatttttaagatctctactctctgctgtgtagagacattaatatcactgatcacgtcggtaggattcactgccagtccgtatttctccgaaagttcgcggatatcctgattggctttcttcatatccactaccggaatacatcccaataccttcttcaccggttccatacccatcacaatattctctgcaatggtatagttggataccagtttaaaatgctgatgtaccataccgatgtttaatttggtggcatggttgggggattccagtttcaccttttctccccggatatagatctctccttcatccggctcgtacattccaaacagcatactcatcaaggtggattttccggcaccattctctcccaacagagcaaagatctcaccctttttgatctggatcgtcacatcgtcgttggctacgatcccggggaagcgtttggtgatgtgtttcatctcaacaatatattccgacatgttcatcctcatttctactcatgtaaataaataagaaggtgacagttcctcaccatcaccttcttgtaaattcattcttcctaccaggtaaaggtctccggagttacaccgttaaagtttgccgcaggaacgatcttgccttcctttaacagagcctgtgctgcattgatcttctcaatagcctctgcggtgagctgacatctgccttcctcacttacaaaaccggtagcatcatctgctgcggtcagagtcacattagcgcccttgaaggaaccatcttttacttcgttcagtacgttgtaaacagtatcatgcattaccttcagaccactggtcagaacgatattgctgtcaccgtttgcaccgtcatcatactggtcaacatcacaaccgataaccttaacgccgtcagcttccttggcagcggtaaatacgccgttaccggaacctcctgctgctacgaacaggatatctacgccttcagcgatcagagcattgcccagtactttaccggtagcttcatcagagaagttaccaacatagttaccacctacattagcgccggtaacatcggtacctgcgtaagaaggaagctctactacttctacattcatgccttcggtaccgttcacatacttaacaccgcactcgaaaccatactgatagttaacgttggaaggatatgcgataccgtttactactgctaccttacctgtagtggtagacagagctgcagccatacctgcatagaaaccactctcctgctcagcatagtaagcagcgtatacattgtcgatcacctgatcagcagttacttcggtaccgtcaatggtaggccaggaatcgatcaggatgaacttggtatccggattctcctgtgccagattaccgatgccggcgaactggaaaccacagcatacaataacatcataatcagctacaacatcagctactgcctgaacagctgctgcactgtcaccggtctcctcacgaatgggggttacggttgcattcggattctcctcgatgaacttcagaacaccgttgtagttgtcctggttgaaggaaccgtcatccacgccggaggggctggatacgatagcgatcttcagaccgggttcttcactgccgctctctgtagctgctgcagtggtggtagctgccgcactggattctgcattggtgtcagcattggtgctgccgcatgctaccagagaaacagccatgacagatgcaagtgcaagtgccagaaactttttcataattttttcctcctaaaaatgtaaatattaaaacaatgaatcacaacggtaatattatcatcatagtctgtaaaattcaatatttatttttaattaacgcatatgcacatccatttgcgggaacggaatttcaatttccgcttcatcaagtgcatacttacactgttcggtaatacgccattttccctgccagaaatcctcatttttgaaccagcagcgtacacataggttgattccggagtctgccagttcatctacaaatacaaaatgctctctttcctttatagtatcgggatcttcagagagaacctttgtcaggacttcctttgccttcctaatatctgcgctgtaagcaacagacaccttcacatcacatcgtctggattcggcagcagtgacattcacaatggtgttattcgccagattgccgttgggaagaataatcgtctgattatcataggttaacagctttgtatagaagatctggatttcttttacggtgccttccttaccggaggaaccttccacaatgtaatctcccaccttaaacggcttcaataataaaatcagcacaccacccgccaggttagacagacttccctgcactgccagccccactgccactccggccgagccaagcaatgccacgatactggcagcatcaacgccaaaggaggatgccagggtcaggatcagtataatatataaagaagccttcacgaacgaatccacgaactggatcactcccgtttccgctcccgcgcggttcatggacttgcggatgatcttgcggatcagcttgatcagttctacaccgatgaagaaaaatatcagtgccagtccgatacggatgcctaagttcaatgctttctccggaagggtatccagaaaagacgctatcagtccttccttttgctgtacctctttgattacgttatctgtcagatccatgttgtgttatttctcctgtttcttttttgctgtcttgttcgttgtcttacgaatgggcgtatttttacggatacgcttctcgatcactttttccagttcagcctctgtgtaaggaataaattgcagaatgctcaaggatagcggtgccagtttcacggtaacggacgtacttttatcatcccattccacgtcctctgcccgtttcatgcggtcattgaccacacctgtaccaccgtagcagacagcatccgtgttcaggatctccttgtattttccctcgtaaggaactcctgtagtgatctctctgggcacaccggagaagtttgctacgaccaaaagcatctcctccgcagcttcgcctttacgcacaaagcttacataacattcattggcagagatctcgttcatccactggaatcccttcgcctgatcgtcacattcgtacaacgccttattctctctgtataatgcattcagatccttcaccagcctctgaactcctgcattttccttctgctcttgcagtgcccattccacctgacgcatttcattccattctttttcttccgccagatcctgtcccatgaagaggagctttttcccggggtgagtcatcatatagccgtaggtcagacgtaagttggcaagcttctgtgctctgtctccgggcatcttgccaagtaaggttcctttcccatgtaccacttcatcatgcgaaaataccagcatgaatttctcgctgtaggcatagatcatgctgaaggtaagttctccgtgatggtggcttctaaagtacggatcgtatttgatataatccagataatcgttcatgaagcccatattccatttgagatcaaaaccaagtcccccctcttccagagaaccggttatcatgggaaatgccgtactctcctctgcgatggataataccccgggatctctctttttcaggatagaatttaagtgtttgatcagttcaatggcttccagattctcgttgccaccgtacatattgggaatccattctccgtcctgtctgccgtaatccagataaagcatgctggctaccgcatccatacggataccgtcagcatgatatttctccacccagaacagcgcattggcgatcagatagttcgatacctggggacgaccgtaattgtagatcagggtgccccagtgtggatgactgccctgtctgggatcctgatgctcataaagacaggttccgtcaaatgcggacaatccgtaagaatccttcggaaaatgcgcaggaacccagtcaaggatcacaccgattcccgccttatgcagttcattcacgaagaacataaagtcctccggtgtaccgtatctggcagtcggtgcataataaccgatgacctgatatccccaggacgcatctaagggatgctccatcaccggcagcagttccacatgggtgtatcccattttctttacatattctatgaccttcggagcaatttcccggtaattgacataatcctgtccttcccccggtgtcacaaagcttcccagatacatttcatagacgctcaccggagcattaccgcactgatacttttcgcgacttttcaggaattcgccgtcctcccattgataattacggatatccgcaattacagaagccgtctccggtctcttctgcgctgcattgccgtaggggtccgccttcagataagtaagtccgcccttgatcttcagctcgtatttgtaacagtctccaacttccgctccgggaataaacaattcaaagataccggaatcccccagccgtctcatctgatggattcgcccgtcccattcattaaaatcaccgactacactgacacgcatggcattcggtgcccagacggcaaaataggttcctgcgtccccatccagttccatgggatgtgctcccagcttttcatagattgtataatgaatgcctgcggcaaaacgatccatgtcttccttcgtgatctgcggaacatggcggtatgcatctccacagatttttctgtaggctgcatgttctttcgtcttaccgtattccaccacatattcataaggtgacattttccctgcatttaccaatgcggcaaaatatccctcttcatctgccagttccatgggaacatccgtaagaaatgcttctcccacctggccggtcttcttccagtggatcgttactttctccgctcctgggaagtatgcctgaaccagcattttgcttccctgcttatgggggcccaacagcttatggggattatcacattcggaatacgtgatttcttctatttggggccagttcatcaatttataaagtttgtttgtcatattccctcttttctgcggcgcgattgctgcattctattctgtcatttttgcctttaaaaaccctgaggattaccgctctatctcatgcaggaacagcccgcttcgcagcttgggctcgaaccatgtggactttggaggcatcagtctccccgcatccgccaccgcaaaaagctctgcaatggatgtgggatacatcgagaacgccactttcatgtccgtatgtactctccgctccagttctcccagtccccggatgcctccgacaaaatcaattctcttatctgtcttcggatccataatccccaaaatgggatctaacagatcattttgcaaaagcgatacatccagtccctctacggcatcctcactttttatttcatcttttgcagaaagactgtaccattcattctccagatacatgccaaacgtgcctttctccgtgggtctgtaaggactctgtccctttttctccactgcgaaatactcttcaatacgggtcaggaaagttgctgcatccattccgttcagatccttcactacacgattataatccagaatccgtaactcttcatccgggaaaatcacggaaagaaaataattaaattcctcttctcctgtataatccggatactgctctctccgcttcaacccaaccttcactgcggaagcacatcgatgatgcccatccgcgatatagattgccgggatcttcccaaaagcctcctcgatcatcgccacatccgaatcgttatcgatcacccacacacgatgcccgattccatcctcactgacaaaatcatagaccggcgcctgttttttcagctctccgattttctccttcagattctcctgcgcccgatacgccaggaaaatcggtcccgtctgcatactgcatgtatccacatgacggatacggtcttcctccttgtctgccctggtattctcatgctttttgatcacattattccgataatcgtcaatggatgcacagcctaccaccccggtctgactgtgtccatccatcgtcagttcatacagatagaaacatggcgtcggatcctgtacaaattttccttccagaattttctcacgaagcatctgatccgctttctcatacacacagtccgcatatgtgtctacttcctcgccaaactgcgtctccgcccggtcaaccgccagaaaagattccggattcttcttcaccacttcacacgcttccgccctgttatatacatcataaggaagtgccgcaatcctctcctccatccccttgcagggccgatatgccttaaatggtctgatctgtgccatactcctacctcccaatttctatataatcttattttaccaaatcccatctcatatcacaaggttatttccataaacaagtagcccgcagttggggtaagaacaagcagactctaagcagccgtcggcacttagcgagggtactttcctcgcttatgtaccgctacggtctgcgtccgaagtgaaaacgggtctgcggttcttagccccaatacgggctacggggattattcttaccccagccgaggctgtggggggtatttctaataatacttaccccaacttatggaacacaatacagttgggcatattgaccttcatcgccggtccattcatgatcatcgttccatgctccagatcaatatggaagaaagtcatcgtattactttcatgattcaaagacaccagaaacttattatccgggaagaactccgcatccttcggatactcaccgctgaccggcagcaggaaattcttcttaagcaatcctgtcttcttatccacattaaatacaatgactgaattatctcccgcaatggagctgagcagataattataatccagggagaaactgaatgcactggcactgttcgtattgcctctggtcagcttgatcagctctaccgtctgaatcttctcgaaagtaggatcattatcatggtccacatactcatagacatcaatgtaacacttcagctcatgcagaatataaatatatctgccatcctctgagatcttgatatgacggggcgcagattccatctcgctgcgaatgatatcctccagcttcaccttacccttctctacatcaaaacgatatacattgacatgatccattccctgatccgctaccagcagatatttgttgtcatgcgtcatacgagcacagttgatgtgggggcggaaattgcgctctgccatactgcccagtcctttatggtagatttcgtcggtaatctctccgatggaaccatcctccttcagacggagtacggtcagcttaccgtcatgataacctgccacaaacagatactgatctgtgtaatccgtagatacataacatcctctcataccgttgatcggtgcgaagttgatcagttccagatctccgtccggcatgatcgtatatgcctctacaccaaaatccgttatagaataaagaaactttccgttatgagaaatggtcaggtaagaagagttggtgatctctactttatctttttccttaaaacgaccgtttttcatatccacatcatatattctgataccgtgactgtccccctgtgtataactggaaacataggcaacatattttcccttgctcatgaccggatcctccttagcattctatatctttttatgtttataaatatagcacaattctgaaaattgtgaaacatttttctgtaaaaatcccgaaaaatactcctgttttttccctgaggtaaagtttatgtaaatcagcccggaaaatgcaaaacttcacattgactttccatgtatttacgtataatattaattcgacttgcaaaaaattttcatttagatttttcgataattttttgcaggattttttacatcaggaaggaaaaaattgatgaaaaatgctttagtcaatttagtgaacatttcaaaatcatttgacaatcagatggttctggatgatctcaatctgtacatccgcgaaaatgagttcctgacactgttgggacccagtggctgcggaaagactacaaccctccgtattctgggcggtttcgagactcccgacaaaggtcaggtcattttcgaaggccgggatatcactaaccttccacccaataagcgcaatctgaatactgtattccaaaagtatgccctgttcccgcatatgaccattgcagaaaacatcgcgtttggattaaagatcagtggtaaaagcaaatcttatattaatgataaaattaaatacgctctgaagttagtcaatctggatggctttgagaaccgtatgccggattccttaagcggcggtcagcagcaacgtatcgccatcgcccgtgcgatcgtgaacgaacccaagctcctgctcttagacgagcctttaggcgccctggatctgaagcttcgccaggacatgcagtatgagctgatacgcttgaagaacgagcttggcattacctttatctatgtcacccatgaccaggaagaggctctgaccatgtccgataccatcgtagtcatgaaccaggggtatatccagcagatcggtactcccgagagcatctataatgaaccggaaaatgctttcgttgccgattttatcggtgacagtaatatcatcggtgccaccatgatcagagatcgtctggtagaaatcctgggtgcccgttttgactgtgtagataccggtttcggtgagaataagcccgtagatgtagtcatccgacccgaggacgtggaactggtatctccggaggaaggtatcctccagggtaccctgatccactctatcttcaagggtgttcattatgagatggaagttatggcaaatggctttgaatggctggtacagtccacgaagatggtttccgttgggaccaaagtcggcatcaaggttgatccttttaacatccagatcatgaagaagccggaatctgaggacgaggaggccattggagtcaatgaatagaaaattattatcgctcccttttatcttctggtcagccatgtttgtcatcgtgcctctgtgcatggtcttctactatggtctgaccgataagagcggtgcatttacatttgataatattctggcgattgctactgccgagcattccaaggctctgtgggaggcattaaagttatctgtgatcagcactgtgatctgcctgcttttagcatatcctcttgccatgatcctgtgtaacatgaatgtgaatcagaattcattcctggtactgattttcattttgcccatgtggatgaattttctgcttcgtaccctggcatggcagactctgcttgagaagaccggtgtgatcaacagcatcctctccgtcctgcatctgccgtcgttaaatattatcaataccccctatgccattgtactgggtatggtatataactttttaccttttatggtactgcctctgtataacgtgctggtcaaaatcgacaagaatgtgatcaacgccgcctatgacctgggtgccaacggcatacagactttcttacggatcatttttcctttaagtctgcccggcatgttcagcggtatcaccatggtgtttgtccccgccctgactactttcgttatcagcaagattctgggtggcagcaagatcctgctcatcggtaatgtcatcgagcaggaattcacccagaccggcaactggaatctgggaagcggtctctccatcgtattgatgctgttcatcatcttcaatatggtgatctctgtgatcacggataaagaaggggaggcgaacacattatgatcaaaacaactgcgcaaaaaatatatctgggactgatttttatctttttatacgcccccattattaccttgatcgtactctccttcaatgccagtaagacccgtgcaaaatggggcggttttacgaccaagtggtatgcggctttgttccggaacgagcagatcatgcaggctttgtggaatacactggcgctggcaatcttatctgcgctgatcgccaccctcataggtacgatcgcctgcatcgccatgcaatccatgaaacgtaccagccgtgctgtcctcatgggaatcacgaatattccaatgctgaatgcggaaatcgttaccggtatctccctgatgcttctgttcctcagctttggtataaagtttggcttcgggaccattctgcttgcacacattacctttaatattccatatgtgatattaagcgtaatgccccgtatgaagcagctgaatcccagcacctatgaggcagccctcgacctgggcgcatctcatacgtatgcctttttcaaagtggtatttccggatatcctgccgggtattttgtccggttttctgatggcatttaccatgtcactggatgactttatcattacccactttaccaagggtcccggtgtcgacaccctgtccaccaagatctatacggaagtaaaaaaaggtatcaaaccggaaatgtacgcactatccaccattatattcgtaactgtattgattttacttttgttagtaaactacacacccaaaggaaagaaaaagaaataactttttctacatatattttaggaggaaaataaatgaaaaaatttattgcactgtttctgtgcggcatccttaccgcaactgctctgaccggctgtggatcctcttccgctgccggtgaaaacggtgaagtcatcgtctacaactggggagaatatatcgatccggagactctcactatgtttgaggaagagaccggtatcaaggtggtctatgacgaatttgagaccaacgagatcatgtatccaaaggtggaagccggttcatccgcttatgatgtggtatgtccttccgattacatggtacagaaaatgatcgaaaatgatctgattcaggaactggattacgataagattcccaatgccaaagaaaacatcggtgcccagtactatgagcaggctgctgcttacgatcccggtaacaaatattgtgttccttattgctggggaactgtaggaatcatctacaataaaaccatggtagatactcctcccaccaaatgggcagacctgtgggatgaaaaatatgctgataatattctgatgatggattctattaaagacagctttatggttgctctgaagaaaaacggcttctcttctaacagtctggacgaatccgagctccagatagctaccaatgatctcatcgcccagaagcctctggtacaggcatatgttgtagatcaggtacgtgacaaaatgatcggcggcgaggctgcgatcggtgtaatgttctccggtgatgccatttatgtgatcggggaaaatccggatctcgattatgtcattcctgaggaaggtacaaatgtatggattgacggctgggtcattcccaagaatgctcctaacaaggaaaatgcagagaaattcattgatttcatgtgccgtccggatgtagctctgaagaattttgagtacattacctacggtacccccaataccgctgcaagagagctgatcgaggatgaggacctgaagaactctcccatcgctttcccggatctgacacagtataacaatctggagaccttcctgtacctcggtgaggatggcgaagagcttttcaacaaatactggaaagaagttatgtccaattaattctatataaagcaaagtaaaagccctcaagctgtcaaaacagcctgagggcttttgatcttcccatatttcaggaattctgttcacatccgcaggtctcacatttcccatcatttcttctggaaaatgccggatcatccaccggtgtaaaattcgggaaatccggtcttagcggtctgcagtctctgtcttcacagcaccccgcatcttccaggcgacgggcgccgcaggcattcgaactgccacaggaattgttgttgccacaggaatttccaccacaaaatagtaataataacagaatgatacagttcataggatcctctacttaccactgtttatttactattctattccgctttttccagctggtgccagtccatacatcgtttatgctgtaccagttcctctttgataaattgaaaggttttctcttcgccctgttctgccagcatttccagcacatacagaagctttgcctttgtcttaggatggataggtgccttatctgtgccccgataatagtaatctaacggtgatctgtccgtatatttgtctcccatgtaaaccttactggcggcgatccggtccataatcatctccgcaatataacgatccggcatgggtaccggtgccatcccgcccggcaatgcctgcatactgtaatcaatccagtattcgtaatgatgcttgttcctgcccttgtggtgcagccaggcactggaataaccgatatcctctctctccgcgttgttggggctgcggtcaccctggtaatactttgctcctacccagaactctgtggggctgtatttcgacatatcgtgtaacagtccctgtttatacagacctaccttaaagcagccctttgccaccagaaccttatggtgtgtgatcgttttaaaatgtttccagatattcatttcgttctatcatctttcttcagaagcttccgattttttttccggctcttaccggtactttttcccttatcctgtgatattcccatcacgccttcgtagacggcaatgctcctgggggctacggtcctcgtctgatcagccatctgttcttctctctcctgcactgtcaggatattccctgcttcttccgtcgctaaaaccaatttccattccatacccttcggaagcttgggaaatgccagcttctgaggttcccaatgcatattcatggcaacatagagaaaagaatcatctgcacctgccttggtccttgcatattttccgcaatacatcattcccacgtgcctgttataactctctgtctgaggtctccatgcattttgtccgtggtaggacagatccggataaccacaggataacgtatccaggatccgaagctcgtcctctggatgcaggatcggatgtgccttacggaaagcgatcatctgtttccagaaagctagcagtccggcatttttctccttatcctgccagttcagccaggtgattttattatcctgacagtagggattgttatttccctgttgggaattaccgaattcatctcccatgaagatcaacggcgtagactgggtcaataacagcatacaaaatgcattctgtaactgtttttgccggagagccagcacttttttgcgtcgggaggtaccttcctcaccacagttccagctgcaattataatcgttaccgtcccggttgccctcgccgttggcttcgttatgcttatggtcataagacaccatatccatcagggtaaatccgtaataattagacagataatggatccgtcccatattggcgggaatatgacgcatctcgtacaatactcccgaaagcatgttatcatcgccttttaaaaatctacgcatggtgtacagataatcgtcccggtattccgcaagattccgatactccggcttctgtgccggatcgtagagcttcgctgcatcaaaatcgtaataccaaagcttggtgtctgtcagtgcagggtctcctgccagcgcctgtgccggcacctctcccatcagatgaaacccatccacatgatacgttaatacccagaagcgtaaaatattcccaatctctgtcacatccatcccttttgggaaataaaactgtaagatcacttccatcctgcgcttatggaattccttcaccagttgtctgaattccaacgctgcatcttcttctgccgcataggcagcttttggtgcataataaaagccctcccggtagccccagtagtttaatacccggtaaccggggagttctccaccattttcccctgctgtggctgcaatgtctgcggatgtcttcgtgttcacctcttccggagtctcatcaaattcataaacaggctgcaattccaccgtcgtgatgccgatttcctgcagataatccagtttctccgcaattcccgcaaaggtgcctctgtgtgtcaccttggaggaagcatgcatggtaaagccacggacatgcatgcaataacatacgctctcacgataggaaagcatcggatgttcatcctgctcccagtcgaaatcctctccgggaaataccgcaatgcgattgacattttttcgcgtttttccgtaaacaggcttacttaagaagccccgcgcatgcagatccggcacgatccgttcctcttcatagaactgatatccgatctgctgtggatccagttccaggtatttgcagtagacatttcccatccgctcttcccggcggaacgggattttgtgtaattttttaccgctctctctgtcatatagtataatgccgcaatcctttttcccggacgcgtaggcgaaacgtatcgctccgtcctccacatgagctcctaacggataaggctttattgcatgctttttttctgtcattgctacactccatcttctggctgatttgtcttttttcactattttattatagtcggtaaccttaagaaaaacaagcattgcaagaatatccgtaaacggttataataagggaacaaaatactgttacacccaataacatttcacaggaggattcccatgggtaaaaatgaaagctatgaagatgaagaaatgaccgttgagctggagttggaagatggcactgtcgtaaactgtgcggtcatcaccattctcaccgtagaggctaaggattatatcgtgcttttgcctctggatgaagacggcgaaaacgaagacggagaagtatggttctacggatatgccgagaatccggatgacccgaatgaagagcctgttctcgaatacattgaagatgatgatgtctacgaaaaagttgccgatgcttttgacgagtatctggacagttgtgaattcgatgagatcatcgacgataacgattcagaggaataaggaatctggatgggaacctgggacgctctgctgtgcctgtaaggcagagaagttccaggtctttttttgcccttgtcatagccacatagaagatacggcgttcctcttcaatgtgctcagggtccagtccgttcccatggggaaaattcttttcattgcagtctggaatccatacactgtcaaactccagtcctttcgaagcatgtaccgtaagcagtcttaccgctccgtctgccgcctgcgcattgtctccggattcccgtgccacgcctttccgcagttgttctccgaaggcctcctgtgcttcctgccactcttttgctgttttaaaatgaccggcttcttccacaatatagttcaaaatttcttcccattcctgtgttttctcattattttcaacatttgctctctgacgcagatacctttcatatccgcaagctttgcatacaaaggtcactgcaagctttggttctgcattttttacaaattccatctgacgtttccacaatctgatcgcctcacacgctttacgattacagtctgcagaataatcattgtttttcatggagtaataatcttccagtgcttgcaatgaaacatgttttccaaaagcttccctggatatattacgaaacggtttgttgatcactctcagaaaatctattctctctgcagttcctgctgcaatacgcagatatgacataatatcctgtacaatgaagtgttcatatatatttcgtgttttttccttcataacatagggaattccttctctgccaagtcttgccgccacgctctgcatagccaggtttgttcggaacaatattgcacaggtctcctgtgtggaacgtcccttcaggcgatgtaataaatattgcatctgctccggtgcatccctgaattcttttattcttaccctgcaggcggtttctctgtatgtttcttccttccgctgatttggctcgctggcttccaatattttagggaagcgatccaggttctcattgatcaccagaagggaagcttccacaatgtcctgatgactgcggtagttggtgcgaagcagtatctgtgttgccgcaaattcccgtacaaacatctgcatacaggccggtctggctccacgaaaactgtaaattgcctggtcatcatctcccactgcgaatacatttttatgtctttccgccagcaaccgtacaatacaatactgcctatagttaatatcctgaaattcatcgatcagaatatgtgaaaaacgtttctgccagtattccctctgtggagtattattttgcaacagttcctcacactctttcagcatatcatcaaaatcaacacctcggacttttgtccttgcagactcatattcccgatatatctgaggaaagcaatttttccattcctccgggattttttccagtgttttttccttttctccggtatttttgtaatacgcgatcgcatccaggaagcttttggcaatttccgcactgcattctttgttcttttttaaaatgggataaatcagatttaatttttgtctttcatttaagagattgcccggttgtactctgcccgaccggagcaggatttgataaaaaatcgaatgaaatgttccgaaattaacggaaccggcaaacgaagaagtctgtgcaaagcgctgttgcatagaaagtgccgcttctctggtaaacgtaatcaccagaatctgttcgggagcgacttctttctcatgaatcagccagaggattctcttcgtaatagtaaacgtcttgccggagccgggacccgccaataataaaagcgggccctctccgaaagttacagcctccctttgggagggattgcaatccgtaagattaaacattcgccttcagtaattcaatacctttacgaattctgttcagggattcctctttgcccaggacttccatgatctccgtagcacccgcaggtgtcatctgcttgccggatacagcggtacggatcggccacatcacataaccgttcttgcagcctttttcctccacatattttacaagagcctgatacagcccgtcattgctgtaatcctcctgtgcctccaggatcggaagcaggtcttttaatacctccagagaactctctgcggtagtcttcatcttcttatgtgtgtacattgccacatcatactccggaagttcctcgaagaaatctaccaatccggcgatatccgggaatacttcaatccgggtctttaccatggctgcgatcttcttaagatctaatggcttactgatcgctttcttcagataaggttctgccatctcgtagaatttatcgaagtccatagctttcaggtactcgccgttcatccagcgcagttttacaatatcgaagactgcgggagacttactgatacgatggtaatcaaactctttgatcagttcatcaagagagaaaatctcgcgattatcctccgggctccatcccaacagtgccacatagttgacgattgcctctgtaatgaatccctgatcgatcagatcctcgaaggaagcatgtccgcttctcttagacagctttttatggttctcatcggtgatcagaggcagatgaatatataccggtacctgccagccgaaagcatcatacagacgcacatacttcggggaggaggacagatattcgttgcctcgtactacatgagtgatattcatggtatgatcatctactacgttagcaaaattgtaagttggatagccgtcggatttgatcaggatcatatcatccagctgggaattatctacggtaatgtctccgtataactcatcatggaatgttgtagttccttcctttggattattctgacggatgacaaaaggcttgcctgcagcaagatttgcctcgatctcttccttggacagagacaggcagtgcttgtcatatacagtgatctccttgccgtccaccacctcggtcttcagggaagccagtctctccttatcacagaagcaataatatgcctcgcccttgtcgatcagctccttggcatatttcatatagataccggtcttcatacgctcactctgtacgtaagggccgtagccgccgtccttatcgggtccctcatcatgtaccagtccggtcttctccagggtacggtagatgatctcggtagctccttccacatagcgctcctggtcggtatcctcgatacggagcatgaaatctccaccggcatgctttgcaatcaaaaattcatataatgcggaccgcagattacctacatgcattttaccggtagggctgggtgcgtatcttgttctgatctttgtcattttctcctcatttccgcagggaatctgtgcatatccgggctacggtcttccggcatacattttcctgcttatatattcctgtccaccatctcccgggcagactactttcttattctaccgccttttttcaaaaactgcaacagttaagacgttgatttcggatggggaagattccatctgtaatgtgcagccaggaaacggatcgccatgacaatgaaagctccgataaataccgccgtcagtcttccccattctctgtatatccacacgcagcccagtgctcccacgagggatgcacaggcataaatatgtttcacgaagatgtagggttcctcccctgccatcatgtcacgcatcagaccgccgcctacaccggtaagcattcctataaacaccagcaggaaggaattatcaggatatccattatcaattcccgacatcacacccagggatgtaaagattcccaggcctacagaatccatgatcagcatagccttgtcataaaaagttcccagtctgccactcagaagatcatgtttgatatacagcagtacaaaaatcgccagtgacgtaatcactgataccacgacatacacaggcttttccagagccgaaggcaatttccccaggatcacatccctggtcatacctcctcccactgccgtcaccacgcccaacacgcagatcccgaaaatatccattcgttttcggatccccaccatggcgcctgacgcggcgaaagcgatggttcctaagatttccatgaaaaaaataatactatcctgaatgttcataatctgtttctcctaaaagttctccacgatattttatagtatctttgttaaaataacaatagctaatttacagaccataaaaaaggaaccatcacgcttctgtgatgattccctttcccgacaaaatttctatcctatgtttattctttttccagttccaccatttcctgatccacactttcatcaggtactttcttctctgcttcgttcttgaacttgtccacggctctggctgctacgggaatagcaatgttggtgccggctccggcaatacagcctccggggcaggccataccctcgatcaggcagccgttcatcttaccggctttggcaaggagcagggctttcttacattctgccaggctctccgcatgctgaatgttcaccggtgttcccggataatactgttcgatacactccttgatagcattggcaacgccgcctgccacgccgtaacctcttccggctgcggtagcatccttcatctcatccatggccttgatctcatctaacaggattcccttagcttcgaacataccggtcagttcctcaaaagtgataacaaagtctacatcggaacgaacggtacgtctgctggcttccagctttttggaagcgcaggggccaatgaatactacggacgcatccggatgttcctgtttgatcagacgggctgttgccaccatgggtgtcaattcattacttatcttatcaatggtctcaggaaacagattcttcgccatcacagaccaggaaggacaacaggatgtcagggcaaactgctgcttaccggtagcaacctccttcacgtagtgctccgcttccgccatacatcccatatccgcaccaagggcggtttcataaacatctacaaagcccagttctttcagtgctgtcttgaacatctccggtgtcactttcggaccgaactgtccggcaaatgcaggtgccacctgggctatgatcttccgtccggactgcatggcacggatcagctggaagatctgtgacttgtcagcaatcgcgccgaagggacagcttaccatacactgaccacaggatacacatttttcattgtcgatcacagctcttcccacatggtcagatgtgatggctccaataccgcaggcagccttacagggacgctctttatgacaaattgcatcataagggcagatttcacggcattttccgcacttaatgcatttctcctgatcaataacagacttgccgtttttcatagagatcgcgcccttgggacagacactctgacagggatgtgccacacaccccatacaggagctggtcacctcataacggttctctgggcaggcattacacgccgacggaatgacctgcatcagagggggttcgtaatatttttcatcaatattactctcctccagaccctgtgtcagatggccgggatgctcgcggttctccgggcgtaagctcatccccatggccagacggatgcgctcacggatgatcgctctgtcacgataaacgctctcccagaactccgactcttcatagtctacgatcttataaggcagcgcctccatatcatctttcagattcttggaattgtaagccagattagccacttccttaaatacccttcttctccgctgtcttaccggagtatcgatccctctcatgctgctcatatcacattaccgccttttgatatttttttaacacactaaccatattaaaccataccgcacctgtaaatgcaagaaaaatcacaataaaaataggatccttcactgtttttcgtgaaagaccccatccttgaatttttaatcttttacttcataacgactctcttgaagttcttcttacctctgcggactaccagaccctctccgtcaaactgctcgggatcgtaagcggtcttcacatctgtaaccttttcatccgctacgacaacaccgccctgttctacggcacgtcttgcttcgctgcgggatgcagacagtccggatttcaccaggacactgagaatatcaatcttaccatcggtaaagtctgcctcagtcagttcactggtgggcatctctgcggcattgccgccggtaaacagtgctcttgcgctttcctgtgccttcttagcctcttcctcgccatgtaccagattggtcagttcgtatgccagaatttccttcgcctgatttaactggcttccttcccatttgtccatctcatcgatctgctccagaggcaggaaggtcagcatacgcaggcacttaaggacatctgcgtctgatacatttctccagtactggtagaactcgaaaggagtggtcttgttgggatccagccacacggcacccttctgggtcttacccatcttcttgccttcggaattcaaaagcagagtgatcgtcatagcgtaagcatccttacccagctttctgcggatcagttcggtaccacccagcatattgctccactgatcgtcaccaccgaactgcatgttacagccgtatttctggtataaggtcaggaagtcaaagctctgcatgatcatgtagttgaactctaagaagcttaagcccttctccattctctgcttgtagcactctgcggtcagcatacggttaacactgaagtgtgctcccacatctcttaacagttccacatagttcaggttcagcagccagtccgcattattgaccatcagtgccttaccatcgctgaaatcgataaaacggctcatctgcttcttgaagcagtcaacattatgctgaatggtctccttggtcatcatggtacgcatatcgcttctgccggagggatcaccgatcattgcggtaccaccgccgatcagagcgatcggcttgttacctgccatctgcattctcttcatcaggcacagtgccatgaaatgtcctacgtgaagactgtctgcagtaggatcaaaaccaatgtagaaggtagcctttccgttattgatcagttccttgatctcctcttcatctgtcagctgtgccagcagtcctcttgcttttaattcatcaaatactgtcattttctcttctcctttttgggttcttttactctgtatacctttttgcatttttcgggaatcggctccaaaggcactaaaaaagcccgccccttttcaaaaggacgagcttgatcactcgtgttaccacctaatgttcctgccagactcacatctgacagctcagtaagtatctatcaatacttcggccgatatcggtgcctgccgtcctgatctactcgttcgggatcctcttataaaatcttctgatccttctctttccaccggctgctccgggatgtattcctgctctgcttctgtgcgcctctcacctgccggctgctctctgtcagaagtggaggaacagtacttcttcccttcatcgcattcttcttatcctatgtttgcgttaaacatgagcttattatagccagtttgcgtttttctgtcaacaccaaaaatacgatttattcttccggccagggcaggtgggatacttccagcttcttgtcacgaagcatcaattcttttaccgcctgatccgcgggcttaccatcaaagagcacttcatttacctgctcaataataggcagctgaacatcatattttttcgacagttccatggccgctttagcggaatacacgccctctaccaccatctgtacttccttcatggcttcctcgtaggtcttgccctgcccgatcaggataccggcacggcggttacgggaatgcatgctggcgcaggtcacgatcagatctccgataccggtcagaccacagaaggtctcgaaattaccacccatggcagtaccaagtctggcgatctcggtaatgcctctggtgatcagtgctgccttcgtattgtctccgtaacccagtccgtcggcaataccggcagccagcgctactacgtttttcagggcaccgcccagttcaatgcccagtacatccgggctggtatagacacggaacacctcgttcatgaacagattctgcacatattccgcacagcttttactcttagaacccgctacgatcgtcgtggggataccacggctgacttcctccgcgtgcgtcggtccggacagtaccgctatctgtgcctgggggatctcatcttcgatgatctgtgcctgggtcatcagggtatgctcctcgattcctttggagacactgacgatcctctgtcccttcgccaccagcgggctgatgcggtgtgccgtacttctggtgtaggagcttgccactgccataactaacagatccttaccctcaatcgcagatttatcatctgtagtaaagatcatatcctccgaaagctttactcccggcagcatcttgtgctcatgtttctcctgaagcatctgaatctctgcgggaaccgcagaccataccgtcacttcatgtccgttcttatgtaataccactgacaggccgataccccagcttccgccacccaatatacatacttttgccatagcttatttatcctccccggatatttccgtctgctcttctgcagcctttttcttgaacagataggtcttcctctcattcccgtggatcaggcggacaatattctgtctgtgcttccaatatgccataaccgtgagaaatgcagtaattgcatacatttcatacagttgtgactgtggtatggcaccgaacagtcccatctgtccgcagactaccatctggatcataaatccggcatataccagcagtgatcccagcgacacataatgtgtggtcagaaatgcgccgaaaaacagtaccacacccattacgataaaataggggtgaaaagacaggatcagtcctgcggtggcagcaataccctttccgcccttaaatcccatataaaacggaaagttgtgtccgatgatggatcctgcgccggtatacaggcacagcagataaatattctccggatgtccggtactgaataaagctctggtgatgcatacggcgatgatacattttaaacagtctcccgcaaacacgatcagtcccgccttcgttcccagtactcttaaggcattggtggtaccggcattgccgcttccgtacttacggatatcgattccctttgtcttgccataaaaatatgcagtctgaaacagtccaaatacatagccgatgaataaacagataacacgttccattattgatctttttcctttcgttctctgatgataaaccggaggggagtacccttgaaaccaaaggtctcccggatctgattctcaatatatctggtataggagaaatgcatcagttccttatcatttacgaaaataacaaaagtagggggttttaccgctacctgggtaatgtagtacagacgaagtctcttacccttatcggaagggggctgctgcatggctacagcctctgccataatctcattcagtacgccggttgccacacgcatggcatggttctcgctgacgatatcgatggtctcgaacagcttgggcagtctctgacctgtcttcgcagagacgaacagaagctccgcatacggcatgaaggacaaagtattgcgcaccttttccgtaaatttgtaaatagtcttgtcgtctttttcgatagcatcccacttattcacaacgatgatcgtagccttgcctctctcatgggcaattccggcgatcttcgcatcctgctccgtaacgccttcttccgcatcgatcatcagtaccacgacctccgcacgctccacggcactgacagtacggacgatcatgtaacgctccagttcttccttgatcttattcttacgtcggagtcccgcagtatcaatgaagacatattccttgccgttataagtgatctcagtgtccaccgcgtctctggtagtacctgcgatatcggatacgatcagtcgattctcacccagcagcttattgatcagggaagacttccctacgttaggtttaccaacgatagccacacgggtgcggtcatcctcttcttcctccgcctgctccttatcaaaatattccgtgacagcttctaacatgtcaccgattcccaagcggttcaccgcagagatcggatggggatcaccgatacccagattatagaattcgtaaacatccgccatatacttctggaaactgtccaccttgttgacaaccagtaccaccggcttgtgggaacggcgcagcatgtccgccaccttggagtcagcgtccaccagcccttgctttacatccaccaggaaaatgatcacatctgccgtctccatggcgatctctgcctgttcacgcatctgggataggatcacatccttgctgtccggttcgataccgccggtgtcgatcagggtaaatgtcatatccagccaatggatatccgcataaatacggtctctggtaataccgggcgtatcttttacaattgatatattttcgccagccagtgcattgaacagggtggatttacctacattcgggcgtcccaccaccgcaacgatgggcttggattttctctttgccataatttcctccatttctgctcctgcttcttattcctgcccggaatcactgattccaagcaacgcatccacaagatcatatccgcttgattttacaatattcacgggcacttgtaaagacttttccagttcaggcaccgttacatcatccaggaacagatccgctccactacgcagtacatttctgggcagatataaggtatctcccagtttttttccctttaactgtttttcaatatccccgccggtcaaaagtccggacacagtgatcatctctccgaaaaattcatttacgatctcatatacatgaatctgcagtcccggatattcctgcatcacctcttctgacattctctttaaataaggaaaagcaagctttcccgttgccagggagatttctctggtgccttcccatggaagacctgcacctgattgtttttctgcaattctcctctcaagtccgtcatggaattcatctaatagcagtcgtatcatacctacaccgttttccagctggagataaccatcatagcgttcctcttcaggcacttctcttcccgccagaatataccactcatcactggcctggataaaatgtgttccatacttttccatacagatcttctgatatttctcgatcagatctatgacttctcctgcatcctgcgcgttaaaaggttctaacggatacagcccgtcacggtatttagacagccctaccggcaccacagagacactttccacattcggaaggtactccatcagcttctgaatactgaattccagctctttcccatcatttacccctttgcagagtacgatctgtccgttcatccggattccggcttcattcaggatatccacctttttcagtgcctccccggcgaaacggttattcagcatcttacagcgcagatctgggttcatggtctggaaggaaatattgatgggcgacagatgatatctgcagattctgtcgatatcatggtctgacatatttgtcagtgtcacataatttccttgcaaaaaagacagacgggaatcgtcatccttaaaatacagggtatcccgcatgcccttcggcatctgatcgataaagcagaaaatacatttattatgacaatgtcggtattcgtccatcagaccgttttcaaattcaatgcccagatcctcgtcgaattccttgtcgatctctaagagccactgctctccgtccgctttttccaccagcatttcaatatacgtatcctgggtgagaaactgataatcaaaaatatcctcaatttccgtgttatctatggcaagtactttatctccgggagtgatctccagttcctctgcaatactgcccggttttattgtttttacaatatgttcttttttcttcatttaattcacctgactaactttcttctatcccattgtacaagaaattccttgacgtgtcactagcataatgatataaaataattgtcgctttgacatatttctacaatattataataactatgatgccaggggcaaaaggtctaagcccacatgagcttgctcatgagtgggtgaaagaccttatgacccgccccgatatgagcataaaagtgggatgataatcccacgatatgcgaatagcgggtaggattgtgagagtgcgtagcacgaaacaatccgtaggcatcaaagtcgggggcttttgcccccgacatcataactatctcgtccaggagggacatcatgcctaatttacacgaactggaaaatgccatgcctgtggctcctttgaagatcatcgccctgccgtccgcagagaaaatggggcgccgcatcaacgactacatggtagaattccgcaaaagtatccacaatgacaaagtgaaaaacgatcctgcctttcacggctatatcgagagcaattatctggtagacgtggatgtaccccgcttcggcagcggtgaagcaaaggcacagatcggtgagactatccgtggcagggatctgtttattttaacggatgtatgcaatcatagtattacttacaacatgaacggctataccaaccatatgtctcccgatgatcattaccaggatctgaagcgtgtcattggcgcatgcaacggaaaagcaagacgtatcaatgtgatcatgcctttcctctacgagggcagacaacatcgccgcagcggccgggaatccctggactgtgcctatgcactggaagaattaagagatatgggaatcgataactttattacctttgatgcccatgatcccagggttcagaattccacacctctgaacggctttgataactttactaccccttatcagttcattaaatcactgttaaattccgaggatgatctgatcgtggacaaagaccatctgttagtaatcagcccggacgagggagctttggaccgtgccatctattttgccagcgtcctcggtgtagatacaggtatgttctataagagacgtgactactccaccattgtcaatggcaaaaatcctattgtggctcatgaattcttaggtgacaacattgacggcaaagatatcattatcatcgacgatatgatttcttcgggaggaagcatgctggataccgccagacagttaaaagccatgaatgcacgaagagtttatatctgttgtactttcggtctgttcaccgatgggctgaagaacttcgatgctgcttatgatcatggggacttcgataaggtcattactacaaatctcacttatctgccccccgaaatctacaccagaccttatttcgtagaagccgatatgagcaaattcattgcttccctgatcgactttatgaaccatgacgcttctttgtctaacgtcatggccactaccgacaagattcatggtattgtagaggcatacaacagccgaaaagatatgaatgaatttcatttttaactagcaaacctaaaaacgcagaagcctgtaatggctcctgcgtttcagactgtagacaaagctccttcctgtgagggagcttttcttgtgtcatgactgcaaaaattatgtacttacaagcatata

SEQ ID NO: 11272 - DNA, 276112 bp, Unknown
  gut microbiota DNA sequence
catggaccatctattttttccgaagtatacaaataagtcttacgggtatcatttgccacaaagcagatacaaaatcggccttcatgatagcgcagagaagctgcccacatgccctgtccgtaaatattctgaccgcttttcagttgctgcgcatccgtatgatccaacgtctcatagacataagtcacatgctcccagtgcaccagatcaaaagactgcagaatctcacagcccggcataaagtgcatggttgtggataccatataataggtgtcttctacgcggatcacgtccggatctggataatccaatcttgttataggatttacattcaatgtttattcctttctgttttatctccatattctttctttgttctattctatttttactattttatctttgtttcttatccgtctgccttttcaactcttctctgccccatttcactattgctaatatcaaaatctcacagtaaaatataataatcgaaaaagatcgccaacgtgctgaaaatgactataaggttaatctcaaaactgagatcatgattgaagatctctatacattaacagtagtatgctttttagttgtacgtaaaatgatatgccctagcaccatgactctttaatgacacactaaggctctttggctcttctacgtgctctccgctccaaagctccgttccatttactccatcataaatctccagatcggcaagcggtatggatatgccactgtctttatcacccagattaaataccgcgacataatatccaccctttgtatctgctgcaatccacaatgcatgctctataccatcgatttcacgtctccacacctgatgcgaatgccgtgcatttgcatgcatggcaagtatttcagaattggttaccagattcatagtgaattcgtcaaaccctgtcagctctcctcccagcatcaaaggagaacgcatgatactccagagtgtcagcatggtgatctgctcatcctgtgtgaaattcgtccagttattcacatcatatacctgccgtatcggtccgaccggaagcatatcggcatccggccagtgccctgcacctgcatgggtgcaccatttttctgctcttgaaaacatatcatataacagttcccacttatcccagaaatcatcggtgattctccacatattggaaatctgcttataaagctctgccttttctaaaagagcaggtcccggcgacagacttaaaaccatgggtcttccgcaaccatgcaatgctttgctcagcataatcagttcggattcctcatgtggcagttcccgtgcaatatcatcacatttaataaaatccacaccccaggaagcatataattcaaaaatactgttatagtattcccgtgccccgtctttctcaggatctacaccatacatatccgtattccaggcacagatactgtttgttttggcaatttcccgggcatgtctgtcactgttcatgattttcgtgttctgatgtacagcctgtcgtggaatccctctcataatatgaatgccgaacttcaatccaagagaatggacatattctgccaatggtccaaagcccgcaccgtttgctgcggaaggaaaacgatttactgcgggaagcagtcttccatactcatccattactacatccgcaaaaggatgatactcattggttgcagcataaggctcataccattggatatccaccacaatatattcccaaccgtactccttcagatgctcagccataaattcagcgttccgtcgtacgatatcttctgtaacagccgctccataacaatcccagctgttccaccccataggtgctgttttcatcttcatccgttttataccctctcgatatcctgttaattctgtccgtaatatgcatttttgcaccctgcttacggaaataatgcttatcctgtaattcctgcggggcaggtgctacctgcggatgaatcagctcgattcgatatgccatcttggcaacctcttcaagaaccaccgcattgtggacggcctcctttgcatccttgccccaggaaaaaggaccaatcgaccattcccttggaaagcaagacaacagtctccacattcgcggtccatgggaactggtccacggcaacagctttgtccacgcggtagccattctctaagaatacttccagatctctcacgaggctggtgggcttgcaggagatataaacaatatgctccacaccgtaggcaatgatcttcggcagtgctttgggatggatgccgtctctggggggatctaagatgatcatgtccggcttctcttccacttcatccagtaccttcagtacatctccggcgataaattcgcagttatccagtccgttggcggcggcgtttttctttgctgcctccacggcttcctccacgatctccacaccgatgactttcccggcggccggtgccatgagctgcgcgatagtgccggtgccgctgtagaggtcgaacacggtcttgtcgctgccacccaggtcgcccacataatctctcgccgtctggtacagtacctccgcactgtaggagttggtctggaaaaaggagaatgtggaaatcttgaatttcaaccccagcagttcctcataaaaatactcctgtccgtataacaactccgtatggtcactctgcaccacatctgcgatggaatcattggtgatatgtaagattcctgcgaatttaccgataagctttccatcctgttccagggaaagcagcagctccttaaatccagcggtcagcgcatccgcatctaaagcattcacgcttccttccaccgccgtctctccctgccagggatcctgggaggtcgtcaccagtgctaccagaatctctccggtgcgggacgccttgcgtaccagcaggtgccgtaagtacccctcatggctcattctgtggaaaaagcttaccttcgcccgggcaaaataatctctcactgtctgtaagatcagacggtaatccgcatccacgatctcgcagtccgctacggtcacaatgtcgtagaagctgcctctcttgtgcatgcccagtgccagcggtccatccttgtactcgtctccgaaggaaaattccatcttattgcggtattcataagccttcgggctgcccttgatgccttcaaaaatccaggcttcttcctgcttgtttaacacgctgtccagcaggcgttttacctgttcttctttgaccttcagctgttcttcatagggaagagacagataggtacatccgccgcacaacccaaaaagggaacatgtccggccggtttctaaaggtgacttctccgccacctctaaaagccttccttccgccttccctttgcgtactttattcactgagaacttgaccttctgtccgggcaggctgttcttgactactgcagtctcttctcccacacagacgatccctttgttgggaaaatcgacccttacaacagttccttcatatacctgtccttttttcatgggttagttctctccttcatcctcgaagaagtcgtcgtcatcctcttccacgtcatctgcttcgtcctcgaaatcatcctcgaagtcttccagataatcctgtgcaaagaagaaatgatatacggcataagctacagctgcaacagctgctacggcgccgatgatcgccagtacccataccagaacattgcgctccttcttctcttccacttccttacccagaagcttattaagcttcttcagttcgctgactttcagttcgtttaatttgtcaaggtctaccagattttcaattctgttcatattatttacctgcctttccggcatccggacttttctgcggatgcaaagcaattgttttcattcctttatatgataccatattttcgtaaaaaatactatacccgttttaacttggcaaaagatgcatacatgatcttctgccccgcctggtcgaattccactgtaaccttataatccctgggttctctcgcgacatttaataccgtgccctcaccatatttgatatgacgtactctgtctcctaccgtatagtccagtgcatccggtgccttgaattccgttcccttctgcagtcccgccagctgattgagtccattgatccccttggaaatataaggtttgtctgcttttgccgtaacgcggggcttcaaggttgccttgggtcttggatcaaatcccgtattgccatagcctccgaagccgctgcccgaaccgtttccggaccggggagttgcaatcgcttccagtcccatggcacgaagggctgcctcattggctcttctcgtctgaaaatcctccaggtcatcatcccggtatcttctgttttgcggcagggtattatccataagttccttcgggatctcccgcacaaaacggctcacgggattgtactgtgtctcaccgcggagcattctgcttctggcacaggtcagcgtcagatcctccttggctctggtgattcccacataagccagtcgtctctcttcctcgatctccaagggatcatcggacgcaatcgtcataaagccgggaaatagtccatcctccatgccggcgagatagaccaccgggaattccaggcctttggcactgtgcagagtcatcaaaagcactctgttatcgccatcttccacattatcaatatccgctaccagcatgatctcttccaaaaattccgacagagaaggctcatcgtgggtctcctcgtagactgctgccttggtgatcaattcatctacgttcccgagacggtcctctgcggattcttcatcctgatcccgcagatattccgcataatcgatccgttctaataaggacttgatcagatccggcagtgtataggaggacaatccgctgcgaagcacttcgatcagattgacgaatccacggatctttgcttccgctcttcccagtcccctgatctggtctgcctcgcacaatgcatcaaataacgtgatatccttcatctgtgcataatccgccactttttccagcgatgccgtaccgatgctccgtttcggcacattgatgattctgcgtagagccacttcatccctgccgttatcaatagtctttaaatacgccaggatgtcccggatctcctgtctggcatagaagttcacaccgcctaccacatgatagggaattccttccaccaccatacgttcttctaaaagtctggactgggcattggtacggtacagtactgcacaatccgcataggcaactccatttttgttcactttatcagaaatatcgtctgcgatgtattccgcctcttcataagcattgtcaaattgtctgaaatgtattcggctgcctgctcctttttccgtccacagtgccttttctttacggcctctgttgttacgtatcactgcgtttgccgcatccagaatattctgtgtggaacggtaattctgctccagcttgatcactttagcatccggatataccttctcgaaatctaaaatattgcggatattggcaccacggaacttgtaaatggactggtcatcatcacccacgacacacagattgcggtagccgtccgccaacagccggatcagttcaaactgcgccgtattcgtatcctggtactcatccaccatgatgtatcgaaagcgctcctgatagttatagagtacctccggacagcttttgaacagctccaccgttttcacaatgatatcatcaaaatccagtgcattactcttcttcagggtgtcctgatattctctgtaaacctttgccgtcacacttttgcgataatcgcctacagacttgacctcgaattcccgtacatccaccagttcatccttggcagaagatatttcagacagcagcgtccgctccttatacatcttcgtgtcgatgttcagacgtttgcagacctgtttgatcacggtcttctgatcgtctgtatcatagatagtaaaattcgtatcatatcccagtctgtcaatatgtcttctgaggatcctcatgcaagtggcatgaaaagtggctacccacacctgatccgcaccgaaaccggcgatctggtccacacgttcccgcatctcctgtgctgccttattggtaaaggtaatggcaagaatgttccatggattcactcccagctcatcgattagatatgccactctgtgagtcaggacacgggtcttgccgcttccggcgcccgctaacagaaggagcggtccttccgtatgaagcaccgcttctttttgttctttattcaaagtatcataaatgctcatgtatgactaattatccctttcattgaattcctgtaaaaaagttctgaattccccgatcggcattggttttgcataaaaatatccctgcacgatatcgcaatccgccagccggagcatctccagctgttcactggtctccacaccctctgccagtactttaaagccgagatgtcttaacattttagtcaaatattttataattgtcaatgcggtttcttcccgttcgctgttcatggtatcatccaggaactgtttgtccagttttaccgtatccacagccaccttggataacagattcagcgaagaatatccgcttccgaaatcatcgacagagatctccacgcctctgtccctgagggtttccagattattggtcagcttattcagatccgacataaataccgactctgtcacttccacctccagcagatcgccgggtaccttatagtctttcaggcgctttaagatattcggcacaaaatctgcgtattcattgtgacgtctggaaaaattaacagagatgggtaccacttcttccccctgtgccagggcatcacgcaaatattccatgacctgatccagaatggcgaaatcaaccttggtaataaacccatttctctcaaaaatatctataaactttccgggcattaccatagttccatccgcttttatccagcgcaccagtgcttccgctcccactacttttccggtatgaagagataccttaggctggagatatgcatggaattctttattattataggcgcttaccattccggatacaattgttctggtattctccaaatctctgcggatcttgtccgtgtaaatttctacggcactgtctaccttctgcgtcttgcattgttttctggcctcattggcattatccatcatggaagataccgaccagtcattctccgtgatctcatacaaaccggtggcaatgaccagattacactgatcataccggctgttgatcctcttcacaaaagaattcgtaaacgtcaggtacgcctgtctggcatcctccacagaatcttccttcagcacaccgacaaagtgatcggaggttacacggcagaacaatacgccttcctgacatttttcctgtaattccacggcaaaatcatgcaggatacggtcgcctacctcgtagccatacatttcattcacatactggaaattagaaaagtcagaggacaaaaaatataatccggtctttccattcgctgccatataggcttctaatttgtctacgaacttattgtacaccggcagtccggtcagcgcatcataattcagtttccggttcagttccctttgatctttttctgcatttttcagcatgcgaagcctgttgaatatctgatgggatattctgcacagggcatttttctcctcttcccaggttctgtctgtatggcggtctgagaagataacactggcctttaatcccttcgaagcggtagacattacgatcatcacagactccgcttcttctttgtagatattcggagtctccgactgtctgtaaattgcggcgccggattcgtctgcacgtttccggattctgtcccattcaaatactcccgggtgcagtattcttttgacaaaatttttcttttcttcccggttccattgataacggatcgacggtcctgcctcatttacttccacacatatcatatcatcaatattgaaaaaactgcaggtacgttcactgatcaccttcagggcgctggtcagattcggtacattttccaacaggtccatgcagaacagcaccagatcttccgcgctctcgaactgtgcctccttgtgaacgatctcgtcctctttgttctcctcactgtccaggtagctttgaccgggcaatgccacaccctccttgacctccagaagatcataagcgcccttttcccgactcttcacctgatacaaggctgcatctgcccactggaacagcagattatagtctgtcactgttccatccgtaaccgcagctcccaggctgcaggagatatgcagtcccgttttatcatcatcataacgatcagacatacagtgattcagctgtccaagcttctcttccaattcctctcttggcatgtcctctacatagcacacgaactcgtctcctccgatcctgcctttcagcgccttaggaaacaatttactcatttcatccgcaaaagaacacaataccgcatcaccaaacagatgtccgtttgtatcgttgatctttttaaagctatccacatccaggacaataaggtatcccacctgtccccgttccattttctgcagtctgtttgtgatctgctgcttgatggtggaatgattcaaaagtccggtcagagaatccttttgtgatttttcctgtaattccttttcctttttcttctgcgcatcaatatcacagaccttacccaggacacgttccggttcttttttctcattataaaaagtctgtccgatgaccttcatccagtgaggggtgccttcctcatccgtcttgcagagttcaatacaaatatccggactgccgctatgcagtgcttccgcaagctgctgttccactacatccgtgcggttgtccacttcccgaagaagctgctctgtgtacccttccgtgatctgtccgcaatacagactgccctcttccggacctgcatagtgcatttgatcctttgcgatatcatattcaaagatcagatcgccggacatccggatcacagccatcagtttttcccgttcccgctgcagttccttcgttgtttcctccagccgtctgtctatatctttgtttttatctaaccctattattttttcgtccatacagccctctcagccttctctatgcttgttccactctgctgaaattccagatccgcagattatattccacaataggtgtatcacaataaatgcacttttttgccccaagtccgggaagcggtgcaccacaattgggacaattcagggccagacctgcatcctcctggttctcgaccatatcctgatcctggatatagaccagttccacattgtattttgcctgttctttccgttcttcactgcccccgataagcttaccgttttctttcaacgcatggatatattctacggctgactgcaggacaatactctgtcttcccttctgcttccggtactgatgtatctctgttctgtgaatatgtatattctcaaagctctccctctgtgactggttctgcagcatctccagccgcagtctgagctgttctttcaattctttcgttccctccgacaaaagtgccggattctgtctggtaatactttgtaaataagaggtcagcacgttctccgctctgctcttcatctcatcataatggaactcgggaaaatctctcataatagaaggcatatacagatttgtcgcggaagatacggacttcggtgtcatctccacttccgcttctctctgcttcatgccctcgatcatggaatctgtaccgaataacattctggatgtatcccgtaatttttcacggatcctgcaataagcataataaatgatccctgccagtaccagacacaataccagtataacaataatagcgatcagacttccgttcatttacatttctctttctttttcattcataacagttcagtacagcagatatcataaaggtatctgctgtactgtttccggtaaatatattctgacgagtatgtattatactctgtcgttgtcatcaaaaggatcgccgcactccgggcagaacttaggaggatgtgcaggatcttccggctcccagccgcatttatcacatttatagatcggtgctccttccggcttctttgctccgcattcggaacagaacttgccctgatttactgcaccacagctgcaggtccagcctgcgtccgaaggcttcggtgctccacactcagcgcagaacttaccacggttatccgcagcgccgcagctacagatccagccaagtaccggtgcctgcatcttaggagcctgcccctgcgcgggtgctgcctgtgcctgctgcataccactgttctgctgggcatccatctgatacagctgtccggcattgataccgcctaccatgttcgccatgttcatgcctgcaaatgccatcatgggaccggtagaggtgttggatgctgccatcttcatagcctctgcctgtgcagcggtcatggtagctgctgccattccggtattgcgcagtacagcggttctctgcagatctgcgatggtctttgcatcctcatcagggatcttcgcagaattgatattaatggtaacgatctcgataccacgaagtttggtccacagatcggaaagctcttccttcaatgcttctgtcagatcttctgtgtgagcagggatctcactgggacgtacgccctgtgcagaaaccttagccagtgcaggttgcagagcggtcaacaattctgccttcatcttcgctaccagttcgcttctggtataggactctgttacgttaccgcatacatttttatagaataacaaaggatccaccaggtggaaggaatactcaccgttacaacgtaaggaggtatccagatccagtccgatattctggtcaattacacggaacggaatagggcttgccgtaccaaagaggttgttcatgatctccttgatattgaagaagtagattctctgatccttcgctgcattaccaccaaaggtaaaacgttttccgatattggaaaaagtattcttaacgctctcgccaagattgccgtagaacaagctgggttctgtggaagaatcatatacgaactcaccggcatccgcacagaactctacgattccgccctgatccacaatgatcatacactgtccttcgttaactgctacgatggaaccgttggagattatgttctccacacccttggtgttgctgttacgtccattggttactcgctgctgtccttttactaccaatacatcgttggaaagagaatcacagtagaaatactctctccactggtcagccatcatgctgctgactgcatcttttgctgctctgattaaacccattaccgcacctccattttatatatgaaaaattgattttttcacatctcttatattttagcaaattttacacattccctcaactgcttttcgtaaaatatcgtcatttttcctttacaatgtgtcttttttctactaaactatgatattagagatgtttgattacactatactataaaaggattaaaagaaatatgggtaaaaaagctacaaaagccgctgataatatgtactatctcgcacgatgcgaagctgccaaggaaaatccggacttcagcagccgggaaaaggccgctgaactggtaggcatcgaccgcaccagactggcaaggatcgaactggataccatcgccccatatccggaggaagtcaaggctatggcagaggcatataatacaccggagctgtgcaactcctactgtgccagagaatgccccttaggacgcaacagtgtatcagaggttgacattgtggactttgaccggctggcgctgaaagtactgggatccttgaaagatatcgatacacttcgcgcttccctgatcgctatctccgaagacggcgtgatctctgaggatgagcgtccggcatttcaggatattctggattccctggagaagatcagtaccaatgccaaggcattaaagctctgggccattaaaaatatacacattcaggaggaggatgtctgatcctcctccttttttaaactatttttataacactctcttcgttttccttattttgccgccgctttctcagcaaattctgtggtcaccagtttttcatagggcactctctctttcagtacatcagagtcctccagaatattctgtaacagatcaaaggcatctttgtggaagatcagatcttttttccaggtatcctgttcctgatatctggcaacgatggctgtcagcgtatcactcccggtctctgcgaactggggtgcaatacatttggcgatttcttccgcactgtgctcctgcacataatccatacctttttgcagggcatcggtaaatgcctggatcgtctccgcatttttctctatataactcttcctggcagagaaagaagtatacggtacatagccggattcctcgcctaaagatgccaccacatagccgtcgcccttctgctctaacagcgtagcatgcggctcgaactcaatggtaaagtctccctgcccgccagaaaaagctgctgctgtggaaccgaagtcaatgctttggtcgatggacagatccgttgtcggatccatattatttttctccaggatatattcaaataccatctccggcataccgcccgctctaccacctaagactgtagcaccctttaacatatcccacgaaaagtcatcgataggttctctcgccaccaggaaatttcctgcccgctgggtcagctgggcaaaattcaccacatagtcttccgttcctccggcataggtgtaaatcgtgctctcactgcccatgaagccgatgtccgcctcaccggtcagcaccgctgtcatagtcttatccgcgccaaatcccgttacgagctccaggtcgatcccggcatcggcaaaatatccttcctcgatagccacatacatcggtgcataaaaaagagagtgggctacttcattgagcaccactcttgtcttctttggtccgttcgtctgttctgcattgccgcagcccgtaagtgcacctgccgcaagcagtacagccaatatcgctgccattactttctttgttttcataattgtttatcctccctgagattacatatctattctatgtaatcccaggaaaaatgttccggaatatttacaggttcgccttgatcttgtcgatcatctcctgatattctgcatccgtcaaaaaggtcttgccgggattcatctcgaaagtgccgccccactcgaaaccgtccttgtacttcgggcacaggtgcatgtgcagatggcagccggtgtcgccgtatgctccgtaatttaacttatctggatggaatgctgcatggatggctttcgctgcatgcgccacatcctcaaaaaataatcttctctcttcctcgctgatgtccacgatctcactgacatggtccttgtatgctacgatgcatctgccgggatggctctgttccttgaacaggatcaggctgctcaccttcaggtcacagatgaaaataccgaacttatctaacagttcccctctcatacaatatccacaatttgcgtctttcatttgttctcctatctgcccgcttgcggggcgtgccttctccggctgtattcttattccggtaacaccgggtggtatcagctacagtgtgatgttgatcagcttatgaatattctccggggcgtaattcaacaccagctccgtagggaaatccagttccctcatcaactgttcggtctcgacaaattttcctatggcaaaacacatatggctgtccgttcccattataacaggctgttcatatttcatgcaagtctttaacaattctatgatattttccctgccgccttgtcttgacgaccggagatttagagaagaattgttcacttccaatgcaacatgcgcctgctttgcttcccgcaccagttcctcataatctaaagggaatctgccatcatcgggatgtcccagtattttcacataagggttctgaaatgctctcacggaagctaacgtattctccttacgacttcccgcagtaaaagcaaaaggatgaatgctggcaagcgcataatccatcttctgcagataacgttcccccaggtccagcttaccgtccgcgtcacagatattggcttccacaccacacaaaagatggagccttccacctgtcaccggtaccactctgccgctaacctcttctctgtcatactctctgggaatcactttataattgctaaaaaagaactcatgcggtcctccgggagatgtgggaccatgttcactcattcccaggtatctgatcccgactgccagtgcagcgtcaatattttctaataaagtactatacgcatgccctgctgccagagaatgcgtatgaagatccataaatgctttcataaaatttttcctgtttctgattttgctacttatttttatttctctttatttttcttgtgggtttccttttcgggctccctggctttcgcatcgtttgccagttccgctacaagctgttccacgatcattttcttcatgtagacatcaaaacttaagagacagatcaaggcaaatttctgtaagaattctcgttcttctccggaggtctccgtaaaggaattctctgctctgcggaatttgtccactacgtctttttttaagtcctccagctgttccttttccaaagatacgacttctttatataagctttccaggtcaaatgcctgtccattttgaaaataatgatcggtgatcggctgcaacagagtctgaatctcattcatgggaatcacgcccttatagtaatagatgaaaatgagcatcagaacatgttccttggaatatttcttcttcaccggaggaggaagcagatcgttttttgcataattgttgatcatggtcttggtcaggacgcggccctcggtctgcgggcgtactgccgaacgcagcttgcgatccataaaagtcagcacctgatccatatacagatcaatattcggaatgtcttctgacttgatatattccactttctccagactctgtaaaatcgtctgaagtaattcttctgttgttgccatactattccagctgtcctttccggtaatgttactcgagaacccgtgcttcgcactctgctgtctgtttcgcagctacttgttttctctatgtggctattatatagtattcaaaactacatgtcaacacttccatcttttctacattctcattttctacaccctttgaaattatgaagattttataactattttgtttcacgcctttactttaaaactttagtatgctaaaatacagatagttgcgttgtacggattacaactatggaaaggtgtgtcgatcatgaataaaaaaatcaaaacggatgctgtggattctctgtttgatgcagtattgtgtcttcagtcccgggaggaatgttacagcttcttcgaagatctgtgtacagtcaatgaattattgtctctgtcccagcgttttgaagtagctgccatgctgaaggacggcaagacttatctggaaatcgccgagaaaaccggagcctccaccgctaccatcagcagagtgaatcgttctctgaattacggcaatgacggttatgaactggtattcggacgtatggagaaaaaagacgttggcaggtaatcaccaacgtctttttcttttatcttattctgctgtttcttgtgctgcagccgtattttgcgtctgttccggtgctgctgtattttcctgattttctctcttttcttcctcttccacttctttcagtgcttctgcaattgcagcctttgcactcttacgtcccgcacgcgtcgctttggctgctttcgcttttccctttttatccggtaccgcctggttcatatcgatcttaccctgaaatatggcatgctcatcaatcacaatgaccttggtggcaatatctcccagtacctttgcagaagccgtcagttctgctttttccggagccgtaatatttccggtcacttctccgccgatcagtacggaggccgcctgtacttctccggtgaccacactgccggcaccaagaatcagactgcccgttaccgttacattgccgccgatcttaccatcaattcttgcagagccatccagcgtaaaatcaccactcaactccgcaccggcaccgatcagtgtatttatttttgtatctgtactctttttacctaacatgtattttccaaacctttctgcaatcagccgctgattgccaacatatctataggattgatataacttccgtccttctgcatctggtaacccagatccgcattatcttctcctatcacaaacagggtcgtcccctgcaccacggaatctccggcagctactgtggcatctcccttattccgatagattgtgatatatccgttaccatgatccacccacacactgtgtccataggtctcatcatcattcactgccattaccgtaccgcttgctgctgcaaccaccgtagtgcctaccgatgcatggaaaatgcacataggctcaccctccgttacttcttccatagatgccgaaccggtcagcgggaattccgtaggaatactctgcttctccagggtcgccgacaactcgttctcactctgcaccttctggcttacggtatcactcagtatctggatttcttccgcctgttccgttacctgagcctccagcttgctgttctgctccgccagtgtcttgttttcctcttccagggctaccacctgttcatggcttcgtctgccggcattttcccataattgaccttcatagataaaatagccgatcactccgccaatgagtatacacagcataattacaattacttccgcgagccatgcccgtatccgaaactgctttacatttgcatctgctgcatcggatgtaaggatcagcacatggttcagtttccgcttgtgtttacgttctttcatagagtcacctccgataaatatcactccattctatcacatgaaatcccttacagcaatcatttcttaacaattttgtaataaattcccaatattttctttcatttatctctatttgcaagggaatttcccatattttttgtgcaaattcaataatactatatttacttttgatatgggctgtgctattcttatgctgttgtcgggaagatcgacagcacagctgttagaaaagtgatttttggaggtatgtattatgaacaaaggtaccgtaaagtggtttaacaatcagaagggttatggcttcatctctgatgaatccggcaaggatgtattcgtacattacagcggactgaacatggatggttacaagactctggaggaaggagcagccgtttctttcgatatcgtagatggtgaaaagggtccccaggctgttaacgtaaccaagctttaattttataaaactacagcgtacaaaatgccgcagacattatttgcctgcggcatttttatattcattaaacttcctcgctgcatatcttcagtacgtcttcccacttcatactgcctccgaacaggtccagtgcacttccgatggtcacattcatccggtttcgtcccaattccttcagaaggagcagatcttccatggaatggacaccacccgcatatgtgacgggattcccggtgtaacctccgaggttctttaccagatcctgttcgatcccccgggccttcccttccacatctaccgcatggatcagaaattccccgcaatatgctgacagcttttccagcagcgcctcattcacgatctcttccgtcagcttctgccagcgatccgtcaccacgagatacttttctcccacacgtttacaactgacatccagcaccagccgttctctacccaccgcgtataccagtcgttccagtctgtcataatcgatcctgccctctctgaatacataggaagtcacgatcacatgagaagcaccggcattcagataatctcctgcattttccggagtaataccgcctcccacctgcaatcctcccggatacgcctgtaaagctgccaatgcttgttttctggtctcctcatagtagggactgtcataggaatttaacagaataatatgaccaccttttaacttatttttttgataaaatgctgcgtaaaaggctgcatcctgctccgacacaaaattttcctgtgcctgatcgccactgtctttcagacttccaccgacgatctgttttacttttccattatgaatatcaatacagggccgaatttccatttatttcctcatttctgcagacgcctctgcatctgtctgttttggaatccatacgtatattttttccaaatcctcacatactacccttaaaccggtcatttctgtccggatagaacattcccgcaatgggacattttgaaatggaggacattatgaaaaatagcgcaaaatccaagttaagtaaaaagttactggtgtttggaatcctcactgtttacctgtgcatggcaacagcctgcggtacaaacaaaggaaacggcaacggaaatggcagcagcatggctgccactccggagagtacggttacgccgcccgcggagaaaggcacctctgccacagacaacatgggtgataccaatggcaacggtaatacggtatccgagaatgattccatgctggataacgccggcaatgcggtagatgaagccggtgatacggtaggcaatatcgtggatgatgctgcaaacggtatatccgatatcacgaacgatctggtaggcaatgataacgctaccaccggaaccgatcagcgataactcagacttcttccatgatcgtaccttcccggtaagcttccaggagttcttccagatagaagatattctcctggatttccttgccggtatcggtatccgccaccatttttctccgggaaaaattctccactacaatggaatccgagaaaatatctgactcctttaaaatagccgcttctgtagattcaaaaggttcatgggccaccagacgcattccccgggaattgcataccagggtatatccggcgattcccgtctttttctgataggccttggaaaatcccccatcaatgatcaacagctttcctccgcatttgatgggtgactctccgtgaatctgctctacgggaacatggccgttcacgatgtgtgcatccgccttgtccaggccgaactcttccagaatactgcctatgacttcctcattctccaacagcttataataactgtttttttcttctatgtgtgtttccttatcctccagaaaataacgttcgaaagtagccattttggccttgccgaataccggggagccggggcctgcccaaatataccagatcatatcctgtcctaacgcacgttccttagcatccttggcgtaataacctcttctggcatggtattccaaaatatcatacagcgctttcccggaatattcttttccgcagatttccacctgtttgaagcttccgtccggattcagaggcacacaaccgtgatataacagatttccattgtagatcttatacattccgcctttggaatagaggaattttacatgtctctgtaatttttcacagcgcatgaacacctgctgcaaacgtagcatgaccttgctctcttcctcggtgagttcataggggtgttccggatccaacgtaggaaaatccacatccttcataggataggtttttccatccacgcagaccgtctttttctgaaaatctattttatccagcagcatcctactctccatgtggaattccgggtgccgcatgatcagctgtccctccagtttgaactgtagaatggcaatggctttatgcattttcgtatccagacccagatctttggtgttataatctgtattgaattttatggcaaatgcatcacagtcagtattttcataggtttccagtgcaaaggtggccagtggaagcaggttaatgccgtagccatcctccagggttgccaggttgccatatctggcagacatccgtatcacattggcgatacaggccaggcttccggccgctgcacccatccacaccatgtcatggttcccccactgtacgtctaccgaatggtattggcatagtgtatccataataatatgaggccctgggcctctgtcgtaaatatctcccacgatatgcagatgatcaatgaccaggcgctggatcagatggcttaatgcgatgataaattgcggtgccctgccgatccggatgatggtatggatgatctcattatagtatgcttctttatcctgaatttcttccttttccgtaatcagttcttcgatgacataggcgaaatccttcggcaatgcttttctgaccttggatcttgtatattttgaagagacacgcttaatgacctgtaccagccggtgcagggatattttgtaccagtcttccagattgtcctcttctctctcaacgatctccagcttgctctccggataataaatgagagtggccagactttttttatccttactgctgatggtgttgccgaattcctcgtcgatcttacggcgcacggaaccggatccattctttaagacgtgattgaactgctcgtattcgccgtggatgtcagtgaggaagtgttcggtgcctttggggaggttcaggatggactggaggttgatgatctccgtggaggctgccgcttgtgttttatattggtgtgagagggtctttagaaccttctgttccatttcgttcatgaagttcgcctttctatgtccccgtggtccacattggagcaagaaccgcagacccgctttcgcttcggacgcttaaccgtaacggtacataagcggtcaaagtacgcccgctaagtaccgacggttgcttagagtctgcttgtccttaccccaatgtgtcccactggtttcttgaaaaattcagcaatatactgattacatcgctgcatcgatcacgttggacatgttgtacatgccggcgggtttgcctgccaggaatttggcagcctgtacggcacctttgccgaatacagctttggagtaggcggtatgggagaaggttacgacttcgtctgctccggcgaagatgacatcgtggtcgccgacgatggtaccgcctctgacggaactgataccgatctctttcttgggtctgcgttctctgcgtgtactgcggtcgtagacgtattcgtattcgttatcgaattcttcgttaatggagtccgccagtgccagtgcggtgccgctgggagcgtctagtttcaggttatgatgtttttctacgatctcaatatcaaatcccgcaggtgccaacactccggctgcttcttttaacagttttaacatcaggttgatacccagggacatattggcggattttaagatagccacctttttcgctgcttcgtctactttcgccagctgtgcctcggacaggccggtggtgcacagcacgcaggggattttcttctctacgcagtaatttaacagcttgtctactgctactgccgcagagaaatcaatgatgcaatctgcagccacatcgcattttgcaatatccgtgaatacagggtaaggattgtgtccatcgtctctggcatcgattcccgccaccagttccatatcgggatctgccgcgatcagtccgctgatcacctgtcccatttttccgttacatccatgcatgattacttttaccattttgttctctcctatcttaatattctgatgtcggggtcaaaagcccccgaccttgatgcctacggattgctccgtgctacgcactcccacaatcctaaccaatattcgcatattgtgggattgtcatcccacttttatgctcatatcggggcgggtcctaaggtctttcacccacctatgagcaagctcatgtgggcttagaccttttgaccctggcatcatatccttatatacttaaaaacatcccgcctatgataaaaatttcacaggcgggattcttccactcttgctttttaatttccagcctacaggataccataatccttcagggctttttcaagcctcttggcatttgcctcatccatttcgcacagaggcatacggaacgctccggctcccattcccatcatattcagtgctgtcttcaccgggatcgggttcacttcgcagaacagtgcattgcacagatccatagcatccagctgcatctgacggctgcctgccacatctccgtcgaagaacttctggcagatctcgtgagtctgtgtaggtgctacattggaaagcacggagataactccgataccgcccagagacaggataggtacaatctggtcatcattgccggaatagatatccacgacgccctgaccgatagctgccagatgtgcgatctggctgatattgccgctggcttccttgacacctacgatgttctctacatccttacacagcttcaccacagtctccggcaggatattgcagccggtgcggctgggcacgttgtacagaatagcaggaaccttcacggaatccgcaacggtcttgaagtgacgatacaatcccttctgggttgctttattgtaataggggcttaccagcaggatgccgtccacaccgtatttttccgcttcctgggacagatatactgcggtatcggtacaattagaacctgtaccggccactacggggattctcttcgctactttgtctacacagtatttgatggtatccagatgttcctcatgggtcaacgttgaggattctcctgtagtaccacatacgataatggcatctgtgccgtttgcgatctggaattcgatcagttcaccgaatttctcatagttgacagatccgtcttcgttcatgggtgtgacgattgccacgcctgctcctttaaaaatagccatatgtttcctccatttgcaaaacgccagcgcacaatggcgccggcgctgattatctaagcttatttgatagcgccccatctgcttacgagatgacagtcatacgcttcttaaacgtatgcccaagataacaatatacaggataccttatctttcggcgtgttcccctttcttcttccctcaacggtacctgttacctccgaaaaaatactcttgaaaaacgcaacctctatcttcttaaatataattttatgatagcattaacccatgtgactgtcaatcccagaccttgaattttacggtctcgatcttggatacttcatctgccagaacgcatatttcatcgttcaaagtgattcctgtcaggatcacatccgtatctcctctgcattccaacagtgtcttcagagtatccactgtaatgatatccttttccaccagtcccagcacttcatctaagatcagcagatcgcattctccggtggtcagcacctttttagcaaagccgattccgttacggatgttctggatttcctcctgcttcttctcctcaggcaattctgcaaaattgctgtccgatttttcgaaacggaacaatttgatctccggttccatcctgcgcaggaaatccgaatcctccagtccctttcccttcaggaactgaatgataacgactctcttcccctctactgctgcctgtactgctcttccgatcgctgccggtgatttgcctctgccatcgccggtataaatatagatgcatccttctgccattacacacctcatggtctatctgcgtttgcggcagatagctgtccgcagttgttagttacttatgcatttctttataccatatattgtaaatttttgcaatcttttgtcgtcagactatggattcccgggcttcctccaacagctccagtttgctgacggacacttcgaatgcgacacgtttctccacattttcttcatccagtttcttcatatattcacggctttggatccgtccccagatagcacagcgctcgcccactttgaaatgttctgcatagcgtgcattgcgtccccagcagatgcagggaatgtaatcagacttgccgtaagggcggttcacggcaaacagcaggtctgcgatctcccttcctaacggtgtcttgcggtataccggctccttacatatatatccatcgagatagatctggttcgtcttggaactttcttccatctcctcaataaatttcacctctctggcaaacacagacaataccagtctgttcttacgctcctcatgacggttataggaccggaactgcccattaacacacaaaagcattccaatatagctcgctgtcacatctaaaagtctctccgagaccatcaccggtatgatgtcaaagctgtcactcagtctcgtacaccttaagtccaccatgtagaatccttccccgtagatctcatggctgtaggaaaaatcgcttaccacttcccccatcaccgttacctgattgttttcaataaccttatctgtcatttttgttctcccttctacatcttctgactcttctacaacaatccttatgtattgcactactatttatactctattttttatcgtttgagtactaaaacccatcgcataaaaatgcaaataccgcccaaaagttgttaggaaccaccaaaaacgttgattttacacggttttttcttgcgtccggaaatgataagtgctatactgaaacagtttgaaaaaaggttaaatcagctgcacgcatttttagaaaggcaaggatttttatgagacaaaaaagagaagatgtcagaaacgttgcaatcattgctcacgtagaccacggtaaaaccaccttggtggatgagctgttaaaacaaagcggtgtattccgtgaaaatcaggaagttgctgagcgtgtcatggactccaacgatatcgagcgcgagcgtggtatcaccattctgtccaagaacactgctgttatgtataagggtaccaagatcaacatcatcgacaccccgggtcacgcagacttcggcggcgaagtagaacgtgtcctgaagatggtaaacggtgttatcctggtagtagacgctttcgaaggtgctatgccccagaccaaattcgtactccgtaaggctctggaattaaagcttcccgttatcgtatgtatcaacaagatcgatcgacccgaagcaagacccgatgaagtcgtagacgaagtactggagctgttcttagaacttgatgcggacgattcccagttagactgtccttttgtgtacgcttccgccaaggcaggtattgcttccctggatgccgacgagatgggtactgatatggagcctctgttcgaaaccatcatcaactacattcccgctcccgaaggtgaccccgaggcagctacccaggtactgatcagtaccatcgattataatgaatatgtaggacgtatcggtgtcggtaaggtagacaacggtaccatccgtgtgaatcaggatgtggtcatctgtaaccaccacaaccccgacaagatcatcaagaccaaggtcagcaagctgtacgagtttgatggtctgaataaagtagaggtaaaggaagcaggcatcggttccatcgttgccatctccggtatcagcgagcttcacatcggtgacaccatctgctctccggaaaatgtggtacccattcctttccagaagatcagtgagcccaccatcgccatgcagttcatggtaaatgattctcctctggcaggccaggagggtaaattcgttaccagccgtcacctgcgtgacagactgttccgcgagttaaataccgatgtatccttacgtgtggaagagaccgattctcccgaccgtttcaaagtatccggccgtggtgagctgcatctgtccgtgttgatcgagaatatgcgtcgtgaaggtttcgaattcgccgtaagtaaggcagaggttctgtatcataccgatgaaaacggtaaaaagttagagcctatggagctggcttatatcgatgtccccaacgagtttgccggtgctgtcatcgagaagctgggacagcggaaaggtgagcttcgtaacatgggttccatctccggcggcacttacacccgtctggagttctccatccccgcaagaggactgatcggttaccgtggcgagttcatgaccgacaccaagggtaacggtatcctgaacaccgtatttgatgactacggcccctacaagggagatatccagtatcgtaagatgggttccctgatcgctttcgaatccggtgaatctatcacctacggtctgtacaatgcacaggaacgcggtactctcttcatcggacccggcgagaaagtatactccggtatggtcatcggtcagaccggccgcagtgaggacatcgagatcaatgtctgcaagaaaaagcagctgaccaacacccgttcctccagcgccgacgaagctctgcgtctgacaccgcccaaaatcctgtctctggagcaggctctggacttcatcgataccgacgaactgttggaggtaactcccacaaaccttcgtatccgtaagaagatcctggatccgaccctgagaaaacgtgccatgatcaataaaaaagcttaacttaataagactagaatttaaaaatacctccctgtattccggaaacggtaacagggaggtatttttgtaagcttaaaagctgtttctatttttggctgttgatatagttgatcaatccctctgcggcaatgatcttctgcatgaactcggggaatgcctgtccctggaagctctcgccggtggtgagatctttgatcacgccggtattgaagtctatctcgacttcatcgccattgttgatcttgcgggatgcctctggacactcaatgatgggcaacccgatattgatggcattgcggtagaagattctggcaaaggtctcggcgatgacgcagctgacgcctgccgccttgatggcgatgggggcatgctctctggaggagccgcagccgaagtttttctccgctacgataatgtcaccttttttcacatttttgataaagtccttgtcaatatcctccatgcagtgagtcgccagttctgctgggtcggaagaattcaggtatcttgcgggaatgataacatctgtatccacgttatccccgaatttgaaaactattccttttgcgttgttcattttctattacctcttttattttatttcagttcacaagggcaggaaatcttgccggtgatagcgctggctgctgccactgcagggctcgccagatagatctcactctttacatgtcccatacgtcccacgaaattacggttggtcgtggagacacatctctctccctccgccaggatacccatatatccgccaagacagggtccgcaggtaggtgtacttaccactgctcccgcttcgatgaaggtcttaagaagtccctcttccattgcctgcatgtagatggactgggtggcggggatcacgatacagcgcattccctttgccacatgtctgcctgcaagtactttcgctgcggtgcgcagatcgtcgatacgtccgttggtacaggatccgatcactacctgatcaatggcaatgggctccgtctcgtggatctcatcgatagtatgtgtattctccggcagatgagggaatgccacggtaggccgtaaagtgctcagatcaatggtatattctgcatcgtactgtgcatccggatctgcttcaaataccttataggggcgttttgaatgctctttcatgtaagcaatagccttctcatccacagggaaaataccgttcttaccgccggcttcgatagccatgttggcaatggtgaagcggtcatccatggacagattagcaataccgtctcccacaaattccatagacttatacagtgcaccgtccacaccgatcatgccgatgatatgtaagatcacatccttaccgctgacccattctgcgggtttgccggtcagattgaatttgatcgccgcaggtactttgaaccatgccttgccggtagccataccggctgccatatccgtgcttcccacaccggtggaaaatgcacccagcgcaccgtaagtacaggtatgggaatccgcaccgatgatcacatctccggctacggtaagtcctttctcgggaagcagtgcatgttcgatacccatctctcctacttcgaaataattggagatctcattgcgtcttgcaaactcacggacacatttgcagtgctccgcagatttaatatccttattgggaacaaaatgatccggtaccagtgcgatcttatccttatcaaacactccctgtaccttcattttatccatttccttgattgccaccggactggtgatatcgttgcccagcaccagatccagctgtgcctcgatcagctgtcctgcctgtacctgcgtaagacctgctgcctgtgcaagtatcttctgtgtcattgtcattcccatttattcacggctcctttttctcttcctacttcttaactatccgaatcgtatcgatgaaccagcttgctttttctctcatcatccggctccgaacaagatacattgtagcatactaatatctaattgaaaacatccgcatttaacctatttctacataaatacggatgtttttgctttaatttattgatttattttaatatcattatcttgggttatttattctccatttgggctgaattagcattttccggctccttattctcctgttttaccttccagatcagcaccaccttgaataaatctccgtccagttcgatccggaactttccgccctgaatttctgtaaagctttttgcaattgccagtcccagtccgcttccttctgtgttacgggaagcatcccctctgacgaatcgctcggtcagttcctctcccgatacggataattcctgcgctgtgatgttttttaagataatggtcacctcatcctttgccgtaaaaccgttgacatagactctggttcccggcagagcatattttgcaatattgccaaacagattttcaaaaatccggaaggtcttctgactgtctaacggcacgataaccttctcctccggcatgctcatccgcacctccagtccggcatccgccagcttatcttccatctcgaattcgacctgtttcaccatgcttacgatatccacatcgcggatatcgagcgtgatattctgggaatttgccttgctgacttcgaacagatcctcgatcagtgccttcaggcgcagcgatttacgatccagagtctctaagtactcctgccgttgttcttctgttactcccggctcctgcaataattttacataagtaatgatggccgtcagtggtgtcttcagatcatgggatacattcgtgatcagctccgacttcatccgctggctcttcacttcctccgccaccgcattgcggaagccctcttcgatccggtagatctgcggtttgaagggttcaaacacgcccagatcctcctcaatggtcacattcagattgccctgggcgatctcattggtggcctttaataacaaaccatactttttctgtaatttgctgatatagcgccgcagcagaaagtacagtatcacagaatagatgattgcgatggtcagtcctcccagcggcagactgcatatcaccaccaggatcaaggcattccacaatacgatccgcaggatcagcttcttagcatcctttgtgacatcaaaatgctccgcatcatgatagacatccaccaccttatccctgccaatggaaaatcccttcttcattcctctccatagttttttccagagaggcactaacagatagcacaagctgtgctgtctcaaatacgttccggctccctggacccgcattgcccgcagggatacaccgctgcaccaggcaatgaaaaacaaggctgccactgccagaacatttaatgcataggtcagtattgtggtcaacatctgtatctgcgcactgtttccctgtaaaaccgtgttcagcgcatgaccgctccttacccaggataccagtcctaccacctgttcacttccgatacctgctatgatagtcaggatcacaacgatcgcctcgacaggcagcttcagcagaaccaccttctcccaggctctctcttccccaagtcccggcaatacaagcgccagcaggaagatcagcagtgccaggatcagaaacatctgctgacatccggacagataataggatgtatactgatctcccatggaaaagtaaacactgacattgttcatgtcctgatcataataaatatactgaccgttctgtcccaggctctgtgccgcctgtctggagatgcagaaggtgatctcacaatttttcggcatttccagccggaacatggtattatgaccggcatcgatcgttgtgcccatattggcatccaccattcgcgtaagaccacaattacggatcacttccgccgctgtcttacgaagggttgtcgtatccgatccgatcaccgtatttcctaaggtggcatcatttccataggcatcaaatacaaaagtcagataaaagctctgttcctccgccacgatatccgtatccgccagattacttagggtctctccggtctgagtatcccggatcctataatcatacaaattattcaactgaccaaaggagttttccagggtattgaaatgttcttccaagtattccccggtctgcgccgccaagattccctgggccgcatagttttcgggatctgctccttccggtatcgtgagctcctccgtatctccatatgccacttccgcccgtttccggtcatcattgagccattcgtttccctccgtgggctgcatatacaattccccatagcttaaggaagtctggtgttctttgttgtacagatcgcggtagagcagataacagttctgatacagataagtaatcgtattcgacgtctccagcggatccgcaatgtattgttcattcctcctgctctccgctctacgctcgaagattccgtagcaggcggtaaaaataccggaagctgccagactgacaatcagtccgatgatcagccatttgactgcaggctttctgtttcctcggtttcctcgattttccctgttttctgttgtctccgctttcacagcctctgttacctgttccattcttacacctctccggccattttcctctgcctgccgaaacactttgttccccacatccgtatttattgtttatcaatcttatatcctacgccccataccactttcagatacttgggatttcgcggatcgatctcgattttttcgcggatgttccgcacatgtaccataatggtatcggtgttgaccgctttctcgttccagatacgctcatagatctcatccgcggaaaatactctgcccggattcttgatcaaaagctgtacgatcttgaattccatgggtgtcagcttcaccgcttctccgtccaccgtcacttctacggtttcttcgttcagttccaggccgccgatggtatacacatgggatttctcctgttcttccccactgactgccgtcagatatttggaatatctgcgcagatgggaatttaccctcgccaacagttccaacggtgtaaagggtttggtaacatagtcatccgctcccatatttaatcccatgatcttgtccacttcctcggacttggcggacagcatgatcaccgggaactcgtgattctgctcccgcagcttcattaacattgtcacaccgtccatcaccggcatcataatatccagaatagccagatggatctcttcctgtgctacgatctccagtccttccttaccgttggcagctttccatacctgatacccctgatttttcaggtaaatctccacaccatcccggatttccttatcatcctccacgatcagaatatgatatttattgttctccatgactccctctcattctgccgtatgcggcaaggggatcctctcccctgtctgtttctgattctaagttataatttctaatttcacctactgaaaaaacgaaagattttctaaagatttttttcgtaaaaacaccaaggaggtggacattcggtgccacctccttgatcatcttcgaagcgtacattccggcttacatggttatacttcatcctcatagtaccggatcatgcataccagttcgccgtcctctacggacacttccgcttcctctcccaggaattcattgctgatcccgatggggaaatcattggtgatcacggcattttccaaaggatatttcatgccgcggatattcacgccttttgcctccttcgtcagggcaaacagcgacatggtgccctccagctccttccggaaatgcacggcttcgttctgcagtaccagcaccattcccgtaccgtctaccaggtaccccaccgcaccgtgatttttgagatacagcagacactggatattcgccagggtatggtcaaatctcccaccggtggccgcataaatacggaaatcgttataacccagctccagcccccgcttgatagctgccaacatgtctgtgtcatccttacactccggcaggcggcagatcttctccggaacggtctgttgtaactgttccacagcaagcttctcctgttcgctcatcgagtcaaaatctccgatgatcaggtccggctcaacattcaggatcccgcagtagcttaagccgccgtccaccgcgatcacataatcttcctctgtcacagacagctctcccatcgtgagatctcctgcgccgatcaaaatacatttacccatagtatttactgttttcctttcctgtaacgattccgtccacgagccgtcacgcactattctacaatttctgcgtttacttttcaagccatacgcagtatatttaatctgttcaaacttacaaagatacccagaggatcaacacccctgtatgcgaaaggcactctcatgaatctatatgaaaatcagccactgaccgttgcggagctccgcaggctgcaggctttggaaaaccgatatcggaatgctgccagagaagtgtttacgaatcgtgtggaatactaccaccgcttcaccggcgggcactatacctccatcaccataagagatcagaagacccgctggggaagctgttcctcaagagggactttatccttcaattaccgtctgatctacggtcctgccggtcctctggattatgtggtagtccacgaactctgccacctgactcatatgaaccattcgaaggacttctggaacatggtcgagcgcatcatgccggattaccggatctataaacagtggctaagggagcacggacaggagcttaccctgacgacacatctgaaaaagcagggcattcccatccgccttagctgaagcaccttactataaatggcggtctgtttttcaacagaccgccatcttttactattctgctctacgcagtgctatcttccgtttatctgttctcgtttacatagacctgtacacggctctgaatgacacttgccacatccctcgcactcttctgtcctgagaagtatgcaccggcttcttccgaaatgatattggagattgcctcattatagtatcccctcttattcacactttccacaaagcttacgattctgtccacctgctcctgtgtcagctgcggcagcagtatttcctcaccgttgatgtaataggtctcatcgtattccactttgttgccgttctcatccatatagtacggcttcttcgtagcatcctgcacattcttctcaaaggtgctgcgaagtaccggaagattgtattcctgttcctgtatcttatcctgatattcctgtgtcagatagtagcgcaggaattcccatgcaccgtcgaggttcttggattttgcagacagggcatacatcctgttacctgcccataatatggatcccatgtctccatcggtcgggaagcccacaaaggagatatcctcaccgaagacaccgttgatcgtaccgttcagatcacggatgttgctgatggagatgccatccagcagggttctgtcctcacggaactgggattcataattattccagtaatcctctccccagtaatcctctccatattctaccggcagcccggctgcataggtcagcattgccacaaaattatccgtatcaaatgcacattttccggtggacacatccacgaaatcactgccgcaataattcatcatagtatacaggaagctgtctctggtctcatcactgaagagtgcggttccttccggcatggtatcccggatcgtctgcagctcttccatagtaatggaggtacggtcaccgaaaatagcttcttttcctaccatagtagagatatagaacgaaggaatcacatagtacagtttaccgtccacacggtacgcatcccagacattctgcagatagtcgtatttcgataattcctcatcccccgcaatgaggtcatccacatttgccaccagtcccttggcaatatagctgtccattgacatattgctgtccacgaccagaatatccggcattcctccggagatgatatcattatttaactgcttcacaccaagagtataatcctctgcagtgttgtaggtactgtattccttaactacaatacgataggtgtcaccggacttattatactctactacttttctcttcagatcatagtcaatatagttaccggccagtgtaaggacgatccggtccttgatatcctccggcttcacgtgagtgaacagaccgccgcacattttgccttcgttgttatcatagtaaaagcccaggaactgttcctcgtccagtaccaggaaattgttcaggctgccggcagccagatccgaattgatataactcatgatctgcttcgactcctgtgtctgcacattataactgaacaggccgttactatcggcatagtacaggatgtcaccgtctccgggcaccatattataataaccgccgctggtcagtgtcgaggaaaactttattccttctgataccgcatctgttgcaggatcataggttgcgatatacatatccgtgtaattgctctcatcataatagatgatctgcaccttgccatccggcgtaatgatattagaactagcattgttgaacagtgttgctgctgcctccggcagctccttccggtctgtgataccctcttccgtcacagtgcatttctctattttatcaccgcttaacagcagtgtcagggttccatcctcattggggatgatactatgtacccaggaatagctttcttctgtattcatatcattcagatcagcttcccatttgatagttccatccgcactccagcagatcaatgcataatcattcgtactgctgtaatcatcgtcggaatatgtctcactatagtaattacgtattccgtaaacattcccatccgaaccgaccgtacaattgttgagcgatgtgtaagtataactgctgttccctgccggtgcatctaccacatgcatatccgctgccgtaatatcctgtgtgctggtctcctgctctgtaagaggcactgcttcatttccgtccccggaagtctcaccgccctgtgcaggtgccggagtcgccggagcctctccttccttccacataggcagttctacggtgtcgatgacggtaccgtcctgcttcattgtagcaagatgcagcttactctgactgccgttctcggaatagtcataggtctcaaacagaaggtaaatcgtatctccctttctggtcagaagatcaatattcatattgtctgaatccatattgagatccagcgcctgttccttaaatacatactgttttgcaaggctggcatcggccgcactgctgccaccgtttccgttccctccgttaccctttccacaggcagtcagacctgcgatcattgccacggtcaacgcgatactgatcagttttttccctttctttttcattctccctctccttttcttgtctgtgtctgttgttttacgactgctgttcctcttttgtctctgctcccaccgccggctcatccgtcagccaggagaattcactgtcagcataagggtcttcctccaactcccgttccagttcctccaggacatccctctctttgtgggagtgctttttctccctgcggcgttccacagcccgctctgccttatccttaccggtatgccatacatccttcaaagtccagcccttatggcgccaccagtgtacaaagcaccagataacggtcactaccggatataataacagaaacagcataaatactgtaagtaatgcaataatgtcttcatagcctctcgccagattctcccagtaggggtagatgatggctttgccgttcatggaacgtgttccgaaggcaaggattgttttgatccggttgggcagggaataacgtctgctgttttccacgatctcgacgtttttctcgtctataccgatcccttcttttactttgccgtaggcaaactcatccacagggttcggcatcacgatctcataatgattgataccgttgttggtcccataggcctccagggtctcataagatacatagactaccgttgaagttaagcctgctgccttttccattctgccctggggtctgcgtaccactccggtcacaatgtgcgggacattgccaatatatacggtcattcccaccacatcattggagccgaacagctgccatgccgcatcctgatcgatgatacaatagtcctgcatcagatcattaccggaaaaataggagccggtgatcagctttaacggatggaacaggaaaaaatcccctccgatcccaatcgcattggcatccagtgtattccttccgttcaccagggtgatcttaccgtctgcgctataagcatccacccagagtctggcacttggattctctgaggtctctgtaatagaggcctcctgcagcacatttttcagtgaatattcaaagctttgaatggtatcctccgtcacttccgctttggaggagaaaaagcagctgatctgtgccacatcctttttttcactccagcgtccggccatctgctgggcgtcctgcatattgaccagatgatcacaccatagattcaatagcaggaacagtaggaaggatactgccgcactgcaataccatatgcacttttttttactctgtatctgcatccgaaacatatagtctgtttcttccttcctgtaagattaaacgcttatgaattatttgccagtctgaccagctttcctgcctctaccggctgggtagatgtcgtaatgacaaattcatagccatataaagctccgctcactgcggactgggtgtcatcacttgccagtacctccacatccacacgggttgccacataacggttacctaaggggctgctcttggattccacgatcaggataaacttgccgttactgtcctcacggatggcactgttgggtacgatcagatcgtaattggcactcttctgtcctacggatacattcaaggactgtccgggtgtcacttcatctccagtgatatcaaaggtcagcagcttcttctgtccgggatctgtggtatccggcttgatgctggccagggtaatatccatatcactgtatctccaggagttcaccaggtctgccttatctcccacggaaagtctcttcgcctgatcattagtcacggagaagctcatggtaaagcccttaccctccggctgcatggtcaccagtgcagtatccggctgtgcctcgtctcctgccttgactgttacgctggtaatggttcccgaaatgggggcatcgatgctggcacctaccgcattctcctgcaattttgcaatatcatctctctgcttcttgaggctgtctaactggtaatccagattcagctctgtggagatatccttcaatagctgtgccttggtatcctgagctgctttcagctgaatatttcgtttatccagttcggtctgccagttctgggtctgcactgtcagggaattggtactattcgttttactgttctgcttctctgttagtgccttgttggcatccgcaagcgcttttaccttctcatcatatgctttcactttgtctggattgctattgataaatgcctgacgttcattgatcagagactgatactggtccctgttcttcactgccagctggtattcgtcctctgtcacctgattgacaaagccattaccggataccgaacttgcaatcttttcattgtatttatcgatggttgcctgacaggtggcctgggctgcctgccattcgctgatcttgtctttcgcgatcttgatctcatcactgtttaatgctgcctgggccacgttcaccttattctgttccgagctggtgtcgggagctccgccggcatccacattcacctgtgcggtctttaactgattgatagctgtcgtagcttcatccacctgcttctgccatttgtctatttccgcttccgctgctacgatccggctctgataggtattgagggaagacacattgccgttctgtacattttggaaggcggaattggaaatatccccggacagaagcgccagttcgaaatccagcattgccttatccagtgctgcctgggcatcggtcagttccttactttccttatcctccagtaacagcaggggagctcccttctccaccttatccccggtcttcaccaggacgctggagatcgtacgggtttcacttatctttacattatagggatctccgctctccaccgtgccggttccgcggatcttcgccgtgatggtgccggactgtacatattgtgccgccacctccggaagggaatagttcataaatgtgttggagaaaaatgtcagcaccaacattaccgacaagaatataatggctgcattttttacccattctcttctcttttttccaccgttctcgttcatcttgactctcctctatgcttcactttctatctgtgttttatctgtcattctatcccttgacaccgccctggtaggtaattccgtctaccagatattcttccccgtagagaaataccaaaagactgggcaccatgtagatcgtagccacggcgaatgccagtccgatctctccggaattgatcttgcttaagaatacggacaagggatgcgtctccgcatcggataacaggatcagcggctgttccaccatattccagtaatcgataaatacaaggatggccgcggaacacagcgctcctttgcacaatggcatacagatcagccgatagatctgccactctccggcaccgtcgatctgtgccgcttccatgactcccacaggaattctcttcatgaacttcgtcagtaagtagactgcaaagggtgaaaagatcccgggcagccagatggcccagtacgtatttagtatgttcagcttttccgccaccagataattgggtaccagcgttacctgatacggcatcagcatcaatatcacataagagaaaaataccaatgacctcagcttccccgagtacctggcaaatccataagacgccagcgatgccacgatcagctgaaacagtacgatcggtcccaccaggatcacggaattccagaatttcagcagatattccgggcttttcaaaagcactgtagtatactggctgaaggatacaatatccggaataaatttcaaattcactttttcggaaatatagaccttgccgcccttatcatttgtggcaaataccgaaccatagttcgctgatatctccgaagatgacatgaaagagttggtgatcgtcagaacgatcggcatcaggaacagtatggcaaaaaaggctgcgatcactgttgctatgctgatgcgcatattctcaaatatcttctttctcttcttgaaccggatcgcccttctaagttcaggcggaacaggttttttaagcttctgctccatcagccttccacatcctttccgaaatgattttccactgcgaacagaagtccgatgatcacgaccatgacgagagacatcagtatcgctgctgcagacagcgtctgataatccagactcttgaacttattgttcatgaagtgctgcagcatatagatggaatcgtaaggataatccgttgtcagcagatagatctcacggaagatcttaaaagagctgatcagggacatgatcgtcacaaacaaaaaggtggaagacaaataccggatcttaatatagaaaaaggtctgtaacgatgtggcattttccagtctcgccacctccagcagatccctgggtatgctggcaagtgctgccataaacaggatcatattatatcccagattcttccataggaataagatcactattacaataatagagtagccagacttcagccagtcgatcttctccacaccgaagactcccaacagatcattgaccgcaccgttataatggaacaatacctgccagatcaatacaatggatgccaccggcaccatcatgggacttaagaaaaaggtacggaactgactccggaaaggaagctttgcttccagtaccactgccagaagcagggacaaaaccacggccagtggcaccgcaattgcggaaaataccattgtattatgcactgccgtacggaatgccgcattttttattacacttacaaagttgtctaaaaatacaaagttcatgctgataggattatccaccagcgaataaaatatcacaaccagaaaaggaaggaaaaagaaagcaagtaccccaagaaagcttggggctataaaaagccccgagcttctcttcagtttccgcattctcttatccaatttgtgatgccgtttccgcttctgatccacctgctgcctgctcacgataatcaagcctttccttatctgttttcatttacatagacctgtacacggctctgaatgacattcgccacatccgctacggatttctgacctttgaagaatgcttccgcttcctccgtgatgatattggtgatctcatcattaccggttgcgctggaaggctcagccacgctgatcagatctttaagaatatcgatttcttcctcggtaggagtgtgataggtgtactcccagtctccgtagctgatgccggaagtaccgtcctccggaatcggattcccgttctcatccaggatctgctcaccgttttcatctgtcatatatgtcacattcagtgccttctccaccatatcatccagtgcagactttctggcgggaagtccataggaatataaatcatcaaacggctgattcagataattctcaataaatgcccatgccccgtccttgttggaggatttggcggtaatcgcatacagctcactggcctgcatataagtaccgctgccaccgccggaggtaggatatccgatataggttaccggctcgccgaacatagcttcctcctcctgaatactgttcagctgatagatgcctgtcatatttaacagcacttcaccggactggatcttcgccggtgtagatctgtcatcattctgccagtcatactcttcggggaaggtattgacaaattccagtactttctggaaatcttccgaatcaaagctgcactttcccgtctcccagtcaatatagctgtccagatcataggctaacagtgtgtacagcataccgctcttggtcatgccctcaaacagggaagcaccttcgtgctggcctgcataggctataatatcgtcaatggtccagcccttcttatcacctacttcggaggtcttgccgacgatcgtgcttaaggtgaagctcttcggaattcccaccagttttccgtcaaaggtataactgtctacaatattctcaaagaaatcgtccttgcttaatacactgctcttctccagatagggtgtcatatcctcaaatacacccttggaagccagttccttgacatccaggttggacagatccaggatatccgggcacccggctccggaggtaatatcattgttcatggctgtaatgccatccgcccaggaagtttcggtccagttattatcatcgatatatgttttaatattgacatgatattcattactctgcttgttgaaggctacggctgctgcctgaaggctctgggaggtatacagggttccgatcgtgatctgggacttctgtgccacctcactggccttggttttggtcagcttcaccaggtcagtttcccctgtgttccagtcattgaccactgccaggatcttaccgtctgcggtggctgcggcataggtgacataactgccgttaatatcactgtccagccagctcagtatttcggtagtcttctggtctgcgagactataatcatacagggcagtatccgtattgaccaggagatcattgtctattccggcacataatcctccgttgccgtttgtgttcggaaagttatcatatgtctgtcccaatgctttgccgtcaaagtcgatctgggatagcttcacgttgccggattgatcgtaataagccaggtataccttgccgtcttttgcttttcccatgccctggatccactggctgtccgtctgcacagctccctgaaattgtccgtcactgccaaacagccggatcaatgaatcagagctgatataaaatctgccctgatcgtccaggcacatgctgcccacataagaattattctcatcctgctgcatgatatccgtgatatcctgtgccatcagctccgtaccggatgcatcgtacttgtgcaataccgttgtctgctgtgtataagcgtcatcaccttcggtggcattccactcaaattccgcagtataaatattaccttcctcatctgcctgcatggaatagattccaccgccgtccgcattaatggtgatcggcaggtcctccctggaaccgtctgtcagcgaataagctccaatcacgaccttgctctcaccggaagcttcatcccattggtaatttgtataatacagcttatccccctgtactgtcatgttactgtagctggaattcgtattatcgtccagctccagatattcgggaacatatacatattccttctgttctgtctgtccccccggattcgatccatcctgcttaccgcaggctgcaagtgacattgccataacggatgccagtgcgatcgcggttgcttttctgccccttaaattttttctcatatatttctctcctcttaattacgtttattgtggtctgtaatcttaaagattcgccctaatagcaagttctacggaacattccatattgcttacttatttatgcatattataccctatttccatagtaaaagcatcttaagaatttatgaacttagattacgatttgtgtaaaaaaggtaactattcagaaccccattcgcaaaaccgcctctgcgaggcttttctgaatagttacaaaaaagtataggtccagaggacctataccatcttatgcatttccgtttttcttctgtgatgccggtacaggcttcccagtctgttgtagaaccagaaggactgcaccagaatattattggcttttccgatcttctctttggtagtaccccggtaataagatcctccgcatttgatcccttctccaagcttcaccgcccggatcagatcggattcacagtggatctgctccggaatgtctgtatacgccataccgatacagtccgttttgtgagcatcgcttccaccgaaggttggcagctcgtacatttccgccagtaccttggcgcaatggttgctctctacactctcacaggcattgaagccttccaggaaatcaaactgattcatcaccgccatctgatttcgcttcttcagggtattggtgaagcttaaatatttctctccgcaggggtgtgccggtcctaatatcccaccgttcttatgcacgatatcgatcaggatctgtaccggcaatccccgaagctccagaattttcagcttaacattctcaggcatgatcaccaggatatgtccggcatcaatggtatcgtattcaattcccttcagcactacaaaatctttatatttttgatccttgatgtttcgtttccacgcgcggtaaccattatatgaattatgatcactgaccaacataccgtcaaaacccttgcggatcaattccgcaataaaatcgtcaataggaacctttccatccatagatccttcttttgtatgacaatgcatatcaaatttcatctgttttgttccttctttctcttgtggcttacgtctttggcccatgccaagtataacagattccctcatagcatacaacgcttttgcgaaaaataaaacaggcaccggatatattccacccaatgcctgtctgtaactttcctgcatgttttatttgatattctattttaccacacgtacacggaagacaccgtcaatcttctgcaaagcctctaccagatcctgcgttgccgcactttcaatatccagcatggtatatgccacttcaccgcgggatttgttggtcatatcggaaatattgatattcttctcaccgatcactgcagtaaactgattcagcatattggtaatatttttatggaaaatggcaattcttccggcctggctgcatacgcccatgtcacaggcaggataatttacgctgttgcggatattgccgttctccagataatccatcatctcttccacagccatcttcgcacagttatcctcggattcctcggtgcttgcacccagatgagggatcacgatacagccgggctgtcctgctgtcgtaggattcgggaaatcagatacataacgggctaccttgccgctctttaatgcctccaggacatctgcctcatttgccagcagatctcttgcaaagttcaacaggaccacgccatctttcattttgctgatggcttccttgttgatcataccctttgtggaatccagaagcggtacatgtatcgtaatgtaatcacagtctgcataaatttcttccacattcatcacatgcttgacagaacggcttaagttccaagcagcattgacagatacataaggatcatagccatagacttccataccgagacttactgctgtatttgccaccttaacgccgatagcgcccagaccgatgacacctaactttttgcccattacttccgtaccggcgaatttcttcttttctttttctgcggctttggcaatgtcagcgttgtctttggatgccttgacccattcgataccgcctaccacatcacgggcagctaacagcatgcctgcgatcaccagttccttcacgccattggcgttggcaccgggagtattgaatactacgatacccttttgggcacatttatccagaggaatgttattgacaccggcaccggctctcgctactgccagaagattttccggcagatccatctcatgcatggaagcactgcggaccagaacgccctctgcgtcattcatattatcggttactttatagtctgctgtcagacgatccagtcccactttggaaatgggattcaggcaattgatctgaaacattttttctcccccttaagcgttctccgcttcaaacttcttcataaactctaccagcttctccacaccttcgatgggcattgcattgtagatacttgctctcatgccgcctacggttctgtgacccttcaggttctcgaaaccggcttcttttgcttcttttacgaacttggcatccagctcctcattaccggtaatgaacggaacattcatcagggatctgtcttccttgcggacggttcccttgaacagcttgctttcatccaggtagtcatacaggatcttcgcctttttctcattgcgctccttcattgcttccagaccgcccatcttcttcagccatttaaataccttgccgcagatatagatgccgtatgcgggaggcgtattgtacagagaatccgcatctgcatggattttataacgaagcatggtcggtgtaccgggaagtacatcttcggtgatcagatcctcacggataattacgataaccacgccagcaggtccgatatttttctgtacgccgccatagatcacaccgtattttgtcacatctaccggctcggataaaaagcagctggatacatctgcaaccaggggcttacccttggtattgggcagggtcttgaatttcgtaccgtaaatggtattattctcgcatatgtacacgtaatctgcatcctcgctgatgggcagatcggagcaatcgggaatataagagaaagtcttatcctcggaagaagcgatcttatttgccttaccgtacagggaagcctcctggtatgccttcttcgcccactgaccggttacgatgtagtctgccacacggttcttcatcaggttcatggggatcatggcaaactgctggctcgcaccaccctgtaaaaacagtaccttatagttgtccgggatattcatcagctctctgagatcagcttccgcttccttaatgatcgtatcataggctttagatcgatggctcatctccattacggacatgccggttcctctataatccagcatttcatcggctgcttcctgtaatacctcctcagggagtactgcagggcctgcggaaaagttatacactcttgccattttcaaagacctcctcgatattttctaaattttttataaaaaacataggtatagaataagcttttcatttgctttagtcaactacattgttaaattattttcaatttgttcgtctatcaaggacaatttgtctgaaaatgtctgtgctattaataaaacattacgacaggggtgccgatctgcacgcaatcaaacaattcttccattttgtcctttggtgtattgatacagccgtgggaaccggcagtctggtagatgtccccgccgaattctttgcgccatccggcgtcatgaataccgataccgcccttcacaggcatccagaatttcacaggagatgcataccccggtccccgtaagacacgatttttctgcttattatagacaaaattgacgccttccggcgttcccatgcgccgccgcatattgcctgtcacaatctccgtctccagcttcaatacacctttttcgtaatagtacattttctgttctgtcatatccacttcgatataggtgtcaccaatatcatttttcccatagcagaaggcttctctctcataactagggatatgtgactgcggcgtgcctgtatgtacaccgggatccagcagatgctccagcaggtaggcagtctcctttttccggtccatcttgctgccataggttccgccatcgatggtgatcacatccccacgggtactgtgaaactgtctggttcgtccatagccgtcatattcttccgccaggctctgcacatacgccgtcacagcctcctcgtccagtacaaagcttcccttctcatcctgcactggcagtccgttctccgctgtcagaaaaaaagcacagtccgctgctgtcatcggatgtctctcttcgccgaagcagtagacaatatcgcaggtctgaaatctctcgatctctttccacagattccgcagggctttttgactctcatccggtgttatctcatagtaacatccgctctcctgcagattcagtgtttcctgcccattctccacgatttgttttaacgccaaaaaagccttctccagatcgatacggtcgctcagtccgtccgtgaagacataggcaccctccgcatccctggtaaggctgtaatcttttattctcttctgttccgtctgtacgaaatccagggcgttgtaggctctgcgaagcgcctcctcatccacagtcaccgcaggtgccagggtccgcctggaatgaaacagaacattgtctacccacagataaggattctgttcctgtctgtatgcttccagtgcgctgctaaagtccgcgtgataatccacatcagcgagagtgatcgtgtatttctctcccgctttatccacgatgacaacatccggagcttctgtatgtgacaaaagctccgaattcacttcttccaccgttttcccggtacagtatactccgttgatccaggtattcagagaaaaaccatccctgtagtataatgccaggacaaaatatactgtcagcagaaacagcagtaatatcagcaccgcaaaaagtaatctcttcgtcgtcttattcatcaggactgccttttcaaatcatctccgtcaaatacttcgctgatgggggctcctgccggaaccatggggaataccttatcatcctccgggatcatgcactcgatcattaccggtgccttcagggcaatggctttctcgatagcgggtgccacttcttcctttttggtcacgcggatggcggtacagcccagtccttctgccaccttgcagaaatccaccttatccttcagtactgtctgggaatagcgtttcccatagaacagtgtctgccactgtcttaccatgcccagcacctggttgttgatgaccacctggatgatgggaatgttgtaacggctggcagtagccagttcgttcatgttcatgcggaagcatccgtcgcctgcaatgttgatgcagaccttatccggctgtccgatctgcgcaccgatgcaggctcccagaccgtaacccatggtacctaatcctccggaagacaggaaggtacggggcttcgtataatgataatactgtgccgcccacatctgatgctgtcccacgtctgtggtgatgatggcttctccgttcgttacacggtcaatctcctgcatgatataagggcaggacagattttcgtcatcgtatttcaggggatatttttccttcagttccgttatatgcgccatccactccggatgttcctgtttggacaaacaggcatttaattctgtcagagtcttcttcagatctcctaccagagaagcgtccacgcgaatattcttattgatctccgcagcatccacatccagctggatgattcttgcattctccgcgaactttttcgggttacctgtcacacggtcggagaatctggcacccagtgccaccaacagatcacattcgctgactcccaggttcgaagtcttggtaccatgcatgccgatcatgccggtatagcgctcactttttccatcaaaggctcccttacccatcagagtatcacataccggtgcatcgatcagctctgcaaattctgccacctcagcactagcctcggaaatgatggctccgccacccagatagatgtacggttttttcgccttgtggatcatctccgctaccagcatcagttcttccctggtgtaacgggtcactctctcctccggctgaatcgtcatgggagtatattcacaggcagctgccgtcacatccttcgtaatatcgatcaggacagggccgggtcttccgcttctggcgatatggaatgccttgcggatggtatcagccaggatctccacatttttcacaatatagccatgcttcgtaatgggcatggtcacgccggcgatatccacctcctggaagctgtccttaccgagtaaaggcaaggtaacgttggcggtgatcgctaccatcggtacagaatccatgtaagccgtagcgataccggtgaccagattcgtggcgccgggaccgctggtagccatgcagacacctacttttcccgtagctctcgcataaccgtccgccgcatgtgccgctccctgttcatgcgaagtcagaatatgtttgatctccccactgtgcttataaagtgcgtcataaatattaaggattgctccgccggggtaaccgaatacggtatctaccccctgctccttcagacattctaccagaatttccgatcccgttaactgcatttcaaaatccctccggttattttaatgattgcttaattcttttgagaaggtgcttccagtaccgcaccacggttgccgctggtcaccagttcatgatatcttgccaggtagccggtcgtgatcttaggctctctgggctgccattttgctcttctggctgccagttcttcgtcggagacaagtacatccagtttgttctccggaatgttgatgcggatgatatcgccctcttctaccagtgcgatcgggccacccactgctgcctccggagacacatgtccaatggatgcaccacgggaagctccggagaaacgtccgtcggtgatcagtgccacgctggagcccagtcccatgcctgcaatggcagaggtgggattcagcatctctctcatgccgggaccgcccttaggtccttcatagcggatcactactacatcgcctgcgacgattttaccggacttgatagcatcaatcgcatcttcttcacagtcaaatactctggcagggccttcgtgcaccagcatctcgggtgccacagcagatctcttgaccacgccactgtccggtgccaggttacccttcagtacagcaataccgccggtctgggaataggggttctccacaggacggataacttccggattcttgttgacacaattcttgatattctctcctacggtcgtaccgttggcagtcaggcagtcgaggttcaaaagtccctttttggacagttcattcattaccgcatagacaccgcctgcttcgttcaggtcttccatataagtaggaccggcaggtgccaggtgacacagattcggagtcttggcagagatctcgttggcgatctccaggttcagttccacacctgcttctcttgcgatagcgggcagatgcagcatggtattggtagagcatcccagtgccatatccacagtcagggcatttctgaaggcttccggagtcatgatgtctctggggcggatatttttctctaccagttccatgatcttcatgccggcatgctttgccagacggatacgctcggaatatacggcgggaatcgtaccgttgccgcgaagtcccataccaatggcttcggtcagacagttcatggagttcgcggtatacataccggaacaggagccgcaggtaggacataccttttcctcgaactcagccagttcatccatagtcatggtaccggctgccacacttcccactgcctcgaacatagaggataagcttctcttctgtccgtgtacatgtccggctaacatgggaccgccggatacaaagatagtagggatattcactctggctgccgccatcaaaagtccgggaacattcttgtcacagttgggaatacataccagaccgtcaaatccgtgtgccatagccatgcactcggtgctgtcggcgatcagatctctggtcaccagggaatacttcattcccacatgtcccatggcaataccgtcacatacagcgatggcggggaatactaccggcataccacctgccatggctacgcccatttttacagcttctgtgatcttatccagattcatgtgtccgggtacgatctcattgaaggagctgacgataccgatcatggggcgtcttctctcttcttcggtaaatcccagggcattgaacagacttctgtgaggtgcctgggcagttcctgtcttaacggaatcacttctcataattatatctctctttctcttccttatttttctataccggataaatgtgcttccggggcaaatggcatcagattctctctgccagaaggtcgcccatctcggtacatcctacccgcgtgcagccctcagacatgatatcaccggtgcggaagccgtcctgcaatactttcttcaccgctgcctcgatagcatctgcttcttcgtccagatcaaagctgtaacgaagcatcatagccgcgcttaatacagtggcgatagggtttgcaatatctttgccggcaatatccggagcggatccgtggctgggctcgtagaggccgaactttgtatcattcaagctggcactggctaacattccgatggaaccggtcaccatacttgcctcatcggagaggatatctccgaacatattctctgtcaggatcacatcaaactgtgcaggatccttcaccagctgcatggcgcaattgtctaccagcatatgttccagtgtcacatcgggatagtcctttgctacctcctccacaatctttctccacagtctggaagaatccaatacgttagccttatccacgctggttacctttttcctgcgctttctggcaatatcaaagcctttgatggcgatcctgcgtatctcgttctcatcataggtcagggtatcgatagcttttctcacgccgttctcttcgatggtcctgcgttcaccgaaataaagtccgccggtcaattctctcatgatcagcatatcaaatcccgctttgctgatctcctccttcagcggacacgccgctgccagctcatcatagagtactgccggtcttaaattagcaaacagattcaacgccttgcgcattgccagaagtcctgcttccgggcgcttctcgggaggtaatttgtaccagggggaagtggtggtattaccgccaatggatcccatcagcaccgcatctgccgctttggcatccgcaatagcttcctctgtcagagggactccatggacatcaatggaagctccacccattaaaatatccttatagatcattttatgaccatatttatgcgcaactttgtctaaaacttttttcgtctccctgacgatctccggtccgatgccgtcaccgggaatacaggtaatatgtaactccatagtgttattttcctcgtttcctgtgatatttcctgtattttaacgtaaaatacttatttcataataactgatactatatgaaatttcaacattgaaaattaacataaatgcaattatgcacattaaaatagatcaaattatcaagtgtgtcatacacgtaaaaaggagcaataccttatcccggcattgctcctttttcactgcttcttagttctctccagccttctcaaccttgctgatggcagatttctccatagggatacggcagtttttgttattaccgaactctacgataacggtatcatcagtaatatcaataatgataccatagaaaccggaagtggtcagaacgcagtcacctgtctctaagttggacagcattgcagctactctcttctgttccttcttctgcggtctcataaagaaaaaccacattgcaccgatcaatactgcatatacaagaagcataacgatcatgctggttccggaacctgctgcagcagcctctgactcagttaataaaatacccatttgttcctccattccggcgtgttacgcctgtaaaactttctgtacaagtaagtatgatacacaaaaatagcttaaggggcaagtctttttgcataaaattgtatgaaataactctaaactccgacagttacagcttattctaacggtgtagccatggaatccagcttgtgtcttttatattctgcaaagcggcctgcatccaaggcatcacggatctccgtcatcatggtattataaaaatacagattgtggagtacacaaagacgcatgcccaacatctccttcgcttttaacagatgacggatataagctctggagtatctctggcaggccggacagccgcagccttcttcaatcggtctgctgtcaagctcatattttgcattgaacagattaatctttccatggttggtatataaatgtccatggcgtccgtttctcgtcggatatacacagtcaaagaaatcaacaccgcgctctacgccctccagaatattagccggggtacccacgcccataaggtaggttggtttgttcaccgggagataaggtaccacttcatccagaatatggtacatttcctcgtgggtttcgccaactgccagaccgcctaccgcataaccgtccaggtccatctcagcgatccgcttggcatgctcaatacggatatcttcatagatggcaccctgattgataccgaataacagctgatgcgggttcacagtatcctctaaactgttcaggcgtttcatctccacctggcatctttgtagccatctggtagtacgctccacggaattctgtacatacatcctgtccgccttactgggagcacactcatcaaaagccatggcaatggtagaacccagatttgactggatctgcatgctctcctccggtcccatgaagatcttatgcccgtcaatatgggaacggaaggtaacaccctcttccttaatcttacgcagtcccgccagggaaaagacttgaaatccaccggaatctgtcaggatcggcttgttccaggacatgaacttgtgaagtccgcccatctgtttgatgatcctatcaccgggtctgacatgcagatggtaggtgttggataattccacctgggttccgatctgctctaagtctgctgtggatacggcacccttgatcgccgctaccgttcccacattcataaatacaggggtttggatcacgccatgcactgtggtaaattctcctcttttggcgcgtccttcctgtttaatcaatcgatacatcttctacatattcctcccagaattcttctaatgttatgccctgttccatgatcacaggcgcagcagttttccctacatagcggaaatgccacggctcatactcgatcccggtgatatcttccttccccttaggatatctcagaataaatccaaaacgacagctgttggctgccagccattttccggcttttgtgtctccaaagccctcgtccagggacatataactgttacatacaatatcaagtgccagtccgatctgatgctcactggctcccggtaccgtcactgcctggctggacagctgataagcttccatataggacattccgcggttcatatagcgcttgatcttccggttgaacaacatctgctgatactccagatcccggtaaggcgagcagatcgtcaggttcacaccatcctcttccgctgcttccagcatggcaagaaggtcttctaagattctcttgtcacactgcatggaacccctgatggtgccaagctggaacgtataatcctccggaatggagttctgcttgttgatcagaaccagtctccagtcgtcggagcggaattcctgctgttctgtagtctcccgcgcatcactgcctgttccggtctcccgggcattttcactcacaatttcctctgaagcccgtaaaatatcggaggcatcgtatttgtccaccagtgcatagccgtgggaaatactgttgtaatccgactgttccagaacatcctcatcctctaagagttccagccccgccatatccggttccttctcctccgccagagaaatgtcagcagtctcggcatttttcaattcatagtcattccccgcatcctctgtaataaacgccgggaatgaaaaactgctgtataccgcaaacaggaagaaagttcccgccatcacggcaaaacgttttccattattcttgcaataattacagacatgaaaaaaaagcatcacaaaaaacagcagcgatactgctaccgccctgttccatcggttctttttcccaaatttcagaagttttgccctggctttctcttccgttgttttttccatttgtatattcgaccttttacttcccgttagcaactatataatatgatagcatactttatattccgttgcatcctttttctataaaaaagttgcgattttttcaataattacgtataatctatgataaaaaggtaactattcgagtcaccgccccataatgaacaaaatgagctgcatagcagcaagaaagcatgattcatcgtgcgactttgcgaatgtatgggtgggtgctgaacggttggaaaaggagaactgccatggccggttcaacattgggaaacattttcaagatcactacctggggagaatcccacgggaaagctttgggtgtcgttgtagacggctgtcccgccggactgcctctctccgaggaagatatacagaaatacttagaccgacgtaaacccggcaccagtgccattaccactcagcgtaaagaggccgatcaggtggagcttctctccggcatctttgaaggaaagactaccggtactcctatctccctgatggtacgtaatacctctcagatctctgctgattacacggagatcgcagagaattatcgtcccggccatgcggattattgttttgatgccaaatacggtttccgggattaccggggtggcggacgttcctccggtcgtgagaccatcggacgcgtggctgccggagccattgctgcgaagatcttagagcagatgggcattaccgtattcgcctatacccgctccatcggtcccgtagatgcggatctgacaaagttcaaccgtattactgcccgctccacgatcactgccatgccggatgcagaagctgatgaaaaagcctgtgcttatctgcagcaggcaagagaagcctgcgattccgtgggcggttgcatggaatgtcttgtcgaaggacttcccgcaggcatcggagacccggtgtttgagaagctggatgccaaccttgcgaaagctatcatgtctatcggtgccgtgaaagccgtagagattggcgatggtgcagaagcttcccgtcataccggcagtgagaataacgatcccttccgcatggagaacggcaaagtcacaaagatcagcaatcattccggcggtattttaggaggtatgagtgacggcagtcctatcatcgtccgtgcttatgtgaaacccactccttccatctttcgcccccagcagaccgtgaaccgctccggtgaaaacaccgagcttaccatccgcggacgccacgatcccatcattgtccccagagctgtcgtcgtcatggaatgcatgaccgccatcactgtgttggatgacatgatgatgaatatgtcggcgaagctggattccctagtggagttctatcgataaattgagagttagttaatgaatctgttttcaagtctccgtagcccttggcagggtataagaaacgcgacacgctcgcgctctgtcgcagagcgtagcggtacataagcgaggaaagtaccctcgctaagtaccgacgtctgcttacggtctgcttattcttatacccagccagggctactggttttttgaaagctttccaaaatgcagaactcccggaatatgcggtgccatgtcgaagatgtttgtcggaggatgttgatattttctagaaaagtgctgaaagacagggggaaagcggacacgatgtccgcgtcagccgattgtcgacatggatgtcgactgtaggcggccccgtcatgacgagaactactcatcacttttcgtagaaaattcacatccggagaccttacatcgagacatgtgtatcgcatgctccgggagttcgtggattttgccaatgtatttaactaactttcaagttagtttgtcgcaaatacccccaaaaagatgaattccgtacaaaaaaaattctaaatcaggaatttttgtacgaaatttcttcattttgcacgctcagcgaaaataacagcttgttacatggcaatatttcatgtttttgtatttttttagcaaaaaatggcgtttttaatacaaacagaactccccgagtggcagacagcaactctccgcaatgagctatgctttcgtacctttcaatatgtaaaaaaggcatacatacgtatgccttttcgaaataatccgttataattaagcgttcatctgagcggcaacttctgctgcgaagtcttcgttcttcttctccatgccttcgccaacttcgaaacgaacaaccttagcgatggtcagagccttgttaacgctctctaaatacttagctacggtctgcttgccatcctcagccttaacataggtctgatctaacaggcagatctccttcagctgcttggatacacgaccgtctgccagacccttgaagatcttatcagatacgatagcgtccttgtcagccatagccagctcagccagagcagctgctgcttccttggacaggaagttgaacaggtagttcatgttgctcttcttctcttcgtagattgccttatcctcatcggtccatgcggaactgttcatagccttatcgatcagcttattcaggatgggcttaggcagagatgcaggatcgttcagagctgcatcaacagtgatctcctgtaacttagccagctcttctgcggaaatatcatttctgctgatgtaggtaggattcatagctgctacctgcatagcgatgttggtcagtgcctctcttgctgcgtcatcggatgcaccgttagctgcaacgataacaccgatgcgtccaccaccgtgaatgtaggatactgctacatctccggataccttctcgaaacgacggatagacagcttttcaccgatggtagcggtcttctctaccagagcttccttaacagttgcgccttcgaaaggagtagccaacagtgcttcgatatcttcaccgtccttgccaccctgtaaatcggaagccagagcaactccattaacagcctctacaaaagaagtaaaggtctcgttctttgcaacgaagtcggtctcggagtttacttcgattacgcaagcggtcttgccgtctgcggagatagctgcacgagcaacaccttctgctgcgatacggcttgctttcttctcagccttagcctgtccgttctttctcaggaactcaacagctgcgtccatatctccatttgtctcgttcagagccttcttacaatccatcataccagcgccggtcatttcacggagctcttttaccatagatgcggtaattgccatttttttatcctctcttcttaattaatatattatcctcaagaacccagaccgtaatgacaggcatcgcaatctgggttcctatgcttctcttatggaatcggattattcagcgtcagctgcaacctcttcgatatcctctgcttcggtagctacatcagcatcgctgtatacagcctctccctgtttagcttcgatgacagcgtcagccatcttggaaacgatcagcttaacggctctgatcgcatcatcgttaccggggatgatgtaatccagctcttcaggatcacagttggtatcgccgataccgatcagggtaatgcccagtgcatgagcctcctgtacacaaattctttccttcttaggatctacaacaaagatagcatcgggaactctggtcatgttcttgataccgcccaggttcttctccagcttctcccattctttctttaactgaataacttcctttttaggcagtacatcgaaagtaccgtcctgagacatggtctcgatcgcatgcagtcttgcgatacgggactggatggttctgaagttggtcagcataccacctaaccatctctcgtttacatagtacataccgcaacgctcagcctcaacctttacagcgtcctgtgcctgcttcttggtaccaacgaacagaatggtgccgccctgtgcagcgatctcggatactgccttgtaagcctcatcaaccttaactacagacttctgcagatcaatgatgtggatgccgtttctctcggtgaagatgtaaggagccatcttagggttccatcttctggtctgatgtccgaaatgaacacctgcttcaagtaactgtttcatagaaataacgctcatgtctttacctccgtttggttaaaatcttccgcttttcttttctgccgggacgcgttaagaacccggttagctctgacaaagacttctgtaaaaccagtaagcaccatcgtcaaatcgaaaggcgtgttttttgtcacaacagtgcgattataacataggaaaacccctgtggcaaggggtttttaatgttttcctgtgattatttttgcgatttcttcttcagaagtcccgggaactatctcataagtgccgggatttatgctgcggctgtagccgttattacataaataattgtcaaatgtcttcgcatcttccaccaatcccgcttcctgtagccggctgctgacgcttccggagcttgctcctttttttacggtaacggtaaccgtctgcgctgcttctgatgctacaatcgtctcaggctgtggtgttgcttccggttccatggtattctccggtgcaaccgttgtctccggttccgatgttgttgtcattgcttcttcggtctcaggctccggggatgcttccgtcttctccgtgttttcctgtgcctgctgctgtacgctgttctgcagagctgctaacgtcagttcactgctgtccaccattcccaactgttccgcacgttctctgatctgatcatctgtcaatgtctgtgtctcctgcccctgacggtgagaaaagctgattcccaggatcaatgcggtcacgatcataccaattccaagaccgcgcagataatattttaatttcatttctgtctccgtccttaatttcgtgattaccttcaggccttatacaggtcaattacgagttttacttctcccacgcccagtccgagttccctggctattgccaccgtggatttgccctgtctgtgcatttccaggatcttctcgttgttgttctggccttcttccgctgtctcacccatgaatccgatttccggagatacagcctcctctgttttcgccggttcatctgcagggatcactttttccgtttcctcagtttttaccgtcggagtatcatcgatcgccttcaccttgtcttccacagctttcaccgctttgtccactttggagacggtatctttgatattggcatgcttgttgttcagcatatcatataagaacattgcttcctcatgatttttatgaatttcctgtaataccgtatcggaatattcatttaccgccatgattttctcgttagtcaggcgttccagcgatctctccgccttttccaccacatcttctgaggtttcttccactttatcctgcacctgtgcacggactgttttcatttcttcctctatcagaccgtggatttcctgttttgccgcatctgtgtcgattctaccggcgtccgatctgcctgccggcagtaaaaaacttcctataaaaattacaattcctacgatcagcaggattacttctaaaatgtccatcttactacgtttcctttgtattttcagatcttgatgtcaaaaccacgatgctgtttttggataacgacaccatcttccggttctttctttttccggcgtttatctccgccgtttccggcatattcattgtgtcccttctccttggcatcatattgtccggtataccagtccgcattatcactgctgtgtacttctttcgtaagcttttcactctgtttttgagactgctgtcccagagtcatctgttgaaatgcccctttattgtcctcattctgcttcatcacggaataatcctgtgttctggggatcgaagcaatctccaacgaaccaaacgccatatctgtgcctcttttctgctatattgcggtagccttaacatctccgtcgatccgttcaaatctacagtactggtaagtatttttcacctgcatggaggaatccccgataatgatcgtagtccccggatacacctctcccttgacgatgacagcggccttttcctgtggattgaactccatctgcaattcctgcatgcgcgcgtttttctccgccaggctctttttctgtgtctccatcgttgctgcggaattccggatataattcagctggtccggagtaaaacgcactcctctgttttttttctctgtgaaactggcaagaattggctgaatactccgaatatttttaacgatctccgaaatttctttctggagtttcatatattctgcttttttctccgggtccactccgacctctaccacggtcggtgcccccagtgtcgctcccagagtcttcacttcgattctctgaccggcacgtacatgtcccccagtgataaagcctctcttaccggttacctggatctccgtagatgccgtcacattgctatgcagaatcgactccgtattcacgtaaccaccggcactgaccgtcgcattttcgagaaatttggcaacgatattgccaccggccttcaggatgccttttgccataccgttcataccgcgggcaatgataatgtttcctccggcctcgatgcaggcaccctctaccacaccgcttatgatcacattgccaccggccctgatctcaaaattagaagaaacattgccacgcacctgcacgcttccttcaaattcaatatttccggtggatagatctacattctctacttcataaacatcggatacaaatactttgccctctaccagtgacacgtgaccgtccaccagagaagtaagcttttttctgtcctctgagatttcaatattatgtccgaattccagatgtgctttcttcacctgtctggggcggattttggctccctgcaccgttattccgtattctccttcatcttccggaatgatttccgccaggagttgtccctttctgcaggggttgatcatattcaggtggaaataatccacggtgccgtcatcttttaatgtaggctgtgcatgaacatccgtattaaaataatacctgacagacgcatccgtaccatgcctcggttctttacctttggccacgatcagatctgtaccatagatcccatccgacataaaatgatcctgcagaacgttcatctgtattccgtagacaacgttccggtatctgagatcccggatcacactgtccatggttgttcttttcccgctttgtgatgccggatagaatcgaagaatcacctgcatattatcctggctgacctcgatactgtaggtttcttccagtgccgggcaatcctttctctccagaaagcataccgtatcttcccccgacaaaattgcttttttaattgccataggatcatacggcacagattcccgttcaagataattcaacacctcctggagattcacgtccgctcctccgtcctttggttgaaatatctgtagcccataacctcccggtgcatttacgagctgaaaatagccattctgcatgcattttctcctcttacccaatctgcgggtcaaccatttttataaaagtcccatataatttcccatttttgtcttcattttctgcagagctctcgtatgcagctgggagactctggattccgacacttccaatatattactgatctcttttagcgtaagatcttcgtaataatacagcgtaactactttcttctctttctctgtcaaaagttccaatgcttctccgagtacttttgtcagctcttccttctcaacgctctcttccggaccgtcaaatctggccgtggtatgtctgctataatcctgcgagacatcgcttccctgatccatatattcattcagtgacaccagtcccgtaattttcatctgcgactgccagtccagatattcctccgcggatattcccagacccatagcaatatcttcatctgttgcgctgcgtcccgtagtctgttccacttccttgatgacagcgtcaatcttcttctgtctctggcgaatcgtccgaggtatccagtccattttacgaatctgatccagaatggctccacggatacgcagactggcataggtctcgaattttacttctttgaggcaatcaaatttgtcaattgcatcaatcaagccaaagatcccgtagctgaccagatcctcatagtctacgttgtatcccagatacatgctcagtcttccggccaccactttcaccaggggggcatactccagtatcagctgctccctggtctccggtcgcttattagcagcatattcttctaataaccttttcttaccggcttcatccatttgactcgcttacacccttctgttgtgcatcttccgatacagcatcttcttgttccgccttctcttcctgttcctgttttgccttttcctcgttctgcctgtcaaagcgatccagcagaagccggacaccgtttcccagacagtaaaacaaaagcatcacagcaaacagtgccaccaaacttgccaataccgagtaagcctgtaccatcgtaacaatacaggtacaggcgccggctgtcagcatcaggatcaatggcatattctttctgttcataattttcttccattccaatatttgtcagatgactgattcatctcttcctaccgcacggatataaaattctccggtctccggataaaatgtaacggttcttccgtagtttttgcctgtatcctctgctaaaatagggatattgatttccttcaatttcttcttaacagcctgcacattgcgctcccccacctgcatcatgtcgttacgaccctgaaatgtaaacatggtagcgccaccggcaatcttagcaaccattcttgcctttctcgcaccaagtttttccatctggcgtaccagttcatcaattcccgtatccgcaaattttgcaatattctggctactgttacgtatcgtagtgctgtccggcagcataatatgcgccagaccgcctattttcgtcaccggatcgcggattgcaattcccacacaagatcccaatcccaaagtcgtcactccgtcgggacttacgcaggtcttcagatccgccattcctaccttaataatctcgctcattctgctccccttcttctacctcttagcaccttatgcaacagatattcccaaagacgataatatcttgggataggattcaatatcgggaaccagaatgaaataaccgtcaatctccacctcatcgtaaaactgagactggatcaataaaatcttatctcccaaagttccaaattcaattgccggaacgcttaggattgctcccgccatatccagcgtcagagaaggcggggtagggataatcgtcaggttcgtaagagacgacagggaattcagataggctcccgtgataatgttgccgatctcctgcattgcagaaaattcaatctctgaaaaaccttccggctgtaccatatctccaaggatcttatggagaagatgttttgcgctgttctgttccaccaggaacatcatgcttccggtaatgtcgccttccacccccaggaaaacaccgatcatcacctgttcctctcctcccatcagtgctccgacttcattaaaatccaaaagctttacctgcggtactttcatatccaccttgcagtttaacatctgggagagtgctgtcatagcgttgcctgcacctatgtttccaatttcttttaaaacatccagatatgtttccgaaactttctctaaactcagatctcccatggatccatctcctttatgcgttttcctccagtgtaatggaattcagatccagaagagagatcagttccccattgtgttttcctacacctgtaataaaactctttttattctcaccggcattctgagacattttttcaatctcgctggtaccgagagtgacaacttccttcacttcgtccacaattatgccgacactgccctgctgttccagtttcagaatgataattctggtagcacgggtcaattcgtctgcctccagtcccattttcagtcggaggctcattaccggcagtacttctccacgcagattaataacacctttcagatatgcgggtaccttgggtactctggtaatgtgctgcattctgacaatgttgtctatgtaacggatatcaatgccgtactgctcatcaccgaggcggatcacaatatactggaaaaattcctcctcaattttacgctcatctccggcttttaacgtatttttcatgctaagttcttccataatcgtcatctccctccttacagtaatgcatttgcatccaggatcagtgccacttcaccgtcacccaaaatcgttgcaccgctgataaatttacactgcttgatatatttgccaagagatttgataacgatctcctgctgaccgatcagttcatcgatcacaagacctgccattttgtctcccttcttgacgattaccacaatcagattatcctcggtagatctggtactttccacatccagtacttccgtcagacggatcaggggaattaccgttcctcttaagttgatcacttctttgttttctaccagtttgatatccttcggtgagatatcttcgatggtctgaatggatcccagggagatcgcatatttttctccacctacgactaccatcagtgcctgaatgattgcaagggtcagaggcagacggatcgtccaggtacttccctctccccattttgatttcacttctacttcaccgcttaaggattcgatcttggacttcacgacatccagtcccacgcctcttcccgatacatcggttactttttcggaagtggagaaaccgggctggaacagcagattgataatatccttctccgacatatttgctgcctgttctacggttaccagattacgttcgattgctttattcttaacagcttccacatcaataccgttaccatcatctcttacctcgatgactacgttattgccatcctgataagcatccaggaaaatagatccctgctcgggcttgccgcgctgtgcacgaacttctgcagattccagaccgtggtcagcggaattacgcagcagatgcatcagaggatccccgatctcatccaccacggtacgatccagctcggtctcctcaccggtcatatacagttccatcttcttgtccagcttcttagacagatcacggatcattctggggaacttcactacaacgctttcgataggtaccattcgtaccttcattacggattcatgcagattggttgtcacattttccagatattcgatctgctcattgaatgccgtattgttgccatggtcattgctggaagcagctaccagagagtttttggcaatgatcagctcacttacgagattcatcagagaatccagtttctcgatgtctacacgtacagtacggttgaccacaggcttgctcacctgttttttctccggagctttagcagccgcaggcttcttctcttcttttctcgtttcagtctttgtctcggctacttcttcttttttctcctgtgcgggttcctgtgtctcctcttcggaatgataattcttggtcttctccagttccagaaccgcaccggtcacctgtgcgatctcggatacgctttccgctgccttgatcacatcatccagagaataatcggacaaaacgatcagagtgaaatctttatcgaacttttcgtcttccacatcctgtgcgctgggtacggagacgatgatctctcctttttcctccacagccttgaacaccaggaaagctcttgccgccttcaggatacagctgtcctgtaccacaacattaataccgtatacatttttgccctgtttcatagcttctttgatcacgcggatctggctgtcatcaaacgcaatgccattccatttttccgcacctgttccggtgctctccgctgcgggtgctgttgctttttcttcctttgcgggctgctcctgtccggtcttgttagcgttcaaaatatcattcagggctttgatcagattttcattgtcattggttccctcatcggaggtctcctgaatgttgtttttatactcctccagagcgtccaggcactggaacagtacgtcgatcatttccggtgtcaccttaatattgccattacgcacttccgaaaatacattttccatatcatgggtcagattctgcatccgcttatagcccatggttcccgccatacccttcagggaatgtgccgcacggaatatttcattgatattatccatattctcgggatctgactccagttccagaatctgtgtattcaggttctgcagatgttcatttgtttcatccagaaaaatttcaagatattggcttacgtccatcttttcctccattctgccgatcacagcattgccggaaacggcatatattacttaatttactcctacatgcagtatgatttcctgggcgatctggtctaacggtaccacctgatctgccagtcctgctgcaataatactcttgggcattccaaatacaatgcttgtctcctgatcctgtgcgatcacgtatgttttcttggaagttctcaatttaccgatcccttccgttccgtccgcacccattccggtcataactgcacatacaaccgtatcaaagcggctgtcctgcagggattcgtacatataattggcacagggtctgactccttccctgtaaggttcttccgataaatgcagtgtatgacgtccggccggtgaggttaccacatggaggtgctttcctcccatggcgatatagacccaaccctttttcagttcttccccttctgctgcctcttttacatgaatctggcttaaattatccagtctctctgcaagagatgctgtgaatcctgccggcatatgctgtactaccagtaccggtgcatccagatcggccggtaacagagggatcaccgattgcagagatttcggacctcccgtggagcttgcaattgccaccactttgttgccgcccacactgaccgggtgatgattgatgatcttcatcatctccctgactgtgcccttctcttcggaaattttcttctcctcattgaatgacggcattctgccgttagccacaacattcagtgtccgtaaaaactctctgcggaaattctctccccggcagtcgactgcactgtccggcttatgtacgaaatcaagagctcccagttccagtgcatccagggtggttctggcgccttccatagtgtcggtactcgccatcatcactcttgccggtatcttgtattttcgcaattcctgcaacagctgcagtccgttcatcctcggcatattcacatccaggacaaccgcgtcataactgtttctgctcaacagatcaaaagcttctaatccgtcttttgctctgtcaactacctgaaaccttatgtctgcatctattatatcacagagcactcttctcatgagtgcagaatcatctacaaccaatattttttttggcatcagttcagtctctcctttttacggctcttacgctcttcttcaaatataaaccgaataatctcttctctggtatttacgtccagattgtagtactggactctgtgttcaaacattcccctccggttttccagttccttgactgccaaaacctttccgaccacatcatatttttttctttccccatcttttagcagatggtagctgcacaggatcaggctcccgggttcatatttctgagatgacaggaagcgcaatccgccaccactgatatctacgatcacactatgctttaacggaagtcccggctgaagctcatagggtgaatttttctccagtgcctcgatttcttcttcctccagattccgcgcacacatatccagtgcacaactgaaccgataatattctctccgctgatatttgcgcagattgctggtcagttccatcaccagcacatatacattattacttttgtaacgatctacgattctggaaaaacactgatacagactattctcttcgaaaaataccatatcatattcgctttccaccggcagaaggatcagtctggtctgttccattggcatggaaatctccagtgtatcctccgataggatctgcagtacacggctctggtaaacctttgtcgtattttcggctccggattctcccaatccatgttccagcgcccgaagctctactttagaaccttcttccacaaatctggacaacataattttgtacctctcttatctggactgttttgcagctccgtttctggtccctataatatgggagaaaaaagctgccattccgcgcctcggttgttcttcctgtgttttatcgcacaatttctccgcaattctctgatatgcctgactggattttgctcccggattctgtatcgacacaggcacctgctgcattactgcctgcaccacctggggatcctgtggtacacaccccaaatattccatggaggtcttaagatatctggtaaccactgcattcagcttatcaaacagcacctggccttcttttacattttccactctgtttgccaccattttgaccttagtataggcctcttcatatctcggatgtcggtacaacgcctttaacaaagaataagaatccgtaatggaagtaggctccggcgtcgtcaccagcagcacctcgccgctcgccaccaggaattctaatacgctgtccgatattccggctcctgtgtccactatgatcacatccgtaagggcatccagctcggccagattctgtataatgcaggtaagagcatcttttcccagatttgacattccggcaattccggatcctccggagataaatcccactcccatagggccctgggttatgatgtcactgatactttttccttcgtataccagatcacataagttatgctttggcactgcaccaaacataatttcaatattcgccagtccgaaatctgcatctaaaataacgaccctttttcccattttacgaaattgaattgccagattgatagacatattggattttccaacgccaccttttccggaggtgacagttatgactcttgcagtcggtcttatctgcttatttgctttaataatccttaactgttccgcctgatccattttcccgcgcctttctgtctaagctttattcctttccaccaaggatctgttttaccgtcttctgtggattgaatacttccatgtcatccggaacattctgtccacaggtcacataagcgaccggtgcaccggtataaagcttcatattcagcagattccccactgcctccgtttcatccaacttggtaaagatcagctcataatccgcgatcttaccataacagtctgcaattctctgaagatccctatatttagtagttgcactgagaaccagaaacacatgatagtttccggggtctttcagtgctcccaccatttccttcattttctccagctgatccgcattctgatgtgatctccccgctgtatctataaaaatataatcacaatcccaataatccttcactgcagtctgcagttcttccggggtatagatgacccggaaaggtgtctccaaaatattggcataggttcttagctgttctgcggccgcaatacgataggtatctgcggttaacagtgccactttctttttatcctccacacaatattttcctgccagcttggcaatggtagttgtcttacccactcccgtaggtccgataaataatacaatcctcggtccgtccgtagagggcgtaatcccttctgactttccgaatttcaataccatcttctgataaatattagccagcagataatcaaagggcaggtctgcttttttggttttagaggcatcttccaaaatactgtttacgtatttctcgtccatctcgttatccaacattttattatacaacagccggataaatttatcctgttccggattctgctcttcctctttcttctccggggtttccgcttccgaatcctttttctctttttcttcactgactgtttcccggtgggttcccgtctcctccccggtcgcctgtctgctgtttaactgactctccaacagtgtctgcagactgtccagctttttttctatattctctgtactgtttctgacaaacagatttctgttctccgccggtgcatccgtcgtgtgcgtaatacttccatattgcggtttccgaggattttcctcctccagtgcagcagtgatctctatctgcttcggagacagaaatgcaaaaaatcccttcttttttacttcccttacattcatgatcacgagaccgcttccaagttcttttttcgcagcttctgtagcttctgcttccgttttccccgtgtatttcttgatgatcatattactcctcactcctgcgtcggttcactcttcctgttatgctgtgaccattcccacagattgtaattctacatttgattccacttcattgtaagataccacgaccagatccggataatagtcttccgtcagtcgtttgaaatacattctcacaatgggtgatgtcataataattggggtttttcccatattttccagctttttgatctcttcacccacagcgttcagtatcgccttgcttctggctggatccagattcaggaaagctcccgtctccgtctgttttacgctgcccataatttcctgttcaatcttcggatccagtgtcaacacacttgtcgtctcatgggaagggaaatatttcgtagaaatcgctctcttgagactctgtcttacatattccgtaaggatatccgtatcccgcgtcgttggcgcataatcggccagggtttccagtattgtcagcagatctctgatggatattccttcttttaacagattctgcaacactttctgtatttcacccagtccaagcagcttgggtaccagttcttccacgagggaagaattgttctcttttacgttgttgatcaggttctggacatcctgtctggtaagcagctctgcaatatgctgacgaatgatctctgtcaggtgcgtagcaatgatcgagggaggatctactactgtatatcccagactctccgcacgttctctctgtccttccgtgatccagatcgccggcaggtggaaagaaggctcaaaggtagggattccggtgatctcttcctctacatacccgggattcatggccatataatggtcaaacagtatctctccctcactgacctgaattcccttgattttaataatatactgattcgggttcagctgaatattatcccgcagtcggataataggtaccaccgtaccaagttccaatgctatctgtcttcgaatcatcacgacacgatccagcaggtcaccaccttggttcacatccgccaaagggataattccgtaaccgaattccaattcgatcggatccacctgcagcaggctgttgacattttccggctgtcgtatctcctccgcagctgcttcctcactgtctacttcctgttcaatctttgccgtctcaatcgtgccctcaatatttctcgccacaatgataaataccaggccaagacccacgaacaggatcgtgttcagttgtgtcacaaatcctaaaacagccagcatggcccctaccaggtacagtgctttcggcacaccgaacagctggcttaccaacgtagtgccaaagtcagcatccttgcttcctttggtcacaagaataccggtggaaagtgaaatcagcagagaagggatctggcttaccagaccgtcaccaatggtcaggatcgcatatttgttcagggccgctgtaatatccattccctgcctggtcattcccataataataccacccacgatattgatcgtggtgatcagaagacccgctaccgcatctccctttacgtattttacggcaccatccatggaaccgaaaaagcttgcctcttcctggatcttctctctgcgtctcttggcttccgcatccgtgatggctccggtattcagatctgcatcaattgccatctgcttaccgggcattgcatccagggtaaatcttgcggttacttcagacactcgctcggaacctttattgattaccatgaactggatcaatatcagaataataaagataataacgccgatgaccaggtcgccgccgcctacgaattcaccgaaggtctccacgacattaccggcattaccatcccgcaggatcagtctggtggaggaggtgttcagtgctattcggaaaattgttgtaaacaacagcatggtgggaaagaacgacatatccagcacttccttgctgaacatggtagcgaacagaaccgtcaacgcaatggaaatattgatagccagcaatatatccagaagccaggccggaatcggtacaataaacatgataatggcagccatgatataaattgctacacccacatccgcttttttcattttcatatgcacctgacctcctttctgtcttttttgtaaattcttcttaagttatatcttcccctgcagatgatatacaaatgccagcacttccgccactgcctgataaagctccggagggactgcctgtcccacatccacattggcatacagcattctggccaggggtttattctctacgatttctatctgatggtctctggcgatctctttgatcttagccgccagataatcttctcctttagcgatcacaatgggagcatccgccacctccggatcgtattttatggcaaccgcataatgcgtggggttcgtaataaccacatctgcctgggggagattctgcatcattctgcgctgggaggcttcccgcattctctgccggatacggcctttgatctgcggatctccttcctgctgcttatattcttcttttacttcctgcttggtcattctcatgtccctgctgaattttaccttctgatagataaaatcagctgccgcaatgatcatgtagatcagtgatattctgattccgagatccgtcaccgtattcccgatcagtccgatcgcctgcatcagatccagatcatatagctgatacaacaggggccatttattcttcagataattatagcatatgtaaacgatcagtccaatcttcaggagggatttgatcagttctaccactgagttgactgaaaatattctcttaaatccggacaccggactcattttggaaaacttcggctgcaatgtttttccggtgggatgccatcctacctggaccacatcacttaaaaaagcaatcaggaaaccgatcagcagaagcggtgccatgatcactacggcttccagcatcatttttcggaataccagtgtggtatcctgttgcggcatattgccatgccagaacgttaccacctcgggaatcttctcataaataaccgtaaaaacattcatgaactgatatcccatatttcctacccatagtttcagtaccaggaacaccgccagtaatccaagcccattagcaacctcacggcttttggcaacctgtccttcttttctggcatctgttaattttttctcggtagcaggttctgtcttctccccgccctggccttctgcggcaaagaattgcagattatattctaagctcacatcatacctccgataaaagatactaccatcttcttcatttcctgatacacaaaatccgctgccccaggcaacattccggccgtaaggaacagggcagacaatcccgccagcaccttcagctgaattcccaccgcaaacatattcatctgcggtgacaccttggccagcacacctaaaatggcatttaacagtaatgtcacacaaaaaatcggcaatacaatgcgaaagccgatcagaatataatcattcataaattctatcatggagttcagcagactgtccgcatgaaaagtcacaccgtttatgggaatcagcgtaaagctgtccgccagcgctccaaacagatagcggtacattccggaagcgatcagcatcaacataaaagaatactgatataacgcaccggtgatactggtactctctctggtagccggatccatcagggttgccatggacaggccggtctccatatccgcaatggatccggcgaaattcacgatcgccatgcagatattcgcgccgaatccgatcagaagtccggcaattgcctctttcatgacgatcacggcatactccatcaccgtatcaaatacaaccgcatctgccggtgtcagtgtttcatacagcaggatcgatgtaaaaaagctgataccgatccggatcctggcaggagtatcgttcattccaaaatacggtgctatgtatacaaaacaggatactctgacaaaaatcaataaaaaatattcaagatcatatatcgaaaacgaaaaatctatcatgaagtcatcccgtcacctgtgtacatactggctgaaactcgaccaaagctgtactgtgtattctaccatagtattcatcatccagctgcccagcaggatcagcgtcaggaagatcgctatgattttaggtacaaatgtcaatgtctgttcctgaatggatgtcaccgtctgaaaaatactgatgatcagacccacgatcaaagacaccagaagtacaggaagcgataccttgatgatcacatagagtgcattattagtcatttcagatactgcatcaatcgtcatagtaacacctcaccttccgattaatagaacgtctgcaccagctgacctatgatcagtgcccatccatctgccagaacaaacagcagtattttgaagggcatggaaatcgtcgtaggcggcagcatcatcatacccatactcatcaaggtcgacgccactaccatatcaatcacaatgaaaggaatataaatcataaatccgatccagaatgcagtacgcaattcactgatcataaaactcggtaccagcacggaattgggaatatcctccagggttccatcccactccagtccggcgatatccataaaaagttctacgtcctttacctgtgtctgcggatacatgaactcccgcaagggagccattcctttttccagtgcttcactctggtcgatggttcccgcttcaaacggctggatcgcctcttcattgattctcgtaatggtaggctccataataaaaaatgtcaggatcaatgccagaccgatcaggatctgattgggcggtgccgtctgcgtattcaatgccgatctggtaaagtgcagcacaatgatgatcctggtaaaagaggtcatcataatgataatggtcggtgccagtgcaatcagtgtcagagtgatcagaattctcagtgctccattgatctgaccgttcccattattgtaggtaatgctgaccgtattggctgtattcaacgaccctacttcctcatgggtagtcgccgttccggcaggattgatcactgtggagacctctgtgtctcccgtaagatgtctttccgaagcctgtgcctttatcggtacgcaaatacacaatatgcccaccgtgaccagcaggcataccatatacgttgcaatcttaaatttattactccagttaatgatcttgttcttcattctctttcttagccgcacgtttcaataactcccggaagccagaagtattatctgttgttgtcttgtccttcagctgcccggcaggaatttctcccagatttgttacggtatctttgcagaccgcaatcgcaaaatagctttcgccaatgcgaaccaactggatatatttgttgttggcgatccggacggtctccaatacttcaatattccccgctgcaccctgctgcttctgatatccggcaatccattttgtcaccagcgcagtcaccgccagtaccgccacaaagatcagcaacactgtgatgaattgcgcataactgtctgtttttccggtaagtatgatcattaacccactacctttttcactgcttcaataacacgctcagcctggaaaggctttacaatgaagtccttggctccggcctgaatggactcaataaccattgcctgctgtcccatagcggaacacataattacttttgctccgccgtcgatctttttgatctctttcaatgcctggattccatccatctcaggcatagtgatatccataagtaccagatcaggatttacctctttgaacttttccactgccttcaatccgttttctgcttctcctgccacattataaccgttcttggtcagaatgtccttgatcatcattctcataaatgctgcatcatcacagattaaaatatttttagccatttaattttcctccgtttatttggtctgttctctgcctactttataatctccgtaattcgtacgccaaaactctcttcgattacaacaacttctcccttggctacgaacttgccattcaccaatacgtcgatcggctcaccggcaatacggtcaagctctatgatcgttcccggagagaagtccagaatatcggatatggattttgtcgttctgccaagctccaccgtaacttccagtggaacatctttgatcagtccgatattctcctgtccggtagtgcccatattgtcattcgaaaagctctggaactgcgcaggctgtacattcacattctgtcccggcattcccatcatgcccatctggttcatgctgttcatgcccatgttgcccatctggttcatgccgttcatgcccatattgcccatctggttcatgccgttcatgcccatgttacccatctggttcatgcccatgctgcccatctggttcatgccgttcatgcccatgttacccatctggttcatgccgttcatgcccatgttgttcatctggttcatatcattcatgcccatgttacccatctggttcatgccattcatgcccatgttacccatctggttcatgccgttcagattcgtattgttcatctgcgtctgattatcagtacccggtgcaggaatctgcgctgtggtatcattctccggctgttcaggctttttctctgtcacttcatcaatgttagccatctgcgtattgataaatgtctctaccagcttacgggcaaaatctatgggatatagctgcatgatagtgctgtccaccagatcatcaatctgcatgcgaaaagaaatctttacaaaagtaccgcccaaaaatggagaaatttctttgccgtcttttacttctgtcaggtcgaacagggaagactccggcgggctgatgtcgatcaccgtctgcagcagcgtagatagtgaggtggctgcagctcccatcatctgattcattgcctcggagattgcactcagatgcagctctcccagttctccttctgtattggtaccgtcaccgcccatcatcaggtcggtgatcacttttacatcatgctcttttaacaccagaatattggtgccgtccaacccctttgtatacttgatctgaataaatacgcagggcttctcgtaactatccagcaaagtcttccatgtggccagtgtaaccaccggagtggtaatatttactttgcggtttaccagtgaatataatgtagtggcggaagaacccatgctgatattggctacctcgccaatcgcatccttctctacatcggtcagttcctcttcgtctccgacagtcggtgccacatctttcacatatgcattatccgtattttcagccgagctgctgtcctgaggtgtctccggcgatgcaccgctgtccgcggtgtccgacagatccatgccttgcagcagggcatttatctcatcctgagataacatcccatccatcgttactcctcctctctgatcaccgatgtgatctgaacagcatacgaatctttctctgtacccggtaatgctgtgaacttcttaatattgcccacatacacttccatatcggtatccactctggaatccagtcgaatacaatctccaacctgcagattcagaaaatcgcttacggaaattgtgctcttgcccagcaccgctttaatgggaacatccactctgcggatcatggattcaatgtactcttcgtagtgttcatcatggttctcctgcattgtggagaaccaatatttggtgttcagtttatccatcacatcttccagtgtaaagaaaggaagacagatatttaacattccttctacatccccaattttcatgttcagggttacaatggcgatcatatcactgggagcgatcacctgcgcaaactggggattcgtctctagcctgcttaagaccggcgagatatcaacaacatttttccagggttcccgtaacaattgggtgaacattaccaataatttctgtaatattgtcagttcaatatctgaaaattccctgcttttttccaaaggctgtccgctgcctcccagcatacggtcaagcatggcatagcacagattggttgctatctcaataatgatattgccgttaagtggtgcaaaattaataatgccgagtaccgacggatttgatagtgcattggagaattcactgaaagtaaccgtctcggaacttgcaaccgatacctgtacgtttttacgcagatataccggcaggtttgtcgataccagtctgctgtaatgttcaaatataatctccaatgttcttaagtgttctttggagaatttggtgggacgactgaagtcataatttttaacctgcttctcatcctcaccctgaatctgatccacatccagatctccatccgacaattgtttcaagagattatcaatttcgctttgtgaaagtatatcactcacaggacctcacctcctgtcatcttatttttgtggttcatcagccgaatttcactccactgattgcaaccttatagatgaagtcggattggaacagatcctgcacagacttcaggatttcctctttcaaaccttccatatcctctctgcactcatcttccgtatgtgcggaaaccgtagcggtaatggcatccttgatcagattttcatagccggacagtgtttcactgcttccgtaggtcttataatccttgctctttttattgatagacagcgagacatcaaacataatataatcctgctttgctcccgcctcactcttcagcgggatcgtcatagaatccgcaatattatatacttctgtgtccgtaagaggaacattcgtcgtcccctctgctcccggaaccgtcagttccagattcatggcggtcgtgatattatccaccagctgtgccgtcttcttattcgttcccacaatgcttaccagcataacaccggtcaacgcaatattcacgataagtagtgccaggatcagcactgtcatcagatttttcttcatactattctgcttcctttccctgtctgccttaatttgccgcagaaggattatatattctgatctctacccgtcgattcttacttctgccctcttctgtggaattgtccgccacgggggtgcggtctcccattcccgcatgccggagatttgcaggattcagtgaagtattatccacaaggtaataaaatacagatagtgcacgtgcactgctcagttcctcgttatcagcgaacctcgcactatgtatcggaacattatccgtatgtccctcaatttcaattacagaatcactgccatatcgttccaggatcactcccactttgtccaatactgtcttggactgttccttcagggaatcgcttccggaatcaaataaaagagctcccttcatagaaagctgtacatattgcgctgtgaaagatacatccacctgatccgccaggctgtcctcatttacagcttcctgtaccatttcggacagttcttcattgctttgaagatttttctcattaagtgcctcctgcagtgcctctgtgctatcatatttctcataattgtcggaatccgtttcactgtccgcatttcttccggcattactgatatactcatccagatcattcagctggctgacaccgttgctgatcaatattccttcaccgattgctgtagaacccgcatcaaaaatactgaatgtactgttagacattgctgccgccattgcattccacttatttgcatcaatggatgacatggaaaacagcatgacaaagaagcacagaagcaaattcatcaggtcactgaaagtggacatccatgccggtgaaccagcaggtggatcttcaggcttacgttttgccattaagcttcaccccccgcttctccttcttcatctgcacttgttctgtccttcggaggaaggaatgactttaatttctcctcaatgacacggggattttcacctgcctgtatggacaaaagtccctcgatcatgacttccttctgctgcatctctatcgcattatccgcttttaatttattggataccggcgtacagatccagttagccaacagggatccgtacaatgtagtgatcagtgcaaccgccatggcaggtcccagtgtggacggatcatccatatgatacagcatatctaccagaccgatcagggtaccgatcataccccaggcaggacccatggccgccagtgtatcccagaagccaatcgtatccttatgtctaccctccacgctgaccagttccgtctccataatcgcacgtaccaattcgggatcggttccatcgacgatcagaagaattcctttcttcagaaaagggtcatccaggtcggttgctgcttcttccaacgaaagcaggccttccttacgtgccacattggaaagctctatgatcttaccgatcatatccgaagtattcagtgtgggcgctttgaagatcagtgtgaaagatttcaaaccagctatgtaattctgcaaactcacggacgtgagggtacaggaaaatgctccgccaaaggtaatgatcgcagaagccggatccaaatattccctgaatcctcccacacctgcggaacttatgataccaaataccaacatgaataatgccagcaatataccggctaaagaagctatatccacttaaatcacctgacattctgcttttttatcttgcaaaaatatcctttctgtataatattacaagattttttatttcttgtctactttcttttacaattattttctttccggtggtaagtgtcaacaccgtatccggggtctcttccaccagttcaatcaggtccggattcaccaataccttgactccattaatcttcgtaacttctatcatgctgtcttctccttccctgttatccgaacattttctacactttatccgttttgtgcatttttctcattttttcttatagtacttttttcccttgatcttttatacatacaaaagggacaggttttttcctatccctttatgcagtcaatttttttttacgatttcttaacgcttcagattggtcagttcctcaagcagtgtatcggacacggtaatgatacggctattcgcctggaatcctctctgtgtggtgatcatctcggtaaactcagacgacagatctacgttactcatctccagctgaccgggggacatgtatccgccgcctgcagtgatatctacgccgataccgtcgaattcaccggagttcagtgttgcggagtagagattatcgccctccttctccagaccggaagcattggcaaaggctgctgtggcgatctgtccgagcagcttagtcataccattgtcatagcttgcgtagatcatgccatccttctgaatgaatacaccgatcatatctcccagacggcgtccggttcccagaccatccaggtcaccactggtggcaccgatggtggaggtacccttcttatcgtagttggtacactcggacagatcgatagtaacatcggagaaattaccacccaaagcagaaaatgctgcattaacgttcaggtttgtagtagagccgccgacactttccagtttaccggtatctttattaaatactacagtagttccttcaaagtaacggccctccatagtaatcgcactaccgtcagcaggaagtacatctgtcgttttaccggccatcatatttccaagcagatcctgcatcgtcagctgctgtttcggatctgccgcactcgtaatatacagattcaggaattcatcagtagatccttcgtatccataagccttcgcgatggcatccagcgctttctgctgtttctgtgccgctgcatcatctgctggagtgatcagacttccatccgccttaaaaatatctgcaagattggctacgtctgtagtgccatccttggttttcagcacttttccatcccacttgtaggcatcggtatttaatgttaccttagtctccatcttctgttgggatcgattaccaaatttcagttttgaaatatcgatttctgctccggtagaatccaacagcttgctcaattccatactgtactcattggttttatcaccgccggactgcttaaaggtaaacttcgcagtataactgtaacctctcgcatcgaagaagttcaggtttacggtcttaccgttggcactggtcacatccttatcgttctcatccagaataccggaaatatttgcttttgtggtagcctcaggaggatatgtcatatttgctgcactcataatacgcagtgcagttacggtatcctgcttgatgttgcctgtggtctcatccacgccccaacccatgacattgtaaccggtgctggtcattgccaggttgccggcgccatctacatagaaagaaccgtctctggtaaagaagttctcggagccgttgttgactacgaagaaattgtctccggtgatcatgatatcaaaggggttgccggtagactgtgcggaaccctgcgtggtaatggcagtgttgatagctcctgccttaacgcccagaccgatctgcttggcattggtaccgccaacaccggtggtagcgttggcaccactggccttctgtgtggtctggctcatcagttcactgaaagtcatggaactggatttgtaagctgttgtgttgacgttggcaatattattaccgattacgtccattctgatctggtgtgttttcagtcctgctacaccagaatacaatgatctcatcatagtgcttgttcctcctgtgttcggaaccgtactctttctctgtcattcaaaagagggtaacctccattaaggtccggtctacataattacggctccgttaatatttgtaaatacattttcttcggtttctctgctgtccatcgcagtgactacggtcttattgggtacattcacaataaatgccagatcgtccacgatcaccagagaatccctgatccccttctgtcccgctttttgcgctccgtcgttcaagcgttccagctgtgcatcggtcaattcaatgcctctgtctgccagccgcaccgtagcatgtttggaaaatttcagttgctcgttacttttgctctgtaagatttcctggaatgataccagattttcctgtgctgcttttacggtcttacgactgttgtttaaatactgatttgccagctggtcaatggacagaaaactgtttttctgaatatccatattcaaacactcctctgcgtcagccgcttacttactgttctatgcttcttcggtaccctctgtcttctccgtactctcgggatccttgtcttcggctttttcttccgccttacggatctccttcagtctctcgatgtacttattcagactggttacggtatctttggccaggaaggatttctcataatcactcatcttgttgtattccttctccagttcatcaatactctcaccatccgtagaatcaatgccgtttacattaggaagcttgttcagctttaccgtaaagttatatgccttgttatacgcatccaggtaatccgcgtccacaatggaatccaggtcatcaatggaatatttctgttcattaatatagagatacgccttattgttctcgtatgctacataatccacctttccctgtaccagcttggtctctccggaggatgtagttgtcttgatgtagacctccttgcctaccagtgcgcttgccctctgcagatccatgctgctggacatattctgcatctgctctacctgtgagaactgtgcatactgggatatgtactcggtgttggatgtgggttccagaggatcctgatacttcatctgcgctaccaggagctgtaaaaatgcttccttgtccatcccgcttttgcttgattttgtggatttttttacagaagtctgtgatgcagtctctacgatcttaccgttttccacgggtgcaaccaatgccattttctttctcctttctgttattttttatgcggtgaaatccaccgtattaccgttcgccgacattatatccgctgcgatccggtcttcttccgtctgaggctcatcctctgcgaatgctgtgctcaggttgattctgcgggtgcgtcttctgcttaccccggctccgctctcctgatcactctgattgcctctaccctgttccaggttctgttcaaacggatgtgtctgtaccgtcacttcaatagcctctacttttacgccctgttccgcgaagctttccttcagctgaaccatctggctttccagtgcagcttttacggtttcattttgtgtaataaagttcgccgtaaccacaccgttcttcgatgccacctgtacgtgaagcgttcccagactttgcggatgaagctgcatttccagatcggagctgtccgcctttacagagactttcatgtaatccatgatctggcgcatgatatcctgtgtatccgtcgtttgtgttccttctgtctgtgatgcctgctgcaatccggagaggaaattctcttccttcagattctgtaacaacagattgccctgctgtcccgctgtctggctctcatgtctgttccccgaatcttttgttttctcttcctgtgtattctgtaccggtgcttgtattttctcctccggttcctgctccactgtcggaagttccacatcactctgtgatctctctgccgcatctgtggcatgctcttccacttccaccgtgatcacaggttcctctgtcactactttagtgaccgcatcctgccatttttccggtgtcagctgcagttcttcctgtgcctgtcccgtcagatccttctgcagatccaggatgctttttacatttccatacagctcttcattggtaagtaatgcaaaagaatcctccgctccgctgaccgccattaataactcgttcagctgtacaggatccatcaggtctgtctctgtcatacccagttcatccatgactccctgtaattcttcttcactgaccgaaaaggtatctgtgatctgtccgatcaggttctgtacgatggttcccaggacttcctggactttttccagatctttggcatcactatcctctgctttgacatctgacttttcctgtgttccggcgaggtgatcccgctgtctgtctccggcccgtaatgattgaccgcgtctgacatcgttacgtccgtcggtcgtgcgtccaccgtttccggtcgtctgcgcattgttctgggtcttgttccacactgcctggaaaccggttccggcattctgtttcgctgctgtgaccatatcccggatctgtacattgccgtcgttgcccacacctttaatcgttgtgcctgccatgttcttttctccctcctttcccaggtcctttggctgccggatggcagtcttaaccctgtaatgatactacaaatcttttatcggatctttccgcttttttcttaagactcagggtccataattttcgtgatctttgctgccacttcagaattcatggcacccaggatcttacccctgtcctccgcgctcatcactttcagaatacgggccgccagatccagattattagtcatctgctcaaaaatagccgctgcctgcttcggtttcattgcagaataggctgccgcataatcctgtatctcctgactctcttccaactgcgtcactacctgcttataaatatattcggcagtagcgggatccatggattcataatattttttatattcttccgcacccggtcccttatcggaatagactacctcatcataaaattctttctgaatccgctggaattccacctgctgattctcgaattccttaagtctcagcacctcagctttcagctgatccagttcttcctcctttgctgcagatgccgtctgcgcctgctccaactgcagctccagactcttgatctgatccaccgcatcctctagactggtatagccaccgtaggcactgccatccgtagtctctgttatggagttagccgggagaattttgttcagcacaggcacatccttgagaatgggagtcaccacagagcttccgaatcccccgatatccagcttgatgatcgcgcagattacagccatccagagtaccacgatcagtatggtcgctccgaaggtcagaaggctgttgccttcgctcccgtcatccagagcatcttcctgttttgcgatttcttttgcccggcgctttgcttccttgcgctgtgcctgctgttctttcttcagttttttcttttcttccgccagctgttttctctcgttatccgttgtctgctcttccggagtcttttctcttgccatttatgtcctcccgttgtctcaatccgcctgccggctttttttgtccgtaagtataactggtcagttcatcgattgctttactttccgcatgattttcttcctgcagaaaagcctcaaatgctttttctctgagggtttcatgcatttttctctctttcatggcttctgccattcgttctctggcagcctccacattttcttttgctttatccacccggatgcactgcgcagccaccagactgtccattttcaaaagcgcttccttgttctcttcaatggcccgcagatccagtttcccctgcaacagaccaccggattcttcttcgtattcccgttttcgcgccttcaggcgttccaaatgttcgatttccacattcaatgcagtctgtgccataccaaattcctgtttggcctgtgtttccattttttctttgatattcaggatgttctgcagggaatatctgaactttgccatttatctcactcctgatttgcgaacaggtcttccaacatctgtaccgtctcttcaaaggtaaatttctcctccgtgccctgacacaggaagctgttcacatcatcgatcttcgagatggcatagtcaatgttcgggttactgccctttttataagcgccaatattgatcagatcttctgcttcattataggtagccagtacatttttgagtttgttggccgcctgcttatgctctttggctgcgatctggctcatacatctggaaatactctgtaaaatatcgatagcagggtaatgatttttgtgtcccagctttctgtccagcataatatgaccgtccaaaatacttctcgctgtgtccgtgatgggttcgttgaaatcgtcgccatctaccaggacggtatacaatcccgtaatggatcccaccgcagctctgcccgcccgctccaacagcttaggcatttccgagtacacgctggggggatagcctctggtcaccggaggttctccgctggccagtccgatttctcgctgtgccatggaaaaacgggtcaatgagtccatcatcagcaggacatcctttccccggtctctgaaatattccgcaatagcagtggccgtcttggcagccttgttccgctccaatgccggtctgtcggaagtcgccacgactactaccgatctgcgcataccttcctcacctaagtctctctctatgaattcccggacctctctgccgcgctcaccgatcagcgcaatgacattaatatctgccttggtatttctggcaaacatacccatcaacgtagactttccgacaccggaaccggcgaaaataccgattctctgccccttaccaaccgtgatcataccgtccactgcctttacccccaggggtaatacctggtcgataatcgctctggacatagggtccggcggtgccgcctctaccggatatgccacgcctgtaatcgtgtctccatcaatggggattcccagtccgtttaccgtcttgcccaaaagcttctcacttaccgtaactgtcagggggtctcccgtattttccaccacacagccgagaccgatgccatctaccgaatcgtagggcataagaagagtcttcttatcacgaaatcccacaacctcagccataatgggttttgccccttccgtttccggcaggatcctgcacagatcccccagcttggaatccggaccggccgactcaatcgtcagacctaccacatttaccacttttcccagtttccggtaaaaggtcttatctgctaatttattatatttttcaaaatctatgttcttaatgaccatttatcagccttcgtaggataataattttaatttctgacgcagttcggacagctgcgttcccagtccgcagtcaaaaataccgccctctgtctcgatcaggcactcgccctttccgagggtaatgtctttcacgatctccacggttgcattcggcgcaaccgcaccggcagagatctgctttttctgcatactgacataagggtaatcttctttggacacatgaatcagaaagcttctgttatcctctgatttccgcatggtagtggagatcagataacacagaacctcccggtaggaatgcaggtctacatgaaaaatatgctcataaattccggtgatcgtgtccacaaattcaggttccagctcgtccagccgcttctggtattttgcttccagtcccgccgttttcttctgatattctgcttctcgtgcagcctctgtacgatccgcttccgcctgtgcttcctgctgtccctgtcttctggccgcttcctgtatgtctgcccgctctgcttccgcctgtgatctggcatcctgcaaaatactttctgcctgtgccctggcatcttctacgatcttctgtgcttccgcctccgcatcttccttaagcttctgaagatcttctcctgctttgatcacattgccggaaggagtgaaatctgttttctcttcctccggatctgtcaccggtgcttccactttgtccgctgccaggccggacacaaaccccgtattactttccttctgcattttggcagacagctccctgatacgttttgctaccagtccattggtatctatcactcttgcatcgtcttccgaaagctttgtaaatcccttttttaaaagattactagacaacgatctcgtcacctccacctctggaaatgatgatctcaccggaatcctccagcttacggataatattgacaatcttctgctgtgcttcttctacatccttcatacgtacagggcccataaattccatatcttccttgatcataaccaccagacgcttggacagattgttgaagatcgcattctgtacctgctcgttggcacccttcagtgccactgccagatcattgttgtccacgtcacgcagcacacgctgaattgctttgtcgtccagtaaaaggatatcctcgaacacaaacatttttttgcggatctcgtctgccagttccggctcttcgatctccagtgtctccataatgtgtttctcggtaccacggtctaccgtattcagaatatctaccactgcatcgacaccaccgataatggtgtagtcctggttcaccagacttgccagcttggattccaataccttttccacttctttgataacatcgggactggtacggtccatgacagcaatacgtcttgccacttctgcctgactgtcgggaggcaatgcagatatgatcaatgccgcctgactgggagacagataggacaaaatcaacgcaatggtctgcggatgctcatcctggatgaagttgatcagctggctggcatcggtcttacgcacaaattcgaaaggcttcacctgcagggacgcagtcagttttccgataacatccatcgccttgtcggaacccaatgccttttccaacagttcttttgcatagttgataccaccctcggcaatatactgctgtgccagacacacctcgtagaattcattgatcacttcttcttttacctgaggtgtgacactcctggtattagcaatctccagtgtcagttcttcgatttcttcttcctttaaatgtttaaaaattccggcggatctctccggtcccaatgcgatcagaaggattgccgctttctgcaatcccgatattccgccttctgcttttgttcttgccatgtttactccgtttcctagttccagtcttcgttcagccagttacgcagcagtgccgccgccgactccggattctcatctacgaacttttcaatcatcttgcgtgtctcggacttggattccacatcaatatcctccagctcagtttcaggagtggactgcagcatattctccacagatacctcctcttcctgctgtactgcctgtctggtacgcatgctgcgcaatactacaaatacaagtaatcccaggatcaggaccagcataaccacactgagcacattttgccagctgactggcttgctctccttgtcataaaagatcggactttcataagcaatgatcgtaatattgctttcgctgataccggttgcattggctaccagactgtacatatcggaatccacatccagtttggtatccgcactgttctgggttttgtattcgtcccaggtagtaccgtccaaaagtccctgtctcttgacatcctcataatggatctctttataggtaattgcagcaatggatatggaggaattggtataattgatccctcccgccggtgtcaccttatcggtaatggactcattcggcagataatccctgctggtctcagaagtcgaggaagagctgttattgctgtccggggatacataagtggttttcccgctttccccattggaggtggtacccggaacacctccgccatcattggtgttctcactctcataagtctcctcatgagaaagcataccttcatctcttccggaatttgcataatattcttttactgtctccttataatcggagaaatccatactcagatggctggtcactgccgcatcgttatactgcttggttcccaacagcaccttttttacctgattggcgatcatggattctgcctggttctgtaattcctgcatggaattggcaatgcctgcggatgtgtaatcgtcaccgcctgcaaacagcagattggaatcagtatccataatggtaatattcgccgtggtatcattccgcagccatgtagcaacacactttgccagcgctgctgcattcgcggatgtaaacgtaccatccagctccagctggatgaatgcagatgcttcttcgttctgtgccgccagcgttccgttatccttcgggaagcttaaatgtaccttagccgattttacagcgctctgtgcctcgatcgtctgtgtaatatactgctccagataggaattgtagagtctctccttatcggtagcggtcgtagacatgctgttccccagataatcattcagattcagggcatccggtacatatccggcagatccgagggccaggttagccgcactctgctggctgctctctacatcgatcttcagtccgtcattggattctctatgtgcgatcccggcactgtccagcgtatctatgatttctgacgcctgtgcggtagtctcgcaggtaaccaatcgtacatactgtggtttgctcatgacatacatgatgatcgcaaatgcaaagatcacaaccgcagcggctccgataatgatgctcttctgtctggttgtgaacttattccaccattccagtattttcgcaggtatttcttttaatttgtctgccattgcagctctctcctcttacgtcaagtataaaaaggtatgatttagatctgaatctgcatcaattccttgtaggcttccatcaccttatcgcggatggctacggtatactgcagtgccgtagaagcctttcccatggcaatggtaaggtcatgtgtgttgtccgtctcacccagtgcgaaccggatcttctcattttcggcatctgagagatagctgttggtcgtcttcacattgtcgattgctgtgttgagaaaagtctcgaacatcgtgccttccgccttcttctccttctccgcaagcattcctgtcagagaggtgggagacaccgtggctgttccgtttacattatttaaagcagtgatcgcagaaatatccattttataaaccatatccttccttacgtcgtatattccggtccgttatgcaatgggccgttatccggatccgtcagcttactgaccgatctccagtcctttcagtgccatggatttgctggcattaaacgccgtggaattcgcctcgtaagatctgctggcatcgatcagatccgtcatttccgtgacaatattcacattcggatatgtcacatatccattctcgtccgcatccggatgggaaggatcgtataccatattcatctccgtagtggtatcctcgaagatctgactgaccttaacaccgcttccggagtagccgctgcttacattatgcagcacctggctgaaggtctgctgcggattcttctgctggaacgtaacgattttgcggcgatacggcgtaccatcctcggttcttgtggtattggcattggcaacattttcggagatcacgtccatacgcagtctctgtgctgtcagtccggatgccgtaacatcaaatgctgaaaacatactcatacgctaatccctcacttcatcacagtctgtaaattggtaaattcctgattgatgctgctgatcagtccctggtatttcagctgattctctgccagcatcacattttcattctcgatatccacattattgccgtccaggcggtaggaataattggcataatccacatacgccctgccgcggagcctgctcagattgacattggctactttatcatccatggactgatagcgattattgccaagagcctgctgcagtaccgactcaaaagccacatcctgtctcttataccccggtgtatctacattggcaatgttattggaaatagcttcattccgttgccatgcagcatccgcggcacgatttaaaacattaatataatcaaacgcatttgtctgtatcatactacctcacattctactgttccttaaaaaatcgataaaatcgcacaggaactgcttctaccatacctactctactttattataaagtatttcgacaaaaacacaatactaaaataagagaagagactatttttcgcaatagtctcttcttcctaatctgtcgttatttttgtactttttacttaatttctgccattttggcgctttaattcttcaatctcatcaaacacggcatcgttcaataccttgatatacgttcccttcatgccggaggatctggactcgataacgccggcactttcaaacttccttaaggcattgacaatgacggatctggtaatgccgactctgtcagcgatcttgctcgctaccaggattccttccataccgtttaattcatcgaaaatatgggtaatggcttccatctctgagaatgacagggtgctgactgcggatttcacaaccgctaccttacggctctcttccgcactctcttcatttactgcccggagcatttccagtcccaccactgtagttccatactcgcagagaataatatcatcgatatcatactgttcgtcacacttataaataaagagtgttcccagcctctcaccggcgatctcgatgggagtgatgattgcctggaactttctcgtgtcgatattctcaaaaccaagagtctccaagttgacattctccttcgtggacaacacaccaagcagtctctcatttaacatcggatcgataaatccgccaatactgtcatccaaaagctctgtgatgggttcgattccgtcggatttacctacacccagtaccttacccttcctgctgatcaccagtacattggaattcaggatctcacgcattaccttacagatatcgctgaataccactttgctggagttattattgtgtaacaatttaccgatcttacgtgtcttgtccaacaattgtacgctactcatctatcttcctccgtttacacatactacgaaaccacaagatgttatgcacattgtagcacatgtaatttcagattacaatgaaaatagcgctaatttatgagaaaattctgacagtatataaaactacttctcttccgtcggtttattcttcacataaccgcattgttcgtccatgcagaccagtttgttacctttttccagcagtaacttaccgcagcgggggcatttctctcccgaaggcttctgccataccatgaaatcacattccggattatcgatacagccgtaatatcttctgcccttcttggtcttcttcataacaatatctttgccgcacttgggacatgccacgccaatcttctcaaaataaggcttggtgttgcggcactcagggaatccggggcatgccagaaatctgccgtgaggtccgtatttgatcaccatgcgtctgccgcacagttcacagacttcatcggattcttcatccgagatcgtcacctccgccagatctttctcagcttttttcactgctgcatccagatccggatagaagttctccacaatggtcttccacttcacggtgccttcttccacgccatccagcaaggtctccatattggcggtaaaatttacatccacgatggcagggaaggcttccttcatcatatgattgaccacttcccccagctccgtcacatagatattacgattctccttggtaatatatcttctggcgagaatcgtggtgatggtaggtgcataggtactgggacgtccgatgcccagttcttccagggcacgcaccagacttgcctcggtataatgtgcgggaggctgggtaaagtgctgcttcggatcaaaatttataaattccaatacactgttctcatccaggttgccgcccagtacattttcctcgtccttatcttcctcctgggtatagacactcatgaaaccatcaaagcgcattttggaggctgccagtgtaaagatctgatccttcgcctgaattttcactgaagtcgtatcatactgtgctgcactcatgcggcttgctacaaaacgtttccagatcagctgatacagacggaacagatctctgggcagctgttctttgatggcaatgggcatacggtttaaatccgtaggacggatggcctcgtgggcatcctggatcttctgaccgttctttttttctgtatttacggcagccttgtacttttcaccgtaatgtgcgtcgatgaactgcgcagcctgtgcttccgcttcttccgatacgcgggtggaatccgtacgtaaataggtgatcagacctaccgtaccttctcccttgatatccacaccttcgtataactgctgtgcaagacgcatggtcttctgtgtggaaaaattcagcaccttgctggcttcctgctgtaaggtggaggtagtaaaaggaaggggtgccttcttcacacgctcgccgtgtcgaacttccttcacttcgtatttggcacccttcagggaattcatgatctcatcagcttcttccttgctgccgatcccctgctttttctccgtagttccgtaatattttgcgcagatgggcttcttctcgccctttaccttcagattcacatccagggaccagtactcctccggaatgaaggcattgatctcatcctctctgtcgcagatgatccgcagagccacagactgtacgcggccggcacttaagcctctcttgatcttcgcccacagaataggggagatccgatagcctaccacgcggtctaacacacgtctcgcctgctgggcatccaccagattcatatcgatctctctggcatgctttaaggattccttcaccgcacttttggtgatctcgttaaaggtgatacgatatacttttttatcttccagtttcaaggcatagtataaatgccaggaaatggcctctccctcacggtccgggtcggttgcgagatatatcttctctgccttcttcacttccttacgcaaggatgccagcagatctcccttgccgcggatcgtaatgtatttcggttcatagtcatgttccacatcaattcccagctgactcttgggcaggtccctcacatgcccctggctggccataacctcataattcgctcccaaaaattttttgattgtcttcaccttcgccggtgactctacaattactaaatattttgccatatatgctcccatccatccgttttcgcggatatacggctttcggttcccgcctctttgccgctttttccccatgatttgagtaatcgtgaaccactatacaacaaaaaaatgggaatggcaagaaaaatttataaaaaaaagagccaaaaagcaatcatttctgctcttcgacacttttcagggttgggctattctatgaaagaataagcagctgataggggaatcgaacccctgttttcgccgtgagagggcgacgtcttaaccgcttgaccaatcagccataggttacttacgaaccttattcagtataatacattaatttgaaaattgcaagtattttttgaaaaatttctacaattttcaaagagcagctgataggggaatcgaacccctgttttcgccgtgagagggcgacgtcttaaccgcttgaccaatcagccaaaaaaaccgtacttgcatagtataatggagttgtcgaaaaaatgcaagtacttttttcaaaaatttcagtaacgttctgtccccagcgcaaaagctcagtgcccggaccattcgcaaaagcgtctgctgcgcagccggcgccgcttgcgcggctcatcttttacttcatggatcgggcgctccgctcataccgtgtggaacacgctgctttgtacgcaagcgtccacgcagtgtgttctgcacggtatggctgagctgttacaccagatcaaatatactgatctgattggactcgggcaggtctcctaataatcctaacgaatccataaggtcaattatcgtcttggaaaccttagttctttgacgaaaatcatctttggagaggaacggaccgtccttggcagcttccacaatggcatctgccgccttctctcccagtccgtcgatactgtttaaggacggcattaattttccatccacgatctggaacgatctggactgtgcacggaagatgtcgatgggttcaaattcgaagcctcttgcatacatctcctgcacgatacgcatatcacccatagcatctttttccttattagaaagagtatcctgtcgttttttgtactctgtcatcacgctctccaagtgcctctgcccctgacacatgatctcataggaaaatgccttggcgcggatactgaaaaacgcaccgtaataagctaacggataatggatcttgcaataagcgatacgccatgccatcataacgtacgccgccgcatgtgccttcgggaacatatactcgatcttctggcaggattcgatataccactggggtacgtcatgcgccagcatatccgctttccactcttcccacatggcacattttcccttcgccaccatacccttacgtactgcctccatgatcttgaaggacttctccgactccacgcccatctggatcagatacagcatgatatcgtcacgggtacagatcgccgtggaaatagtcgccacgccgctcatgatcagatcctgcgcattgcccagccatacgttggtaccgtgggacagaccggagatacgcaccagatcggaaaacgccttgggtttcgcatcaataaccatctgcatagcgaagtctgtaccgaactccggaatgcctaatgctcctaactttgttccaccgatctgttccggggtgatgcctaacgcgtccgtgttctggaacagactcataacatcctgtccatctagcgggatcgtcaagggatctctccccgtcagatcctgcagcatacggatcatggtaggatcatcgtgtcccagaatatccagcttcaacaggttatggtcgatggaatggtagtcaaaatgtgtggttatggtatccgtggtcatatcattcgccggatgctgtaccggggtgaaggagttaatatcctgccccagaggcaatacaacgataccgccgggatgctgaccggtacttcgccgcactccggtacatccggaagcgatacggtcgatctcgctggtccgcttatgaatgccacgttcttcaaaataattcttcacataaccgaaagcggtcttgtccgccagggttgcaatggttccggcacggaaagtctgtcctgcgccgaagataacctccgtgtatttatgcgccttggactggtactcaccggagaagttcaggtcgatatccggctccttatctcccttgaatcccaggaacgtctcgaaaggaatatcaaagccatccttatgaagcttctctccacacaccgggcagaccttgtccggcatatcgattcccgctttaccggcgtaggctttgacctcttcactgtcgaaatccacataatgacacttgctgcaataataatggggacttaagggattgacctccgtgattcccgccatagtcgccacaaaggagcttcctacggatccacgggaacctaccaggtatccatcctccactgacttccataccagcttctgcgcaatgatgtacattacggcaaatccgtttttgataatggagttcaattccttctccagtcttgcctctacgatctgtggcagatccggtccatagatctcatgggccctgttatagcagatctccgtcagtgtcttatcactgtctgggatgaccgggggacatttatccgggcgcaccggcgcaatggtctcgatcatatccgcgatcatattcgtattggtaatgacgatctcttccgccttgtcactgcccagataggagaactcttccagcatttcttctgtggtatgtaaaaaaagcggtgcctgttcatccgcatcatcaaatcctcggcccgccataataatacgacggtatacttcatcctcgggatccagaaaatgtacatcacaggtagccactacgggcttgtggaactgttctcccagctccacgatcctgcggttgatattctggatatcctctatggaattgaccgtccggattttctccgaagcgatcatgaacttattgttgccacagggctgaatctccaggtaatcatagaattttaccagcctggcgatctgcgcatccgactgcccatcaagcaatgcccggtacagctcccccgcttcgcaggcacttcccaggatcagaccctctctgtatttcaggatcaggctcttgggaatccggggatgcttgttaaaataggtcagatgtgactgggacaccaaccggtagaggttgatgcgccccagatcattttttgctaaaataatggcatggtaggagggcatttttttcacagtatccacactggatgcccccagtgcattgacttccgtcagattatggatatcctgctcctccagcattttaataaatttcacaaaaatatgtgccgtacactccgcatcatccacggcccggtgatgattctccagggatatccccaaagtcttcgccaccgcatccagggtatgctttgactgattcttcaacagtactctggagatgcccacggtatccacataggtaaactcctgcggatatcccagtcttctgcagttctccataatgaagctcatatcgaagccggcattgtgtgccaccatgatacagccctcacaaaactgcaaaaattgcggcagaatcacatcgatctgcggagagtccatgacatcctcatcccggatacttgtcagcttctcaatctcaaaaggaatgggcacatccggattcacaaaggtggaaaaacgatccacgatctcaccgccggacacctttaccgcaccgatctcaatgatccggttattcacgggggagaatcctgtggtctcgatatcgaacaccacataatcctcgtgcagactctgtcccttatcattggtcacgatctccttcagatcatccaccaggtatgcctctactccatagataattttgaaaaagtcctgcttgtccggattctcgtctccggcttcttttcgtttgcccttttccgctttccacagatcgtcccagacatgattggcatcggtaaaactctgtaccacgccgtgatctgtgatggcgatggcacgatgtccccatttataggcacgttttacaatatcttttgcctctgagacaccatccatatcactcattttggtatggcagtgcagctccacacgttttcgggcggaagtatccattcttgtattggtaaaatcagggatcttcttgatccccgcgatggagccgattgccagttcatggtcaaacttatccatcatacagattccctttacctttaaaaaggctcccggcttaatatccccggtcacttccttcacctgttccgtacgcacgaacattttgatagtcatggtatcggtaaaatcggacatattgaagataatgatggtcttttcattcttaatatccctggtatccacagacagtacttttccgcggatagtcacttcacccatatcaccgatcagttcctcgatcttcattgcctcatcttcaaagtcacggccgtagatcacatccggattgtcggatcgcttcagggcacccttttcaaaactgccgcccttacgaaactctccttttttgaattctccgcgcttgaactcgccacggccgccaccctggaaactcttggtcacgccacctgccggttcgctttttgccttgccggaatcgtctgcctttttcgcctccgggctctgtgtattttcctgctctgtgtcctgcgcaggcgctgtgctgtccacagcctcttccttcctgcctctggtgcggctgtagatggcatctaccttcatgcggatcttagcttcctcttcctccttgaatcttccggtctctttttccacataggctgcatggagcttcacagagaatccacagcgttccaccagtatcttctcaaggatctgtaatatctctccttccatactgcggttcagcaccgtatcctccatcgttatcagcatttcattgtccgcaggatactcgattttggccgttttcagagcattatactgaatatggctgtattcccgaaattcctccagaatactttctttatagatatccatcagcttttccggattgtattgggaagaaagttcaaatttttcgtatatttttaccgtcaggttggcatccggaaacaactgctttttaatctcctgttccgcggtccagatatctgctttctgaatcagacgggtacttattaaatacacccgaagaaagtctctgcgctttgtcgccgagactctctctacttctgtctgacccatcaggtcatgaatatccgtattcaactgtaaattcggaaatacttcaaaaaaaggtttactcatttattttaactccaatgatccaattcctcttttaaggcggggagcagctgatcctccggaagcttttttataatctcaccgtgtttgatcaacagtccttctccgatgccgcccgctactcccagatccgcttcttttgcttctccgggaccgtttaccacgcagcccatgactgccaccttaatatccagcggataatcttccaccagcttttccaccctggtcgccaggtcgatcagattgatctgggttctgccacaggtagggcaggatacgacttcgattccgccctttctgagtcccagggtacgcaggatcagcttcgcggacttgatctcctccacagggtctccggtcagggatacacggatcgtgtccccgatgccctggcttaagatcagggacagaccaatggcagatttaatattgccgctgttgactgtaccggactcggtaatgcccacatgcagcggatatacagtcttccctgccagcagttcatgggctttcacgcacattaatacatccgaagacttgatactgatgaccagattgtcatatcctaagtcttcgatcatgtgcaccttatccagtgcgctctccacaatgccctcagctgtcacaccaccgtatttctctattaacggcttctccagggagccgctgttgacaccgacacgtatggggatattccgctccttcgccgcatccaccacagccttcacccgctccgtacttccgatatttccggggttgattcgtatcttgtccgcaccgttctcgatggcagccagcgccatacggtagtcaaaatgaatatccgctaccagaggaatatgaatctgcttcttgatctcacggatggctgctgccgcctctaatgtaggtaccgtacaacggatgatctcgcagcctgccttttccagtcgcaggatctgttccaccgtagctttcacatcttccgtcttcgtattggtcatggactggatggcgataggattgccgccgccgatcttacggtctccgatctgtatgacttttgtatgcattctgtaagtatctttatcgttcatagggttaccctgcctttcttgcgtctgtattcttaactatacccccgatctaaaacccttgtcaattcgcagaagtaccaaaataccccggggtattctgctttacatatcccatcagttccaattccatcagtctccggtgcaacgtgacaatatctatatattctcctttcttccatgcctcctgcaaaataatctccgtcgatttcggcacacaatccaacaatttgtacacctgacacaaaggctcctccagcttttctatccgtttccggctctttcgtctgcctcttattttctgcgccggatccggcgatgaaagctcctgcttttcttcccagttcctcaaaaattcctccgtaaagctctccggtgacaggaacacccccgccccctgtgtcagcaggcggttacagccgtcactgagtctgtccgtgattctgccgggaaccacataaacatccttcccctgctccagcgccatatccacggtaattaacgtcccacttttctgtctggcttctatgacgatcaacgcatccgccaacccgctgacgatacggttcctcgggggaaaatatgccggcagtgcctttgtccccggcgcataagtggacaacagaccccctttttgtatcagttcctcgtacaatttcctgttctgtctgggataacagatatccactccgcatcccagcactccataggatgtccctcctgccaaaagcgctgcctgctggctgatcccatcgattccccttgccattccgctgatgacctgtattccctgactaccgaggtatctgcccagttcttccgccacaaaacgtccgtattccgaacactctctggctccgatgactgccaccgacggctgtttctgttccggtaattttcctttataaaacaagccgtagggtgggtccggtatttccagcagtttctgtggaaatccctcttcctcctgtaataccagtccgatctgtttttctcctaagctgtgatattcttcttcaagattaccgctttttttctgtctgtccatatactccacaacagaatcactcaatatctccctccagccggcggtaccggcttcatagactccctgcgggtccccgaatctgcttagcagctgaccggctcttaccccgccgatcatgggaatactgcatataaaataagcatacattctctccgtctctgtcatctccggctctcccttctatccccagtactctccggaggggcgatagcaggctgcctccagaagatgttcttttgcaatgttttcctgttcctccagatctgcaatcgttctggcggtcttcaaaatccgatgatatgccctggcgctcagttccaacgtatggtacagctgttccatgacatttttctccgtttctcccagactacaataatgatccacatctgccgatgatacatccccattgaagcgatactctgttcccgcatacctcttctcctgcatttttctggctctttcgattctctcccgcatctgttcactgctttctcctgtgatttttgtctgtaaatgcaaaatatccaccggttgcagttccacgcacagatcaatacggtccaatagcggtcccgatacttttccgagatatttttctatctgcggctgtgtgcaacggcatttgttccgatctggataatatccgcagggacaggggttcatggcagccaccagcataaaatccgacggaaaagttaccactcccgacgccctggcaatctgtaccctgcgttcttccaacggttgccgcatactgtccagcaccgtccgctgaaattcaggaagctcgtccaaaaataacacgccccgatgtgccagagataccattccgggtctgggataggcatttccgccgccgatcagtgccgctgcagtgactgtatggtgaggtgcgtaaaaaggtctctccgtgatcagcgcctgttccggagtaagtaaccccgccacactgtaaatactggttacctccagactctcctccagtgtaagggacggtaatatccccggaattctcccggcaatcatggattttcccacccccggcggtcccatcatcagcaggttatggaatcccgctgccgcgatcattgcacctctcctggcactctcctgccccgacacctctttaaagtctcctcttctgtctgctttctttttctgtaacagttcttctgcccggatcctgggtttgtatattttttcattttccgcatccggatgcagcagagccataataagctctcccagttccccgacaccccataccgtaatccccgggatcaccgctgcctccaatgcgttttcccggggaacgatcactctgccgattcccttgtctgctgcttcccgaacaataggcagcactcctttgactcttttgatctcaccgttcagtcccagttctcccaaaaacagcgtatcccgtaccgcctcctccgtgagaagctccatatcttttatcaagcctacagcaataggcagatcaaatgccgttccgtccttacgcctgcctgccggtgcaagattcactgttatatggcagggcggaatctgaaaccccgaatttttcatggcgacacacactctctcccgggattctctcacctcactccccaaagaacccaccatctgaaaagagggcaatccccaagccagatccacctccacgcggaccagatacgcttgcaatccgcagactgcaccggaatcaattgtcgaaaacataaactacctccttgtatataaattttgtgataaatattgggtaaccaacgaaatgcagaaactctgcgaaatgcccgatgggcaataaaagaattttgtattagaaattttccttggaaattagcttttcgaaatttgatttccgcaacgattcagagcctgttctcattcctatgaagcgggactctgaatcgttaacggtgattatcattttatgatcctcaggatcagatcttattttccatgctgtccggatcctgtgcgaactggatggcctgctctctatcaatcttgccttcaaaatacaattggacaattgcctcgtccatggtgatcatccccagcttgcggttggtctgcatgacacttgccagctgatgggactttccctcacggatcagattgcgtactgcatggttcgcatgcatgacctcaaacgccgctacacgatgttttccgtctgccgtaggtatcagctgctgggaaataacggcttccagtgtattggacagctgtacccggatctgttgctgctggtgcggcgggaatacatcaatgacacggtctaccgtgctggctgcaccgatggtatgcaatgttgacaataccagatgtcccgtctccgccgcggtgatcgctacactgatcgtctcaaaatcacgcatttctcccacgaggataacatccggatcttcacggagagctgcccttaaggcattggcataattgttggaatcaataccgatctcacgctgattgaccatggacattttatgctggtgcaggtactctatggggtcctccagggtaatcacgtgagcatccctgttattattgatcttatctataatggcagcaagtgtggtggatttaccgcttccggtagggccggtgaccaacaccagtccacgtttgcgctgatacagatcaatcaccgattccggtactcccagttcttccggtgaaggtaccttggttcccaccagacggaatgccagggcaacagatcccctctgtttatacgcattgacacgataacgtccacagttcggaatagagaacgacatatcatattctccccgttcctcaaaacgctccctctgcacttctgtcatgatgttgaccagcacctccagggtatccgcaggcagcattttgggataatccatcgtgatcagattaccgttcacccgcattttgggaggaatacctaccgtaagatgcacatcacttgctccggcttctttggcagctctgagtatttcttcgattgtcggcatattttttcctcatttcttatttcttcagtatatatctgttatccattgtcttcatgacatcaacgatctgtatatcctcattctgtggcaaagcaagattcaaaatactgttgtcacggaagcttaccactgtgggacgcagcacattctcttcattttcactcaaaacaagcgccttttctccggtactgagttctacgcttgccccgggcggcagaatattaatggatcttaataatgcctgcaccgtctccgggtcgtacacttccggatgttccagcagttcctgggctgccttcacttctgactgggccgttccctgcagtgtcatcgcggtaatctcatcatagcggttcgccaccagcaatacattggatccctccagcattttatatctgctttcttttccttcttccgggaagagatccagctgctttcccgccgcctgctggcagatccggcgtatagcgggtccctccgtcgcaaatgcatcttcgatcacgctgtaagcctcttcctgggtctcacaatttctaatcgcgtcttctctggaataaggagctccgaaatatacatcctcatgttttttcagttttcccatatcatgaagaagggccgcacatacggtatgatactgttcctctcttcgaatattcattacatgggtaatcatggcacagagtattgccacattcagggaatgtctggaaacataatcttccaggcttctcagattctgataaaaattaatcttctcatccaaatgtccgtagttgcggataaccatatccgcaatcgtctggatcctgctctgttttctggtcttcagaatgcgatccagctcttcttcgatcgcactgaccgccttgatctggaaccgctcaaattccagatcctcctgcgtcatgggaggtagcggttccgcaggctctaaaacatagacaccgatcaggccgaaattgcgtatgctctctattgcctgtaccgacaaaagagaattcctgtcaaacaaaagaatacttttcttattatatataggtctggcaagacgcattcccgtctttaattcttccgttttcacaaaatgcatccccgatattccccctcttatccaaacgtacttacaaaaataaatatatcacagtgtctaataattgacaagattgtgtttagtcttcccgaagcttagatgcaagcttatgcagcgctcgtttttccatacgggacacatagcttctggagattccaagaatatccccgacctcctgctgcgtatgttctttctgcccccgcaggccgtaacgcattacaagaatccggtattctctgtctgacaggcagtgatcaagggccgaaaacaggcgtctgatatttcttccgagctccatatcctccacgatatccttctgtttctcttcgatcacatccaggaggtgaatagcattgccttccttatcctgaccgatcggttcatatagagatacttccctggacagctttttacggcttcgcagcatcatcagaagttcattatcgatacaacgacaggcatacgtagccagcctgccttttccggaatcgaaagaattcactgctttgatcagtccgatacatccgatggagatcaggtcctccatatcctcttccacattctggtattttttggcgatatgcgccaccaggcgtaaattcctctccaccagaatttctttcgcctgtatggcttcttccacggtaccttccctgagtaaacggatataataagcttcttctcctgcggttaagggttgctgaaaggtcttcaaaaagcacctccgtggacagttgcttatgttattttatgtgttgttctgtccacaagtgcctgtcagtcctcacagacctcagaataaaaactgtgccatcacataattgcttacatccagtcccttttccgtaagtgccagaaatctctcccctgactcctctgtgtattcccggagtaagccgtctgcaatattctgcgtgatcaccggtccatatacctcgggaagacttctgccatactgtttttcaaactgttcataggagattccccggatcagacgcagtcccaaaaacatggtctcctccatctgctcctgctccgtaagcacctgttcttcttcccggcaatcctgcggattctccaaatatgtgataagatcccgtccattctggaatctcacattatcaaccagcgatgccgcgccaatgccgaagcccagataatccctgcggatccagtaaccgacattatgaaggcactcatacccatccctggcataattggatatctcataacgatgaaatccatattttgccagtatctccctggtctcctcatacattgcccgctccgtatcttcctccggcagctgtaattctccccgctccgccatcctcgcaaaaggggttccctcctccacgatcagactatatgccgaaacatgctgtggcataggccggagtgccaatagtttccccagggtatcccgtagactttcaagcgtctgtcccggcaatccgctcataacatccacattgatattcgtatatcctgcctgcaccgctgcttcatatgcttcaagaaatccggcaaaatcatggatcctgccgagttcacgtagttcttcatcctgtgcggactgcattccgatgctcaggcgattgatccctgccttacgaaaggtacgtaacttttcctctgacacggttcccggatttacttccgtcgtgatctctgccgccgggtccagtgaaaaatgccgtctgatacacgccatcagcttccccatctgctctccggtaagccgcgacggcgttcctccaccaataaacactgacaccactctgcgatcccgatatttaccggacttcccttcgatttcggcaaaaagtgcagccatataggactctaccgtctgctccgtagcaggagcagacaggaagtcacaatagctgcactttttcatgcaaaagggaatatgaatatatatttccagttccttctgattcatattactccttcaaaaaattatggttaattcttgtcatccagtttcaaaacgctcataaatgctttctgcgggatctctacgttaccgaactgccgcatacgctttttaccctctttctgcttctccagcagctttttcttacgggtaatatcaccgccgtagcattttgccagcacatccttacgcatagcctttacggtctctctggcgatcaccttgccgccgatagctgcctgaatgggaatctcgaagaggtgtctcggaatctcatcctttaatttctcacacatcttacggcctctctcataggcggagtccgcacagacaatgaaggacagtgcatccacttcctcgcggttgatcagaatgtccagcttcaccagattggatctctcataacccttcagatcataatcaaaagaagcataaccgcgggagcgggatttcagtgcatcaaagaaatcgtaaataatctcgttcaaaggcaattcgtattttaacaatgctctggtgccttcgatatattccatgccaagatacttgccgcgacgctcctggcacaattccataatagatccgataaattcagaggttaccataatctccgcatttaccacaggctcctccatgtattcgatctcggaaggatccggcagattggacggattggtcagttcgatcacttccccattggtcttgtgtaccttatagactactccgggagcagtggtcaccagatcaagattatactctcgttccagacgctcctgaataatctccaaatgcaacagtcccaggaatccgcagcggaaaccaaatcccaatgccacggaggtctccggttcataaaacagggacgcatcgtttaactgtaatttttccagggcatctctcagatctgggtatttggagccgtctgcgggatacagaccgcaatacaccatggactggacttttttataaccgggcaggggcactgcacagggattgttatcgtctgtcacggtatcacccactgcggtgtcttttacatttttaatggaagcggtaatataacctaccattcccgcggaaagctcttcgcagggaataaactgaccggcgccgaagtatccgacctccactacttcctccctggctccggtagccatcatgcggatgacagtgccctttttcacggtaccttccatgacacggcagaatataatgacacccttgtaggaatcatacacggaatcaaagatcagcgcctgtagaggattcgtcggatcgccctttggtgcgggaattttcttcacgatctgctctaacacttcctcaatgccgataccgttttttgcggatatcagcggtgcatcctgtgcctcgatgccgataacatcctcgatctcctcaatcactctctggggatccgcactgggcaggtcgatcttattgatgaccgggaagacatccaggtcatgatccagtgccagatagacattcgccagtgtctgtgcctcaatgccctgtgccgcatccaccaccaggatcgcgccgtcgcaggccgccagagaacggctgacttcgtagttaaagtccacatgtcccggagtatcgatcaagttaaagatatactcttctccgtcctgcgcctgatataccgtgcgtactgcctgtgccttgatggtgatgccacgctctctctccagatccatattatccagaacctgtgcctgcatttctctgctggtcagcagaccggtcttctcaataatgcggtctgccaaagtggattttccatgatctatatgtgccacaatacaaaaattgcggatcttgctctgatctatcgctgtcatactactctccattcctgacatattcttgcatctaacgattgtagcataaaatccgcattcttgtctatgtttttgcttcgattcgtaaatcagatcattcccctccaaggaccatatccaaaatatgtgccagcggatcacaggcattgatggcttcctcatatgtattattctgcgctcccagttccaccagaagcgtcctgggacacagatgcatattgtatctgtatcccttcaaatagattctgcgggtcagacccgggtaatactccgctgccttcagttgcatctgaaaagaaaatgccagatttgcctcctgattctcattccggagataatcgatatctcctgtcttgcgcgtgcggctgagtccgttaaagaacataaatttagcggtgggtctgccctgcagttccgtcaccagtctggtgtcctgtgctacttcatctcggtgcagatctatcaccacctgaatggacggattctttgcaagtagctgttccacttccggaagcgccctggaataagcattgtctctggtttccacatcatactgtccggtatgatgaagtacccggtagccgtattgttccgtaagcacctgtgtcagatattctcccactcccacgatgcctgtgttcacatctcccggcacagaatctgcaaatgcctcctgggaatgggtgtgatagatcaggatctgtggaccttctccctcctgtttcgccatggtcatatcgatttccataaacttatccacggatagttgatcgcttcctatcatggtattggcatctattgcataaaaatttcctaccaacgattcgtagtcctttaactgtgcaaggtcaatctgcatctgtctgccagccggaacaaattctccgccggctgttgcggaagtactctccgccggttccgccacctcctgtgtttcctttccaccggattgcggaagaattccatctgctcccaacaattcttccgttgtcaatgtatgccacgtagactcatcctccggcggctgtgtccgcgtttcccgaatatctccgtatcccagcaggggcaccagtccctgtaccgactgttccaacaatattcccgtgctgtcttcagaggctgcaaccgcctgaaaatacccaacgatcggataagcatccgttccgtttccggccgtcagcaaaatgccgcttccgaccataaggagcaacgccgtccgatgcatgttcctttgactcatttttaccgccgccactccccttcccatacgttctcccctatatatatgccggcacgttttctttgattcgttataccacaaatgatttttccatggctatattgattccttcggacacagtatagctgaccctcttcactacagaatcaatatcttttcccgtcatatacatattgttcagttccgcaaatgccattctatgctgtcccatatatttcaccgcatcaaattccttctcgccactcatcagtttttccagggcatcccctacaatggtagctgcatccactaccgtaggaattcctatagctatcaccggcactcccagtgtttcctgtgtcagtgcattacgatgatttcccacaccggagcccggctggatcccggtattggtaatctggatcgttcggttcagtcttctggtactgcgggcagccagcgcatccacaacgatcagtacatccggtccggtctcttttacaactccgcttatgatttccgctgtctccatgccggtcttggccatgactcccggctcaatgctgctgacaagattcatccgggtgcagttatatgctgccttaccataatttttcactacatgtctggtgatcaggaggttatctaccacctgaggccccagtgcatccgcagtcacttctctgttgcccaggcccaccaccagtaccgactgttcttcctgttcctgcggcatcattttcagaagttcttccgccagtgcttctgaaatctcccgatgataatcatcatccggctccaccatcgccggagcctccatcgtcacatagactcccatgggttttcccagcattttctctgcatttttcgtatcgatcgtaaccttagtgatacgaagatccgcctcttcctcgtagtgttcttccaccgacacaccccgtaatttactttcttcctcgttgacgctttctcttgcctccagggcaaggtccgttctgatctgaaaattatccattttacactctctgcctgcctttcttggcaatatattttttacaaaaaaacgcaaaatatgtattgacaaaaggcggcagattgtctaaactacaatagtatgtttacgttagtcttccgtgtctggctaaagtgaaacatttcttgtaaattataattttattgtatacattatggaggtgtacgacttggctaacattaaatctgcaaaaaagagaattttagtatcccgcacaagagctgacagaaacaaagctatccgttccggcgttaagaccgctatcaagaaggtatacgccgcagttgagtccggcgacaaggaagctgcaaaggctgaactgaccgctgctaccaagaccatcgagatggctgcttctaagggcgtttaccacaagaacaacgtggcaagaaagatttcccgtctgagcaaagctgttaacggaatggcttaatttttcttgaactgatacagaatttaaggcatacaaaaagcacctataccgtcatgtaggtgcttttattgtgcaatttaatatgtgcgggcgataagcccgcacatatttcttatcttctgtgtccaccaccgccatggctgacaccgctgctgcttctgtggcttccgccatgacctccgctgtggtggctgcttccgccgctgctactgctggtctcgattcttctggtaaccacattcttacgcagatactgatctctggtatcgttgatctttggctttttaccgtcgacatactggttcgttgcggtagtatccttcgctttgttctgatgcagattcaccgctgcatagatcagagcgaccacaagtcctagcaggatccagggagcaaatgtcataggcatgctttcctggctctcctccatggtccgggtcacataactgatacaattcttatatgctctgtaggggctttcgtctatgtagtcatccactgcatacaatgcctggtcgatctcataatcaccaaaataatcatagacatttccgcaggtggacagccagcttcccttctgtccctcataggaattatccagaagcagaacgccgttgccatgtaccttgttatagccgtaattattgtaatcatagaagttatctgccagatctctcatagcagtgctccagtcggtgctgccgacctccttcgcatgaaatgcctccggaagatccggatcctgcagatcatattctaccgattcggagattgttacgatgacgatatctgcctgaatcttctcctcacactccgcaatatattcccgcagactctgctcctcttcctccgtcaacatatccgcatagtcatatacacgctctgtgggctcctgactgttgccccgtacaggcttaggcgtaagtgcatgaacaactgccgctccgatagtgatcactgccaatattccggcaatgataaaccatattttaaaatatttgaagtactgtctcagtgcttctctcttaatatctttttccattgtcccgttatccttccctcataatctctacagcagactggcaatcgcatttaccatgcataaaattgccgccagtgtcacaccaagtgttcctgcgtaagcccacacctttgctttggaaatcggtgcggtacctaccagtttaccggtctgtccgttcacatagaaaggatactctttccctttataggtataatcatacttccataccggcagaagtccataatttacctcactgcctgttacgctgatattttctcccagtttgcggacgctggaataaccggaatagctgtcatgcagcatcttctgcgcatcttcctgcatcttcgccttcgcccggctctccaccagatcggaggtcatattgtaacgctcactgtaaaatccggacaggtactccggtttgaactcctgaagttccttataatcaaaaggctccatcagatccatgacatcatccggcattccgatggatgcatccaccggaatattgtcaaaattaatatccatatcccggacaatatcataataagaagtctcggtatattgggtattaccggtagtccagctacgcaccttggtaccttctccgtggaatgtacaattggtatcataatcataaaaccagaatggtacataatcaccgtggataccattcagtctcacctcagacagaaaatctgtcggtgcaaaaatacattttttgaatttatcacggatcagctttttgcagccttccttacccatacggaacggtatcagcatatgcggtgtatagcttccggctatctgatcgtctacgatcacatagttgtcgcagtaggggcactgagttgcggaggtactcgctgtcattggtatttcaccaccacagtttggacataccttattcacctttttcagggcttccccttcggctgccgacagctttcctttcggttgatctgctcctgctgcctgggacgcttccgacgcaatactgttttcgtcaccgctcgtctcgatcacgccatcctggcgttcttcactgtcctcgctctcacagaaaggacagaacattttctttctctccgggctgtagaccacattaccgccacagtttttacacttaaagatcatcttacccctcgccttctgccttttacgacatttttcttaatggaacttcctatatcttaccatacattctgacgtatttccatatgctaaaattgcacttaatcttttcttatcgttcgctcccctgctatctcacgctttcatcagctccgcataatcttccggcagaaaacggtgatagatcacatgacacccttcgtcacgaaagcaatagcaataagggtcccccatcccttccgggaaacggatcataacatcaaaatcctcaccctgcatctcttccacataaatattctcggagtgacttaaaaataaccgtcgtatatcctcgagcttacaatcatgttcaccgatcagccggatcaattcatagataaatcctgtctccgcaaaatgctcatggacataagcactgccctcctccggaatacagagacagaagcgttctcctctgcgggtaacatcaaggtttccaagcttccgcgtcatactctccggctgtccggcaagtgtaatttccatctgttcggccgtatcctcagtatccagtaaatgattcaatgtagttaaaggataatacaggcggattttctctctgcgaaaccctaacttagcctgttcctcctggatcacatccataagatttttctctaatttatcaaaagtcatatgctatttccttataaaaatttgtccagttccgtctctacgatctgctttttcttcaccttcggggaacggagcactttcccctgcgacacaaccatatccacattacgaagtgcccttatgtcctccaaaggattcttctccaccacgatcatatccgcgcatttaccgggttccagtgtaccggtgatatctccgatgcctgccatttcggcgccccggcaggtagcggtgtacagtgcaaaagtattggagactcccacatacttgtggaagtagtataattctctccagaaatcatactgggtgatccaggggcatcccacatcattgcccagtaccacaggaatatcgttggcaatcgccgccttcgcacagtcaatgataccttcaaataccacattgccgttaaactgttccacttcggaagcattagtaatggaacgatcgaacagtgcataaggaagcgccggagacaatgtagtacacagaaatgcattgtgttccttaaaaagcgctatcatctcttcgtccgcttttgcaccgtgttcgatagagtctaccccattctgcagagcaacttttacacccttcggagactccacatgagccgctaccttatatcccatggcatgcgctttatcgcagactgcctttaccatttcgggagccatttttaattcaccgggcacccctttttctttcgcatccagtacgccgccggtgatcatgagttttaccagatccaccttctgtgctttggcaatttccaaatgttgcaaagcttcttcgatgctgcctgccgcgattgccacggagccggccatatgtccgccggggacagagatgccttcgttcgctgcgaggattctgggccctggctttttgcctgcggcaatgtcatcccgcagtctggtatcaaaatctcccaggcctcccacggtacggatcgtggtcacaccactgtacagctcgtctttggcaaagccacagaccatgtgataggcgatcgctttggtcagaccattgctcatgatcttttttaccaacgcttcattgtctctctgcttcttctgcggttttccgttacccgccagatgtacatgcatattgatcagtccgggcaggatatattttccctgcaggtcgatctcttcatacccggaagccttcaggtttcgtttcccggcttcttccgctggcagaatctctgtaatcctctcattttccaccagaatgacctgcccctcctgtacctgcatgtcttttgtaccgtttaagatttttccatttgtaaatacatatttcataaagcgttccctgcctttccatgtgtctcagacttccagatactgaaattataccgtattaatccccagccgcaaccacattcattttaatctatctgccgtaatctacgtaagaaaatggcataacccgccattcctgatgatagtttagtgatagaaaaaggtgatacttattagattatataacataacaaaagaggattccattgttggctttcaacaaagaatcctcttttttcaagggttttgagcccttattttttgtgcaattgttctattacttatagtttacgatttgtccgaagtcagccttcagggaagcgccacctaccagaccaccgtcgatgtcagcctgtgcaaacagttcgggagcgctggaagcagatacggatccgccgtactggatacggatagctgctgcggttgcatcatcatagatctcagcgatgcactcacgaattgccttacatacttcctgtgcctgctcggtagtagctactttgccggtaccgatcgcccagatgggctcgtatgcgatcacagcggttgctgcctgtgcggcagttacattcaggaatgcgatcttgatctgctgacggatgaagtcgatggtaacaccctgctctctctgcgtcaaagtctcaccacagcagatgatgggagtaatgccatgttcgaaagccttgaggactttcttgttcacggtctcatcagtctctgcaaagtactctcttctctcggagtgaccgatgatcacatacttcacacctgcatcatctaacattgcgggagaaatctcgccggtgaaagcacccttctcctcgaagtacatattctcggcaccaatcatgatattggaaccttttgctgcctccatagcgggaatgatgtcgattgcgggaacgcacagcagtacgtctacttcatcatttgctacgaggggctttaaagtattgatcagttctactgcctggctgggagtcatgttcatcttccagttgccggcaatgatcttctttcttgccataaccatacacctcttattttttatcgttcttatcatataccggagaatgcctgaggcattctcctcagaataacttagaaatactaaggcggcatacttttgacgccttagtatttctttattcttatttgtcgtctgctgcggcaacacacggcgttgccctcacaacagctgcttatttgtcgtctgctgcggcaacgccgggaagctctttgccttccaggaactccaaggaagctccgccaccggtagagatgtggctcatcttgtcagcgaaaccaagctggttaacagctgctgcggagtcaccaccaccgataatggtagttgcatcggtctcagccagagccttcgctacagcgatggtacctgctgccagggtaggattctcgaatacgcccataggtccgttccatacaacggtcttagcagtcttaacagcctcagcatacagagttgcagtcttgggtccgatatcacatccctctctgtctgcgggcatgttggtaacatcatatacctgaacctcaacaggagcatcgatcgggttagggaaatcagcgatggttacggaatcaacaggcagtaacagcttcttgcccagcttctcagccttttccatcatttccttacagtagtcgatcttggtatcatctaccagagacttaccgatttcatatccctttgcctttaagaaggtgtaagccataccaccaccgatgatcagggtatcacacttctctaacaggttggagataacgttcaacttgtctgcaacctttgcaccacccaggatagctacgaaaggtcttacgggatcttctacagccttacctaagaagttgatctccttctccatcaggtaacctactacgttctgaccacccttagcggtgatgaacttggtaacgcctgctacggaagcatgtgctctgtgagaagagccgaatgcatcacatacatacagatcagccaggtcagccagttctttgctgaatttctcaccgttcttggtctcttctgcgccacggaaacgggtattctgaagcagaacaacgtcgccttccttcatgttctcaacagccttggtagctgcttcgccggttacattgtagtcagctacgaaagtaacctctttgcccagcttctcggacagtctcttggcaacaggtgccagagattcgccttcgttggggccattctttaccttacccagatgagagcaaagaattaccttgccgccatcattgatcagcttcttgatggtaggcagagctgcaacgatacgggtatcgtcagtgatctcaccgttctttaagggaacgttaaagtcgcatcttaccaggactctctttccctttgcgttaatgtcatctacagatttcttatttaatcccatggtattaacctccaattattttagtatctaaaaagggcccggtccttgtaagaccggaccctgataggtctttacgcgttaacgcctgtcggcttatgctaactcgctgaagtacttgatggtacgaaccatctgagaggtgtagctgttctcgttatcataccaggatacaacctgtacctgagtattgccatcttccataggagcaaccatggtctgagttgcatcgaagatggaaccgtaggtgctacctacgatatcggaagatacgatctcatcggtgttgtaaccgaaggactcggtagaagcagccttcattgctgcgttgatctcttccttggttacagcgcccttaactactgctaccagaatggtggtagaaccggtaggggtcggaacacgctgagcggagccgatcagcttgccgttcagttcgggaattaccaggccgattgccttagctgcaccggtagagttgggaacgatgttgcaagcgcctgcacggcttcttctcagatcgccctttctctgaggtccgtcaaggatcatctggtcaccggtataagcgtgaacagtggtcatgataccgctcatgataggtctgcaatcgttcagagccttagccataggtgctaagcagttggtggtgcaggaagctgcggagataacggtatcttcgggcttcagggtcttgtggttaacattgtatacgatggtaggaaggtcgttacctgcgggagcagaaataacaactttacgggcaccggcagtgatatgtgcggaagccttctccttagaggtgtagaatccggtacactccagaactacatcaacctttaattcaccccaaggaagcttgcttgcgtcagcctctttgtagatggtgatggtcttgccgttaacggtgatgctgtcctcgccagcctcaacggtgcttgcatacttgtaaacaccctgagaagaatcatacttcaacagatgtgccagcatcttagggctggttaaatcgttgattgctactacttcatatccttctgcatcgaacatctgtctgaatgcaagacgaccaatacggccgaaaccattaattgctactcttactgccattttagtttcctcctaaaatattaattttatatcttttgacttactgtgattcacagattgtcaaaattttatcagcaaattcattttacctaattcctctttataattcaagatgtaaatgcaaaatatttgtgattttgtggtaaattttacagtttgtttagaaatggtatgatttttgctccgttttttgctatactgtaccctgtaaatgacttacaacagaatgataaccagaaaggataaaaaatatgtctatcaaagcagattgtcatcttcactcttctttttccggagattcaaaggctcccatgccggagatgatcgataaagggatctctctggggctggaaaccatgtgtttcaccgagcataacgattttgattatccacgcactgaggaaggtcccggcagcatctttttgctgaatacagattcttatttgtatgacatcctccgctgccgcgccaaatacgaagggaaaatgcgggttctcttcggtgtggaattaggcttgcagccgcatctggccgaccgagacgaagattttacttccgcctatgattttgatttcgtcattggctctacccacctgtgccggggaatggatccctattaccccgaatattttgagaagttttcctccgaggaggaagccatccgtgcttattttgcagagacgctggaaaatctgaaatgccatgacgattatgatgtcttagggcacttggattatatcgtccgtgtggcgccttccaaggacaaaaattactcctacgataaatataaggatgccatcgatccgattctggaactgttggttcacagtggcaagggcctggaattgaataccggaagcttccgctatggtctcagacagcctcatccctgtaccgatgttctccgccgctatcacgaactgggcggcgagatcattaccgttggcagtgatgcccacaaagcacaggatgtaggatcctatctggatctggcctccgagattctgcagctgtgcggtttcaaatattatacgatctatgaaaaacgcagcccggaataccacaagctgtaattttctttattccctatcctccaagctgaatgtgttccttcatcagctcgcgaagcaacgcatccgctgtccatgagacattatacggtgtcacaatcgccttcagggcaaccggtggtaagccggttgccttatattctgccaggaatgcatccacctgttgcgaatccattccggaaaacaccagcatttccattgcaaaatcaggaccgttatatatttttccattcttatgaaaaccgctgatttccgccagtgtgccgatcttctgtccatagtccctgcggttcaccgccgtcacatccacacctattttctccgctgccacacgcacagcccggtctttttgtgtactcacgccaaacaataatatttttgccattatatttcctcacagtccatcacccggaagccattcttttccagcaattgtgcaaatactccctgtccggggatgagtttaccggtaaagtttccatcataaatctgctttacgccgcagctggggcttcgtgactgtaagattgccagatcgatgccattctctttggcgatccgcagagcctcctctgcgccttcccgaaactgcctgtccacatttacgcctttacagtttatgacctcaccgctcacgatctccgacggatccctcggggtcggaagtcctcccagcacctcaggacataccgggatcacctcatgcccttccagatattttgccacacgctcgctgtaattatttttcccgttatatttacagttttcgtccagcagacaggcactgaccagtattttcatcgtaatctccagctttccgttattatgtctgttacaatagcggcgcgatcaggcgcatgatacactgccagcctctcactgccatatttttccttccatcccggtatttatcggtgacttcctcactatcctgtaacagcttatcaaaatccgcctcaatatcccggatggcatcacagccgtgcatccacacaccgttttcaaaatggtgataaaggctccggtaatccatattgatagtaccgacggtcgccgtatccccatcacacagcatctgcttcgcatgcaaaaagcccggggtatattcataaacccgcacaccctgacgcaccagtccggaataataggatctggtcacaccgtaaatgatttttttatccggaatacccggggtaaatacccgtacatccacgccacgttttgccgccagtcccagctctctcgtcatctcatcactgatgatcagataaggagttgccacatagaggcgtttcttcgccgtcttgatcaggttcaggtagacattctcacccaccggctctccgtccagtggagaatccgcatagggctgtacatagccggatgccttctgcacatttccatcttccgcaccttcctgcgatgccttcagatacttttcataatcggtatccgcctgtcccataacattccacatttccaaaaacatcatggtaaaattctgtaccgctctgccggtcagcttcacaccggtatccttccagtagccgtaaggatgcgtgatattaaaatactcatctgccagattatatccaccggtgaaccctacttttccgtcgatgaccatgatcttacgatggtcgcggttattcatgaaaatatttaaaaagggcactacatagttaaatacccggcactgtacaccgatggcattcatgcggtctataaagcttttatccaaaaagccgatacagcccacatcgtcgtacagaatacggacttccacgccctcggcagccttttttgccaatacatccttcagccgtgcaaaagcctccgcctcctctatggcatgatattccaggaatataaagtgccttgccttctccagctccttaagctgttcctcgtatcccagataagcttccggatagaatttcacagctgtcgtgtcatacaccggataattaccatacttccagatataatggcattgatttgccagcagaggatcttcctgctccagctgctgcaatattgtctcatcctgaacattcagaggaatcagttgtgcatccacatcctcaaatttccggatgattttatgcatagcctctttatgtccgaacaatccgtaaatacacagaccgaacacaggaaatgccaatattacaatgatccagggcatcttaaatgcggcattggtatgtttcccataaattctgagcgccactaccagcgcaaacaggctggtcagcagagagatcactgaagaatactgatacagtttgatcatcaatatcaatatccagccgatctgtaagagcacagccaatgctgcaaacgcgattcttcctatactgtttttcacattcccttttacttcagaacgcatctgctttttcttacccataatatcctcttttctctttcgttctgccagatcataagtaatctccccctcacaggctgcctgcactatgcgcaggcagctatgaatatgttctatggggattgttttatggtataacatttttgcaaaaatctcaataggtctatggactacaactgtcctcttttgtctgcctaaccacagtttctgtcacacagtaccaccactgtagacggcgtggtctgggcaggaatgcttctcgtggaagaggaatagatgaccaccagattatggttcgcgggactcgcctggaaatactggttgttcacggtacgcacatccactgtgccatccagattcagctgcaatgtctgctcctcattgaccagggaattgctgtagtagctcacatccacattccggtcgcttctctcttcagccactaccactgccgtatactgaggcggatagatcaggggcatgggcgcatcattgcgataccagaaggttgccatcattcccactgacaacgtagtaaaatccaccacataggtatcggggttgataaaaaagttcacggtattgccatccgtatcctcgatagcggcaaataacaggcatccatcagctctgcgaccgccctgccctgccggcaccagatccacgatcgttcccttcatggaacagaagctgtttctcctcataggtctctgaaacgaaaatcgataatccatagtctctcctgtgaattataaaagctttcttctattatatgcacgcccccgctgttgatgttacgtgtcgtgataaaaatataggaccactattgtaaaatagtgatccctgttttcctacaggacaatggtcccgccgcccagtacatgttcgccctgatagaacaccatagcctgtcccggtgtagcggcacgcaccggtacatcaaaagcacaaagcactctgccgtccggctgtctggtaagggttccgtactctcccttatggttgtaacggatcttcgccagtactctgatgggttctgtgatattctccactgccatataattcacattttcacataatactttatccgtgaaaagttcctgattggaaccgatcaccacctcattggtctcggggcggatggctgtaacaaacaccctctctcccatggggagttccaatcctctgcgctgccccagggtataatgagtaatccccttatgatgccccagtatcctaccgtcctccgtgacaaaattgcccggtcccggcactttttcgccggcttctctgtcaataaaagaagcataatcattgtccggcacgaaacagatctcctgactgtccggcttatgcgccaccggaagtcccgcctcctctgccagggcacggatctcatccttggtgtattctcccaccggcatcagagtatgtgaaagctgatcctgggtcagattatacagcgcataggtctggtccttcgccgccgtaacggaattgcggatggcgaaacggccgtttggcagtctgtcgatcctcgcataatgtcccgtggcaatataatccgcgccgatctctaagctcctctgtaacagggattcccatttcacgtaacggttgcaggcgatgcagggattcggtgtatgccctcttaaatactcgtccacaaaataatccatgacatgacacttgaactcttttttaaagttcatgacataataaggaatctccagtctctctgccactcttctggcgtcatccaccgcagacaatccgcagcatccgccattggcttccttcaccgcttcctcctcgtcctgccagatctgcatggtaaccccgatcacatcatagccctgtttttttaataacatggctgccacggaggaatccacgcctccggacatgccaaccactacttttttcttcatagatcttaatagtcttcctcttcttcgccctcactgatatcgttcttgggcttctgcaggccttcaatggtgatgtggttcttctccgcataatcccacagagctgcatggatggcttcctctgccaaaagtgagcagtgtacctttacgggaggcagtccgtccagagcctccattaccgccttgttcgttacctgcaaagcttcctggatggtcttgccctttaccagttcggtagccatggagctggtagctacggcagcaccgcaaccgaaagtcttgaactttgcctctctgatgatcccgttctcgtcaatgtccaggaacattctcataatatctccgcacttggcgttacccacagtacctacgccgctggcatcctcgatctccccgacatttctggggttttgaaagtgatccattactttttcactgtacatgtatctgttatcctcttctttcttgcttagttgttcttctgacttttcagaaaatcttcatataaaggagacatatcccgcagtctctggacgattttcttcacttcttccgctacgatatccatctcttccttcgtgctatcctcagacaaggtcagacgtaaggaaccgtgggcttcctcatgctttaaaccaatggctaacagcacatgggaaggatctaaggatccggaagtacatgcagatccgctggaagcacagattcccttcatatccagcatgatcagcatggattctccctcgataaacaggaaggagaaattgatattattcggaagtctcttcgtgcggtgaccgttcagccagcaatgagggatctcgttctccagacgtccgatcagataatcacgcagttcgatctccctctgggtcttactgtccataatacgcatagcacgctctacggctgcccccagtcccacgatgccggggatgttctctgtaccggctctgcggcttctctcctgcgctccgccgtgtacaaaagaacggatctttacgcctttacggatatataaaaagccgattcccttggggccgtttaatttatgaccgctggcactgagcatgtcaatatgcatctcatccacatgaatgggaacctgtgcatacgcctgtaccgcatcggtatgaaacaatacgccatgctccttcgcgatctctccgatctcggcgatgggctcgatggtaccaatctcgttgttggcaaacatcacgctgatcagaatggtatcgggacggatggctgctttcagctcgtccaagctgatcagtccgtctctgtccacattcagataggtgatctcaaagcctctcttctccagatactcacaggtatggagaatggcatggtgctcgatcttcgtggtaataatatgttttcccttagaagcataagcttctgcggtggcttttaatgcccagttgtcggactccgaaccaccggcggtaaaatagatctcttccggcttcgctcccaggctgtccgcgatggtctggcgggcatgatccatagcctttttgctctcggcgcccagactgtaaatggtgctggcattgccgtaatattcactgaaatacgggagcatcgcatctacgacctccggtgctgttttcgtagtcgctgcattatctaaatatatcatattgcctcatttctgcatatcttgtaactgatcatgcacattttactgctattcatgatagcattcactttactgttctgtcaacaaggtcatcggaatatacttttgcaagatcttttaagccaaaaaggtcaaaaaatccgcttatgaaacatgccaaacgtcatcccctgatcttcggtactatcattctgactgcaaccggtcttatcacccgtgtcattggatttttctaccgtatctatctgtccaggctcttcggtgaagagggaatgggcatctatcagctgctcagtccggcattatccctatctttttcccttacagccgccggatatcagaccgccatttcgaaatatgtggcggcggatagtgccaaacgtccttccgggaatttaaagccgctgctggccgggaccagtatcaccttacccctgtctcttgtaacaaatgccattttgtttttctctgcggatcctatcggtatttttctattaaaagatcaccgtaccgtacccatgctgcggatcctgtccttctctgtcccctttgccgcgctgcacgcctgcatcaacggttatttctatggaaaaaagaaagcttccgtgcctgctcttacacagcttttagagcagcttgcaagagtcagctgcgtctttctcgtcaccggagccgatctggcaaaaggtcgtactccctccatcaatgctgcggttctcggtctcaccgtaggcgagatcttttccatgctgatcgctctggtctgcctgtatatacatctgtatccggacagtagtattctttccctgcaaaatatctgtccttctgttccggtctatcgggatctgcttggtatggcactgcctctgaccgccaaccgtatcgttctgaacattttacaaagtatcgaagccgtctccattcctcggaagcttctgctctacggttatgataccaccacagccttaagtgtatacggagtccttaccggcatggccatgcccatgatcttttttcctaacgcccttaccagctccatggcagtgcttctcctgcccaccatctccgaaaatcatgccaaaggagaccgtggagccgtcataaacgccaccctgcgcaccgtaaagtattgcagtctcatgggtgcctgttgtctatgcggctttctgtttctgggtgactggatgggaacggaactgttccacagtgaactggccggtcattttatcgtgactttgggattcatctgtccttttctgtatctggataccactctctccagcattttgcagggtctcggtatggcagggcggatctttgcctccaacgtggtctgtcttctgatccggctcctgttcgtattttttgccattcccgtgatcggtatgcagggatatctgtgggggattctggtcagccagctggtacttgccggaatctattttttctgtctgtatcacttcttccgaaaaaattaaaaaatacctccggtgtcttgcttacgcctgacagacggaggtaactgttctgtaaataccgttttgcttcccacaaagtactggtactgctgtaagatctggtccttacgcatatcggagatcgccttctccacatccagggaatagatatcgctgtccctgccaatgtagccgaaatcgtcctgtttgtggaacgtaatggagatgtcctctaacggtgcgttggatttctgctcctgaaccggagcctcctccttcgccgcaccgggattcccggaatttatctgttccgaagatgctacatgggattcttgtcattcaggacactctttaattcatccataaaggtgttcacgtccttgaactcccgatatacagaagcaaatcttacataagctaccgcatccagatctttcagcttattcatcacaagttcaccgatggttccgctggggatctcacgttcttcccggttgaagatctcgttctccacctcgtccaccaacgtcgtgatctgttgtgcgctgaccggacgtttatggcaggctctgagtactccggcctcgatcttagaacggtcatacgcctctctgttattatcctttttaataatgatcagcggaatcgtttcgatcttctcgtaagtggtgaatcgcttgccgcattcatcacacacacggcgacggcgaatggaattgttatcttccgccggtctcgaatcgatcactctggtattttcatggctgcagaacggacatttcataggcatcctcctcttaaaaaccacgtgttatttatacggatattataagagaatcagcagttaatgtcaactaaaattatgtccggaccgatctgcctgatgtccttgtatgggataacgatattcggttcacagcgcaggaatcccagccactggtttcctccgggcaccatgatcttacagatgcatccgctgcactcatcgaattccagatcacagacatgccccagctttttacagtctctgacattgatcacatctttgcattttaattcggaaaaaagcatatgcgtactcctgctttcttactatatatataatatatgccttttctatccgtttgttcggcaaatactggaaattctaccggcaaagtatatcctcccacagtcctgtgaatactgttgttatcacaaaattcagtaatcgggaggtctctatggtacagggaaaagtggaaatctgcggcgtcaatacagcaaaactgcctttgttaaaggcggcagacaaggattctttatttgcgaagatccgtgaaggagataccgctgcccgagagacctatatcgaagggaatttacgtctggtcctaagtgtgatcaaacgtttttcaagcagtgcggagaacgtggatgatctgttccagatcggatgcatcggtctcatcaaagccatcgacaatttcgacgctactctgggtgtgaagttctctacctatgcggttcccatgatcatcggggagatccgcagattcttacgggataacaacagcattcgtgtatcacgctccctgaaggataccgcctataaggcaatctacgccaaagatacactgacgagaaaaaatctgaaggaacccaccgtggaagagatcgccgcggaggtgggtatctccaaggaagacatcgtctatgccttagatgccatgcagaaccccatgagtctctatgagccggtctacactgacggcggcgacaccctctatgtcatggaccagatcagtgataaaaaaaataaggaagagatgtgggtagaacatctctccctcagtgaagccatgaaacgtctgaacgacagagagcgtcatatcatctctctgcgatttttcgaaggaaagacccagaccgaggtcgccgacatgatcggaatctcccaggcgcaggtctcccgtctcgaaaaaaatgccctgaaagccatgcggggctatcttaccgcctgagatcaggtctgtggaatccctgtatcatatgatgcagcagccagaaaatcacatacccgatcacagcccccagcacattggtcaggatatcgtccacctgaaaatatcccctgccggtgatcagctggatcgtctccacaccgaagctggtcacgaatgccgcaaaggtattcctaaaaaaaccccgaagccacggaaatgcccagggacagataaatccatagggaataaacagcaatacattttccacgacatacgaatggttcctcgcattcgtcccccaggtagagaatagttccagatccatgccgatccggctgccatcctctctggagaaaaaagtgatcaccagaatgatcatcagatacagagaaaatgccatgagtcccgccatgggaaaagtatccttccccttacgctcccgtctggcattcagtccgttcaggagcagtcccacaacagcacccgccatgatcccatagggaagataggccagggtctcctttagatcctttatgatatattttaacatcatcttattatttccttacatttgataggtatcccaatgggaaggtgcttcctcccatatcttcttatcctcgaataagcggtcattcatccagccgacggcatccaccacgccatcctcgtcaaaagaaaaatatgctcttctctttttttcctccggggtcttaaaataattaaagggctccggccataccgtcaccataagctttttaccgccctcggggttctccggatcctgggtctgttccaggcggtagcgcatcccctgatggcatccggtgaattccgtctttttcaaatattccatcgataatatatcatcacgctgtatcatgtatcttcgtccttaaaatctgtcattcacaacccgaagaacagttcctctccgtaatctctatagtatcatgtatccgtcccgaatgcaaagtcaaatatgcaggctgatctcctttttcagctgccgcatgatctttttttccagcctcgaaatataggactgggagattccaagaaagcttgccacttccttctgtgtcatctcctgtccgtccggtgttcccagtccgaaccgcagccgtacaatggtcttctcccggttcgacagcttgcttacggcattcattaaaagcttgcgctccacttcgttctctatccctctgtatatcacatcctcatccgttcccaggatatccgacaggagaagttcattgccgtcccaatccacatttaaaggttcatcaatggacacttccatcttcgtcttattattccgccgcaggtacatcaatatctcattttcaatacaccgtgaggcataggtcgccagcttgatatttttctccggattgaaggtattgatggatttgatcagtccgatggtacctatagagatcagatcctccacgcccactcccgtattatcgaactttttggctatgtagacgaccagtctgagattatgttcaatcaatatggcctttgcttcatcctcatattccgttcccagatcactgatcacccggttctcctgatctgtgggaagcggcggtggcaggacctctgcgcctccgatgtaatgaatatctcctttccgctgccgcagaaacggttctctgcgaatcatcttgaattgcattttcccgggtattgctatctttaagatcatagttgctccttcctgcttttcctgtcttttttaacagcgccggatgcagcagcataggaatctctcttcctgcgatttcctcttcacttactgccagccacacatcgctgcatattttttccacaccatggatccggatcttcatctgcggaatccggtatccatagagaattccattctttttcccgacactgtggtaaggaatcactcgaaaatccggcagtccctccggccacaaagtctgaaatgtcaccacatccaatacagatacgggggctccgctcataggttccgtcaaagtattgccggaatccacaatcgccgcgatacacaatgtctgttccgtaccccggagtactacctcacaatgagttccaagctccgtttctcttcggtatctccacaatagcagctgcactgtcagagcccccagtcccagtgcaagcacaattcccggtacatactgtattccggccgggatccccctcagcacagccaccagaattcctccgagcaggaaggtatcatacatctgctttctaaaataactccatagtgaacgccaattccggattcggaatgttactgtaagcatcaacaatgttccgggcagcatacagagcagcagtttaagtagagccgctcccttccataaaaaagggagcagatagcagaccgctccgattcccgctccacacagcagccggtaccacgtggcagtgtggcaggtgctgtggtctaccatgatcagaagtaacagattcataccgagattcaggaggaacatactgtctaaatatagttcataatgcatcacacccctccttcagaattattataaggggtgcccccagcggattttgtcaaattttcatccgccggaacctttttcattcaatgattttcgacaacagtatcctccgtcttctccagtcccaaataaggcaaaatattttcatacagctgccttataataggtgctgccacctgtcctccataatagactccctggggattgttgataatggcgatggcaatcacctgtggatcatcggcaggcgcgaatccgataaaagaagaaatataacgtccgctgcctctgggcagcgtctgactggtcgccgtcttgccacccacccggaagccctgcacctgtccgtttctaccagagccctccgccaccactgtctccaggatataacgcatagttgcgctggtctcttccgatacgattcctgtctccacaggataagtaaaaacctgttccacttcgccatcccggttcagggcttccatgcccaagtgaggagtgatccggttgcctccgttaatgatggaggatgccgttgtcagcagctggatcgccgtgatctgaaaagactgcccgaaagccaccgtcgccagctccacatttcccatgtcttcttttttatgcatgatcgttgctgcttccccggggagatcgattccggttctttttttcagtccgaattgctcaaaatatttgtaataattgtctacaccgagacgcagtcctacggagatcagtgccggattgcaactattctgcatacactgcacaaatgtctgtgtgccatgtccgccgatcttatggcagcggatctttcggtcgtccacaatgatgaatcccggacaggaaaaggtactttccgtggtgaccaccctttcctccagtcccgccgcggctgtaatgatcttaaaggtagatcccggttcataagtatcattgatgcagccgttgcgccacatagcatttaatttttcctgcttctgctctcctgtcagattttccgtctcctccggcagtgcataaggatcattcagatcaaattccggataattgaccatggccaggatttctccgtttcgcggatccatggcgatgatgtagacgctgtccgcctctttggtggcgcaggcctgttccgccagctgcgtggcatactcctggatattacggtcgatgctgatccgcagatcccatcccggcaccggctctacccggcgttcccccgcggtgtctacctcgattcctttggcatccgtcacagtcagaatcataccggtttctccctgcagtgtttcctcatagatcacttccagtccaatgattccctgattgtcccccccggtaaaacccaggactttactggccaggtctccatacggatagtatcgcttataatcctcatccacttttacccccgccagatcatattcccggattctgtcaccgatgctcttgtccacattgcttttgacacgttccatggaagaatatttttccacacgttttctcgcttccgtctccgaaattcccagctcttttaccagcatggctatcaccttttccggttctgtgatctgattatgaatcaccgatacggtacagaccgtcttgttatccgccagtaccactccgttcctgtccaaaatacggcctcttgccgcctttatgctgcgttctctctcatgcagtctcgtcgccgcttcctcataataatccgccctccacaccatcagatacaaaagtctcataaacaatccgataagcaccagtgcgcatatgaaaaaaatggtcatgatctttttgcgatgaaaaaaacgattttgctgatccgccataaaaaaacctcacaacaagagctttttacattttattgctcctgctgtgaggctattcgtatgttttgtttattcattctgctgattcagcagattattgttaatgggactgtcacccatggtatcgtccccgccgacatccgctcccgtaatgggatcgatcagaccgccgtcgatcggacttaccagataaccggtagcgggatctttgggataatttctccagtcctccgtaaccgtcgtcgtatcgtcaccggttccgtcaccactctgggaatctccggactgatcatctccggtctgagcgtctccgctctgatcgtctcccgtctgattgtctccggtgctctggtcatctccgttctcgggagtctgggtatactgattcgtaatctcgatctgtttctccgccagttcctgaatctccttttcagacagttcctccgtcatgaagatattcagataaggcagcacttccgtcagaacatttcgtacaataccggttgcaaactttgcatcatcctgaggggatgcattggcacggtccacgactacataaatggcgatctggggatcatccgccggtgcatatcccataaaggatacaacatactcaccgtttttacgaggaatagtctctgcggtaccggtcttgccgccgatggcataacctgcaggtcttgcggttctaccggttctgcggtcaccaccctcttccataacggtagcacgacagtactgtctgatcttcgccgaagtgctctcggagatggtctgtcgtaacactctcggttcaatgttctccaccgttgctccgcttgcattggtgatcttatccaccatatgaggctcataatagtaaccgccgttgatcagagagcagaaaccggtgatcatctggatcatggtcacattaaagttctgtccaaagctgttggtcgccagatcagcgcttcccatctggtccaccggaaacagcaggcttgctgttctcgcctctcctgccagatccacgttggtctttaatccaaagttaaagatctgctggaatttggcaaattcctctttgcccatggtggcagcaatcttcattaacgctacgttgcaggaccaggcaatggaatcctgtaccgatacatcaccttcaccgccggaacggtagctgtggcatttgatcgtatgtccgccgacttccagagatccgttacactgatagtgctcgttgccggtgatggcaccgctctccaatgctgctgccacggtaaaaggcttcgccgtggatcccggctcgtaagtggtggagatacagtagttcttccacaggtaattcagattatccaatagctgctcatctgtcagggcatcgatatcttcctgggtaaaataggtatctgtcttcgtcagtacctggtaaccgttggcattggtcaccatctcgatcttacgtgatcccaaaagggcgtccgtattcctggtatcgttcaggtcataggtaggatagctggccatggccaaaatattgccggtattgacttccatgatgatgcagcccacattttccgcaccgttaccgggatgtaccgcatccttatgctcctcgttaaactgctttaagtatttctctacaatgccctgaatattggcatcaatggtactgtgtattgtgttaccgtccactgccggcttgatcgtacgctccaggttggcatcgtcattcagatagccgtactctcttccggtggttccgttcagaacatcattgtaatactcttccagaccgtactgtccttcattgtccgctctggaaaatccgatcacatctgccgccagagaaccgttgggatagactctcttatattcctcttcaaaccagacaccacggatcttgctgttctccagtgctgccgcctggaatccgctgatctggtcataagtcatcctccgaagaggcacataccaggaagattcggggtgagacgttacatactgccgcactgccgtcatgtccagatccgggaaatttgcacccaatgcttccatggtgggttccagataatcctcccggtccagcataaccctggcatcgatgaccagattatatactttctcgctgaccgccagcttggttcctttggcgtccacaatatcgccgcgccggaaaggtaatgttatggaatcatatttctgctgagacagcacctgtttctcgtaagctgcaccatctgctttcacgatccatgtaagacgcaccgataaaagaataaatgccagaatgatcagtgcataaagacacaggagctttttctgcatttttacggaaaattttttcgttttctgttctttcacacttcgggcctcccgggcttagttctgactgttatcagcctgacgcatgtagtcattactgttgctctcataagggattacctgtccctcggctgcataggtcattcccagttcgccgatggcaatcctcttgatctcttccaggttgatattactggtaatgcgactgtattcttcatcatttgccagcttcagagagttcaactcgctctccattctggatacttccgtgatcctggcagtcagttctgactgcatctgaatatagttcaccagaaaaaatgcacatgccaccagtgccaccatcagaaaagtcacatagccgatgctcatatgtcttgctttttctctgttttttctcgtctcgtgagacagctgtctccggggctcttccatttgcctgcggatctgtaagtctcttgctgtattatcatatatgtatggggtattacttcttctctgtgccatactttattcccactttcactgatgaaatatttaaaattctttatttcttttcaaacacgcgtaacttcgcgctcttggatctgctgtttacttccagttcttccgcaccgggcagaatcggttttctggtgatcacctttcccttggagaccttaccgcatacacacaccggaaattccggaggacaggtacagggattttcattcctgcggaacgcatttttcacgatccggtcttccagagaatggaaggtgatgatgcagaacctcccaccgggatgcaacaattcgatcaattcgtccaatgcctttttcagtacttccagttcctgattgcactcaatgcggatcgcctggaatgtctgcttggagggatgtccgttctgccgcatcttcgccgggactgcagccctgatgatctcgtttaattcaaaggtagtctcaatgggcttgtccgccctgttttttacaatatgtttcgcaatgtttttcgcaaacggatcttcgccgtaatcccggatgatatgatacagctccatctcggaatagttgttcacgatgtctctcgccgtcagggtctgtctgcgatccatccgcatgtcaagcggtgcatcaaatcggtaagaaaaccctctgtcctcggtatctaactggtaggaagagactcccagatccagcacaatgccgtccacaccggtcactccgtattctctgagtgcctccaccgcattcacgtaattgttacggatcacggtcactttatctccaaagcatcgtaatctctccgatgccgccgcgatcgccgcgtcatcctgatcgatcccgtagaaatgtccgttctgtaagcggctgcacacttcatatgcatgtccgccgcctcctaaggttccgtccacatagatgccgtccggtctgatattcagttgttcgatggtctcatgcaacatcacagaataatgattaaattccacgacggtcatcctttcctgcttcttttaaatggtcagtcccagtccttccatggcaccggtgatctcatccatatccgcatccaagttcatggcctcccacttatccttgctccagatctccacgcggctgccgactccgactaacaccacatctttttccagtccggcgaattctcgcaagtgtgccggcaacaggattcttccctgcttgtccacttccaccgtagccgcaccggctaagaagaaacgggcaaattgtcttgcttccttattgatcagaggtaatgaggtcagcttctgttcaaaagcgttccagtcatcgtttgcatacacaaataagcagccgtccattcccttggaaatcacaaattcctcgcccaaagtctctcggaatttcgccggaatgatcaacctgcctttcgtatctaacgtatggttgtactcgctcataaacatcgcactcaccaccattcatccaaaaggggactgccacgaaaaaggaggtcattttcccaaaaatctaccactttatggcacttgcctccactttctcccacttttattatgattttatactaaattaagggattttacaagagaaatcaagtggcttttttcgacggcagaatcaaaaaaagcgtcctgtcctatgacaagagcgctcttttccactatatgtggtaaaaaaataagagcaaacacaatatctatgtatttgctcttatttcgatattcttaataaatttttaaaaatttttaatttttttccactttcggctgttttttcaggtgcatacgtaccacaatgtccgtcaccaccgcgaagatcaccatacacagggataatacctgggatacggcgaggctcgttccggggataaacagggtatctgtccggataccttcgatccagaatctgccaaggccatagcctccgaagtacaacagacagatctctccctcgaactttttgtgcttgcggtatatcagcataatgatcagaatcatcagattccacagactctcatagagaaatgtggggtgtacctggatataattcgttccttcaataatatgtgccgctacattctcggaaatatcacggctgcgcaccgcttcgatgggaagccgcatagccaggaaattatccgtatattctccgaacacttcacggttcatgaaattgccccagcgtccgataacctgtcctaagatcagtcccggtatacacagatctcccagccggaaagggctgatcttcttgatcttgcagtaaatgaacagagtcaggaaagctccgatcacgccgccgtagatcgccataccaccattacgggtattgaagatacttaacagattgtccttgtaataatcccaggcaaataccacgtaatagattctggcaccgatcacggaaaagatcacggcataaatagcgaaatcccaaatagtatccggattctctccgttcacctttgcctggtgcactgccatcagaattcccgccagtacaccgatgccgatgatcagaccgtaaaaagcgatctcgaaaccgaacacggtaaagcttctgggaacattttccaggtaaatgcctaaatggggaaatgctatatctcctgcattcatcataatatttatatcctttcttagtattaaccggcttctccacgctttacgctctcgaatccggcatatcagacgttaaatctgaacaggatcacatcaccgtcctgtacgacatagtccttgccttccatgccgaccagacctttctcacgtgcagctgccagagatccctgctctaaaagatccttgtaatttacaacttccgccttgatgaagcctctctcgaaatcggagtggatcttaccggctgcctgaggcgccttggtaccgatcttgatggtccatgctctggtctcatcctctcctgcagtcaaaaagctcatcagacctaagatatgatagcttgccttgatcagcttctccagaccggattccttcagtcccagatcatccaggaacattgccttctcatcatcatccagttcagagatctcttcctcgatctgtgcgcagatgacgaatacttcgctgttctcacttgctgcaaactctctgacctttgctaccatctcattggaggcaccgtcatctgccagatcatcctcggatacattggctgcatagatcaccggtttgtaggtcagcagattgtattccttcaacagagacagctcgtcctcatcggtaacttccaggctcttcgccatcttgccgctctccagatgctccttgatacgctctaagagtgccagctccttggcataagtcttgtccattctggcagccttgactaccttggacagtcttctctccagtacttccagatctgcgaagatcagctctaaattaatggtctcgatatcccgtaaaggatttacactgccatctacatgaatgacattcgtatcctcgaagcatcttaccacatggacgatggcatccacctcacggatgttgcttaagaactggttgcccagtccctcacccttggaagcaccctttaccagacctgcgatatctacgaattcaatcacagcaggggtcactttcttggaatgatacatctctcccagtgcctttaatctgtcatccggaactgttaccacacccacgttggggtcgatggtacagaaaggatagttagcggattccgctcccgccttggtcagggaattgaaaagtgtactctttcctacgttgggaagaccaacaatgcccagcttcatgatttatttaccgttcagacccaccaaaaggatctgcctttcttgtattttctattctttatttcgctcataagtccatccgcctccatgcagaggcagacgaatccgaaataatattatagcatacctcacgctctttgcaaagtcctactgttcaaagtaagtattgattccggtgagaagccctgtggctaattgttccaatacctcatcgctgtgatctgaatacgcatttcccagttccatatccacagaagggatcgtgctgtaggatgtctgggtcagatcaatacccatatgtcctttcccatagattgtggtgccctgctcccgcagtccttccaccagatccgttcccagggtatcgtgctgctgccagtgcgatgccaccggttccatgtttttcagtgcttccggcaccgagatgtagaaacatcccttgtcgtaatttttgccgtcaccgctgtcccagtgcagcgcaatatggcagtccgcgacattgttgcagatcacagtccgcgccacattgtctaactgcacatcctcactgtcccgtagcatcagcacatcataaccggaggataacagcttatcccgcaggatctgtgccatacgtaatgtcacctcctgctccggtgtgccgtcctgaaacgtcatgcctccggaaactgcagcagcctccgtagctcccgccgccgtactgcctccggtgactttcgccgagccgtccggatgacacagggttttcaccttcgcgccgccctccgtaccatgccctgcattgacaccaatgacgatacctttaggtccggattcctccggtgcccggtagagtactgcggctccggtatttattttagaatgatctgcatattcccatgtggaatccagggtgatctgctgcacgtcagtgtattccaccggttgcatctgtggtgtgacatttgccgttccctgtggtgccacactctccgaaaccatagcttctataatttctgcattctctatggtctctgtgctctccacggtttctgtgcccttcacggtctctgtgttctccacggtttctgtactcttcaggctttccgtactcccggtattttcctgtgttccacaggcagtcagggtaagcgccagcgccataatggttactcccgctgccactctgtattgttttctgtgaagcatttgtcttttacacctccgatatgaaaagaaccacagctgtgaacttacagctatggttcttctgttctctcttcttgattccgcttatttcagaacacatcctatgattagccgcgcagtttgaaatgctctaacaattcgttcagagtcgttgcagatgcggaaagctcctcgctggtagcggaagtctcttcggctgctgcagagttggactggataacgtcattgatgtcttccacaccttttttgatatttttaacggaaaccgcctgtctgtcagacgcagtacggatattggccacctcctggatgatctgatccagctcacccataacctcctgcatagcatcattggtctcctttgtgaccttattgcccacctctacttcgttcatggactcttcgatcagcttcttggactctactgcggagttcgcactttcttctgccagctgtctgatctggtctgcgacgactgcgaagcctcgtcctgcctctccggcacgggctgcctctatggaagcgtttaaggacagcagattggtctgggatgcgatattctcaatatccgcgatgatcttttcaatgttctgagtcgttgcattgatcttcttcatggcatctaccagctcatccatcttcttctggctgttggctgcctcaataccaacctttttcgccttgtcatgtacaatatcggtagacttggtattctccagtacctgaccggttacttcttctacggtagccaccagttcttctacggatgccgcctgattggtagcgccctccgcgatatcctgtgcactgactgccagctgattactgcccgcagatacctgctcggaggaatcctgaataccgtgcatggtctcgctgatcttatttaccatttcatccagctcatccagaacatttcggagctgtccgacatatgcttccggacaactgctgtgaacatcaaaattaccatcggaaaattgctctacgatagtctgcagatcagatacaacctttttcaaaatagctgcggcggtctcaaagctgtcggaaagtctgcccagctcatcctcagattcataaggtactccgatctcaaaatcgccggccgcgatcttctcagacgcagctaccaggctcgtaatcggatctaccagcattttggcaagcattttcgacatggatgcattaaatatgatagctaaaacaagtaaaaccacaacaattatacttcctatatagccttttgactgtagcaattccaccactgccaccagtgccagcaccaaatataaaatgtccatgatgcggaacacaaaagacagcttatttttaattggtttatctctcagtatttcttccagttttttcatttgttttctgctccttccgtgaattaaccttcctgcattttattgtaattttccttttctgtttcgtcaagatgaagctgattaaaattatgtaaaattcaggtgtgggatgcccggctcatctccagtaatttatctctcatttcattctcaatgcgctgtaagtcttcctctgcgctctgtcttctcgcacgtccctcttcctggatcttcatgacctcatccagtgtcgtcatcagtgtctgattcgtactcttaagtgtctctatatccacaattccccgctcggattccttcgctgtctccacagaagccaccttcagtgcttccgcgttcttcttcaacagttcattggtcatatccgatacagcacgctgtgccttggtggcatcggtagcatgatccagaccgatggcaatgaccatctgactcttccacagagggatcgtattcactaacgtcgactggatcttctcggacatggcgatgtcattggactggatcagacggatctggggtgccatctgcagggaaatggctctggtcagctccagatcatagatcttcttctcaaaccgctcacacattgccgcgaaatctttcgctgcctgggtgtcctccggaaatccactcttctgtgccttctctaaaagctccggaagctccacactttttgcctgcgccagcttctttttacctgccaggatgtacatggacagttccttgaagtaattcaggttcagctggtacagcttgtccaacactgcgacatcctttaacagcacaacctggtggctctccatggcatcacagatctttgtgatattgacttccgccttatcatactttgctttcagattgctcagcctgtctccgctttttttgaacagtccgaaaaaacccttatcttcctcggtgtcgaaatcctttaactgtgccaccacatcggttaacagatttccgacttctcccatatccttggtccggacattactaagcgccgtctctgagaaatcagcgatcttcttctggcttccggctccgtactgtaacaccgcctgggtattggtcaggtcgatctgtgctgcaaaatcatccacctgtttctgctcttccggtgtcagttccatctcgggaaccgcctgctcttccaccaactcctccggctgcttctccacgatctctgcctttgcctccgcaaaaggatccagtgtaagagtcggtgcttcttttgttgctgcgtctaaatccatattcatattgatacccccattttttactattacatcatttaaattttactgttttcccattacaaaatcggattccgtcagaccttcctttgccagcatggcctgtaatacctgcgcatctgccgatgcatcaaaggctgcatcctgaaacagattgtttaacaatgtcacaaatgcctgattgatcatgtccagtgtcttcccgatctctttcttggcctcgagaatttcctctcccggactgctgacctcgtcaaattccgcatactgctccaccagctttaaagtagtgggcagataataatccattaatttatgcattctatgcatctgctccgggtgctcctgcactctgtcgaagatctcctttaacagattctccagacggtacagcttctcggagattgcctcctcttcgatccggtcgttcaggtcccgaagatgtctgatgcattccatcccctctgctaccatactgtggagttcctgttctctctccgtctgtgcagcgtcctgtgctgttcctttgtccggcatctgttttgcctgttcctctgattttttctgttccagataagccttttctgtctccagatattgatgatagatcacatcatttaacataaaacaggtctctttgtcatccagatgaccgttagggaacattccggcttttaacattttacgcagatctttttttacatagcggacgcttttgccggtataacgcgccatctccgtgatcacaccgtacatcttggtaccgcacagctccagatatttctccgcacgctgtaatcttctgcgctgtccgttgccataggatatcatctccaaaaataccaaagaaagtactcccggaagaattgccgcacttaaacttgctgcactaaaagctgccaagagaagctgtaccaaaagtcccagcccggaaaagcctagtccgatgcctccgaacacggtgcacagagttccggacacgcttccctttttctccatttttaccaaagaagtcatctccaaagccgtagtctttctgggtgtccagacaccggcctgatttccagaacggttctgcgccgcctgtgccttacgctgttcttcccattgtttttcccgttcttttcgctgtctgtgccactcctcattctgtctgcggtgttcctcccgctgtctttcccgttcttctcgctccgcctggatctgttcttcggacttctcttcttccctctttttatcctgccagctgcgctgggaattccagacccttttctccgcggcttccctggacagattcgcctgaaaatccgcttcccgcagagcatcgttgactgtatcgctcactaacgtattcagtgcccggaaatctccggtcttcatggcttcggcgatggtttctttaaatttttccccaagatgattctgcacttcactcataattaatattttctctgacttttcagttcctcatagagcagacaataattctcgtaacgtgtccgcgagatctccccttccgccacggcatctttcacgccgcagaccggttctgagatatgagaacatcctccgaatctgcaatatttttcaaaaggaacaaattcgggataatatcccgccagctgctctttttccagtccaaacagtcccagggagctgaacccgggagtatccagaatgtaagtatccggtgcaatggagatcagttcggaatgcctggtggtatgttttccacgttcgatcttctcactgatggaaccggtctccatcacgatccccgactgtaaacagttgaccagcgaagacttgccgacaccgctgggtcccgccaccgtggtggtcttgccccgaagtaggtcttttaatctgtcgatgccttccttttccctggcactgacagtaatggtctgaaatcccgcctgttcatagatggaacaataatcctcttttttcccctctgcatcaatgtcctgtttgttaaagcagatgatgcagggaatatcctgctgctgcatcatgatcaggaaacgatccagcaggttaaaattgggctgtggcttacagatggcaaaaatcaccagtgcctgatccacattggcaaccgccggacggatcagttcgctgtgcctgggaagcagttctgtgatatttccctttttctgtgcttcatctatgacttccatctccacatcgtccccgaccaatggtttcctgtggtccttacggaagacaccttttgccttgcattcatagattccgtccgcactatgcagagcatcccctgcatggacataatagaatccggcaattccttttataatcttgcccttcatagttcctgcctttgtcttattccttcacgaattccactcttctggtaaaggtcttgttctctgtggtgccggggacgacaacatccccctctgttgtggtgcttgccgatgtcacctggtaggtcatggtgagggtaccgccggaggaggcgatgccgttgatattggtcgataccgggaaggtggtaaccttcgtatccatcagtaccgtaccgtcatccgccaccagggtgatgccgacttccattcccgatacatactggggtgcctcggaagtcgtcggtgccacaatgctgacattgcacttataggttactttctgtgcgccctggctcaccttaatatcaatggaggttccctgatccacataggaaccatgggaatagctctgatagcagatcatgccctctcccacttcatcgctgtaaatatgggtcacactgcctactgtcagtccggcctcgattgcttccaccgtaccatcctgctctgacagtccgatcaggttcggcacgcggatcttcgtatcttcctttcccaggcttacggtaacggtgatcacactgcctttcggcgccttatttccatctgcgggagtctgggcgatcacgcgtcctgcttctatggtgtcggaataatcctctgtcttattgaccaaaaagcccttgcttaccagctgtgtattcgcctcgtcaaaagtaagtcccaccacattcggaacttctacgccctgggttccggcgcttgccgtaagtgttaccttgctgcccttgtcaatctgggcaccctcgctgacgtcggtactgatcaccacaccttctgccacggaatcagattcctcatatacaacttccgtcagaattcccagtccggtcagtgtatttctcgcatcatccacattcatgcccttcacatccggcatggcgactttctctgcctcttctttggtttcctccgtagtgatgatcggaccggaaggattattgccttcgttctttttcccgccgaagatcttcaccgccagtacgatcaggataatacagatcaccactcccgcaacgattgccagaaccgttgtcacgcgttccatcttgggatcgtaatcataatcatcctctccctctgcctcttcatcattctcatacatggcttctgtatcggaccgtaggcgcatcgtctcatcatgatcctgttcttcatactcccggccactctgatacggaacttttctcttgatctgtgccatatcttcatcggagatcatccgggtgccgccttccatatccggatccttgttcacgacaaagtcctcctccggattgatcagagactgcttcaggtctgcaatcagttctgccatattctgatatctgcggtccggtgatttctgacaacactttaatacaatacttgcaacgctggaagggatctccggcacgaattccttgggagaaggcatttcttcctgaatatgcttgatggcaatcgctaccgtcgtctccccattgaaggggactcttcccgtaagcatttcgaacatggtgatacccagtgaatagatatcactcttctcatcactgtaaccgcctctggcctgttccggagacgtatagtgtacacttcccattacattggaagtaatcgtattgctggtcgctgccttggcaataccgaaatccgtgacttttactttgccgtctttggaaataatgatattctgcggtttgatatcccggtgaataatatgattattatgtgctgcctcaatgcccatactcacctggatggcaatgcttactgcttccttgtaagacagacgggcctttttctcaatgtactttttgagggtaatgccctccaccagttccattacaatatagtagattccgttttcttcccctacatcatagacatttacgatattgggatgcatcagtcctgctgccgcctgggcctcaatacggaatttggatacaaaattagcattctcgctgaattcctgcttcaataccttgattgccacatatcggttcaacttatgacattttgctttatagacatctgacataccgccggttccgattttctccagaatctcatagcgatcgccgatcatcattcctattttgatcattattgctctccattcttatataacctaagtaactaagagtattatctgtcttatgcgcacggctcaataaggataacactgatattgtctctgccgccgtttgcattggctgcctctaccagacgctctgctttctccacaagatctcttgcaccactgatgatcatgcggatctcttcatcttccagcatattcgtcagtccgtccgaacacataaggacagtatcgccttccctgagttctacggtaaaaaagtccggctctacatgatcctccgcacctaccgctctggtaataatattcttgtcaggatgatttcttgcatccgcacggtctaatccgcccatgcgtatcatttcctctacaagagaatgatccctcgtaatctgccgtatctcacgattcaccacataaagtctgctatcacccacattggccacctgtaaaaatctgcccatgcaggatgccaccacaaccgtcgttcccattccttccagcttcttgtcttcgccggctctcctgcggatcacctcattggcttcctcgatcgctctacggaaaatcagcgtgggatttttttcaaaagaactctgcatctcagccagcatggtctctactgtcactttggatgcataatctcccgcattatgtccgcccataccgtccgctacaataaacacgttgggcagatttcccaccggttcctcagaggtatagatatagtcctgatttacttttcttttccttccgatatcggttatggaaaacgtcttgagcacgtcaattttcctcctgtgagagtccgtccgggttctgcatctcctgtgtatgacgacgccttaactgtccgcaggctccgtcaatatcccggcccatctctcttctaattgtaacatgtatcttcttactttcaagtttatttttaaacgcctgaatatgcccggtatccgactgcacgaagtcccgctctttaatcgggtttaccggaatcaggttaatatgacagcataaaggctttgccagagcgatcagctctttggcatcctcttccgtatcgttcacaccgcctaccagactgtattcaaaagtgatccggcgcccggtctgttcaaaataatacctgcagacttccatcagttctttgatggaatacctgttggcaatgggcatcagttttcttcttttttcatctgtggttgcatgcagtgacaatgccagggtaatctgcagcttctcatctgccagctgtcgcattctcggcacgattccgcaggtggacaccgtgacatttctctggctgatgtttaatccattctcatccgtcagcagatgcagaaactttagaatattatcataattgtccatgggttctccggttcccatgactaccacattggagacccgttcctgcgtcagtctcgtgatggcatagatctgatctaacatctccgaaggcgtcaggttccgctccagtccatccagggtggacgcacagaatctgcagcccatccgacatcccacctgggaagaaatgcacacactgttgccgtgtttgtactgcatccacacgctttccaccacattgccgtcagacagttcaaataaaaactttttcgttccgtcgatcttcgactcctgtattctgacaggctttacacaggtatattcatacttttccttgcattgttccctgaattttgcggagagattggtcatctcgtcaaagcttctcgctaacttcacatgcatccactcatacatctgttttgcccggaaagctttctctcccatactctccagttcggtcttcagttcctccagattcagggatttgatatcttttttactatccatgtcttatatctcacgttcttctgcgcagccttgcaaagtagaatccgtcggtctcatccgttcccggcagaagttgtctctcctcctctaaaacgaacgggaacttttccgtgatccatgctgccatgttctgattctcttctctgttgatcgtgcaggtgctgtacaacaacacgccacccggcttcacataccgccatccggcttccacgatctgcctctgcagttcatggatagatttaaggccttccggtgtcacacgatatttaatgtctctctttttgcccatgacacctaagcccgaacaagggacatccatcaacacaacatccgcagatgcttccctctctgcgtcataaaccgtggcatcatgcacttccactttcacattggtgcggtgcatacgctccagattctcaaggatcaaagccgtcttatattctgacacatcgcgggataacacatgtcccgcctctttcgtatattctgccgccaggatcgtcttgcctcccggtgccgcacacagatccataacaaagtctcccggctttatttttgctgcttttaccgccagggcagaagaagcatcctgtacagtgaattttccttcggcaaacccgggcagctcgctgacgttttccagattttccgccagatatacatagggaagttccttatgtgcgcttaagtggacccctgtagcctctatctttttcttaagatcctcacggtccgtttccgacaattccaggcaaaaacgcagagataccggatgaatcttaagcagtcccataagaagtgtttccgttccctccgtgccgtataccggaagccacagattcacgatccattccggcatggaatattttacgctgaaatattttacaggatccgcaggatccggcaggggcattttgtccttgctacgggatatatttcgcaggacggcattgacaaaccccttcagagtacgaaagccgcgctttgccgcaatcttgcaggcttcattgcataccgcactgtccggcaccgcatccatatacaggatctgataggtactcatgcggagcagacaacggatcagaggcttcatcttgcggaccggaacggaagaaaaccggttcagataataatccaactccagctgtctctctatggtaccctctgtaactctcttgataaatgccttatctctgggatccaggtaatcgtatttatccagcactgcttttattaatttatgggaaaaatcctgccccttttccaggtccagcaggatctccacaataatctctcttgtatcggtggttgcaggcttccccatgcttagtctctccttctgcggttgccgccatacaacaggatcagacgaagcagctgtaatgcggaggatgctgctcccgctacataggtaagggctgccgctgtcagcacctttttaccaccgcttacttcttcactgcctaacagtccgtattcctccaccttcacgattgctctgcgggaggcattgaattccacaggaagtgtcaccagctggaagatcacggtcagagcaaatgcccagattcccaactggatcaatgtctggttccagctgagcagtactcctaagaaaatcaggggaatacttaagttgcttccgatgttcaccaccggtaccagtgccgcacgaatactcataggtgcatagccgtgggcatgctggatcgcatgtccgcactcatgggcagccacactgactgcggtgactgaggttccgttataattcttatatgacagtcttacggtatctgtccggggatcgtaatgatcgccgtcgtttgcgttcagacactcgatctgtacgttatacaagccttctctattgagaagattccgggcagcttccgctcccgtaattcctctcatattccggaccttactgtattttcgcatggtggaattcaccagcgcactggccccaagacataacaccagtccgatcagtaccagaaaatacgtggggtcaaaataataaccatatccataataaccaccgtacatagcaaagtctcctttctaattgcctgtattgtttatcactctcccaggatctctcccggctgcaccttcacgcctaacaggaaatcatgggctgtcatacgctttttgccttccagctgcaattccatgactttcagagccccttccgacgctgccacctcaaatgagtctttatttaccgcaaggatcgttcccggggcttccctgtgagccgtcaccatgggaatcgccttccagatctttaactgttttccgcgataaaatgtgtaggcactgggccagggagtgagtcctctgatcagtctgtccagttcggctgccgttttggtgaagtccagtctgcccatttctttggtgatcaatgccgcatagcaggtcttcgcatcgtcctgtttttccggggtcagctttcctgcttctaagagcggcaatgcctcggtgatcgcttctccgccgagcaccataagcttgtcgtgcaatgtttcaaaagtatcttccgaagtaatgggaatcttcttctgatacaacatatctccggtgtccagtccggcattcatctgcatgatggtcacaccggtctccgtctccccgtcgatgatcactctctggatcggagatgccccacggtatttcggaagcagggatgcgtggatattcaggcatccgtacttcggcagatccagaatctcctgagacaggatctgtccgaaggctgccacaatatagacatctgcgggatattttttcaattcttccatagcctcgggagtcttgatccgacgaggctggaataccgggatgccgtgttttacagcacattccttcaccggcggaaactgtaactgcccgcttcttccctttgccttgtccggctgggtcaccactgcggtgatctcatgtccctgtgcgatcaaagcctccagagctcccactgcgaaatcaggggttcccataaatacgatctgcatagcttatctccttcccggaatacttattcttcttcctcatcctcataggtcatgtcctgcagaggaccttccgccttctccacatagagatgtccatccaggtgatccagttcgtggcagatggctcttgccaataattccgtaccctctacttcgatgggtttcatattgacatccaaagctaccgctttcacataattaggtctggtcacaataccaaacttcccgggaacacttaagcacccttcctgtccggtctgctctccgctgctctccacgatccggggattgataagaatatacggatcctctccggtggtgtcgatcaccacaattctcttaagtatgcccacctggggagcagccagtcctacgccgttggcgtcatacatagtctctaacatatcctcgatcaattccttcgtccggggagtcatctccttgacttccttacaggtctttttcagtacctcatctccatattcacgaatatttctgattgccacagttattacctcctataacacgtttaccgggtcaaagtcgaattgtatactcagctgtcttggctgccactgtctcaaagtctcctccacacagtcttttaccgccaccagcgtatcatactccgcatgcttcgcatagaacacataccggtaaatgtcattgattttgctgatatttgccggggtcggtcccaatatctgcaaaaagtccatattagactttaccacatctgtcagcctccgggcaagctgttttacattttcttcctctttgccatagatctgcaccgccagcatatgtgctgcgggaggatatcccgacagctctctgtacaggatttcttcctcataaaagcttttataatcctgggctgccgcgcaggtaatggcataatgatccggctgataagtctggatcaccgcttctcccggaagcgcccctctgcctgctctgcccaccgcctgggtcagcagctggaatgtccgctctccggcacggtaatccgatgcgtttaaggacagatctgccgccaggatccctaccaatgtcaccttcggaaaatcatgtcccttcacgatcatctgggtgccgatgagcacatcggcctctccgtttgaaaatgctgacagaattttctcatagctgtccttcgcccgggtagtatccgcatccatccgaagcgtccgcacccccggatacagttctttcaatttatcttcaatctgctgggtacctgctttgaatcccagaatatatttggatccgcacttcgggcatagctttggcaagggttgtgtatagccgcaataatggcagatcagccttccccctttatgttccgagagggagacatcacagtgtgggcatttcataacttcaccgcaggcacgacaggatacgaatcccgcataccctcttcgatttaaaaacaggatggtctgctgccccttgcttagccggtctgtcatcagttcctgtaacttcctgctgaaaatagaacggttgccctccttaagctcctgcctgagatccaccgtgtgtaccgtgggcagttctccgccggtcaggcgtttcgtcagatggaacagcctgtattctccatttccggcgcggtaatacgcctctaaggaaggggtcgccgatcccagcactacactggctccatacagcttcgccacttccattgccgtctctctggcatggtatttgggagtactctcacttttgtaactgttctcctgttcctcatccatgacgatcaggcccagattggggaatggggtaaaaagtgcggatctcggacctatgatcacatcgatctcacctgcttttgcacgctcgcactgatcatatttttctccgggagacaatgtggaattcatcacactgacccggtcaccgaatctctgatagaaccgtagcagcgtctggtaggtcagagcgatctccgggatcagcacgatcgcctggcgacctcttttgatcatctcgccgatgagctgcatatacacttccgttttgccgctgccggtgatgccatggatcagatatgtctgtcttcttccggcatcaaaatccgtaagcacttccgtaacgatggtctgctgttccgagctaagtgtattatgcgttgtctctcccgcctgtaccttcacggggttccggtagctctctgagctgaccagtttcgccgcgcccacttttacgatactgtttaccgtagcggcgctgacgcccaatttcccggtgatccactcatagggaatcgtctcctgctccgacagagcttttaacagtctggcctttgccacctgttttttgcgctcacattctcctaagagtgacagaagctcttctctattcatcaggcgcaccagctgtctgtgctccagtttcttcacggtctgcttcgccggcaggaccgtcttcagagcctggatcatggtacaaccgtaattgcgtcggatccaggcagccagtgcgatcattttatcttctacaccggtctctttttccggcagtcctgcgatctccttgatcttctccggagcgaactgacactgatcccctatactgaccacataacccttgatcagacggtttccattgccgaaagggatcataacacaggctcccggctccaatctgtcccgcagtctctccggtatccggtactgaaatgtcttatccagtttttcatgagagatatctacaatgatatccgcatataacgtacgcaatctgttttcctctctgttcaccgggatcccggaaaactgtcttataggccctgacccgctgccgatccggggatatgtccctctgccaggatatcccggatcagatcccgttcatccattggatgcttcacgcctttgatctcctggtagtcttcgtgcccttttcccgccagtacgatgatatcgccgggttctccatgttcaatggcataagtgatggcttccttgcggtcgcagatctctacatattttccgtccgtcttcgccataccggtcttgatatcgttgataatatcctgcggttcctcgaaccggggattgtcggaagtaatgatggtcagatccgccagcctgccgctgacctctcccatctcgaaacgacgctgtctggaacggttgccgccgcagccaaacaggctgaccagtctgtggggttcatactcccgcagggtggttaacaggctttccagtgccatggcattatgggcatagtcgatcagcagagtaaattggtcagaaaccttgatcatctcgatacgaccctttacttttgcctgtaacagtgcctttttgatagcttcctcatccaccttaaaatgacggcagatggcaatagctgccagcgcattgtacacactgaatttgccgggcatgggtacttccacagcaaaattcatcagaccggtcacatggaaggtcactcccagttctccgggtttgtgcaccagctgccggttctcggcccgcagcatgcagtgctctcccatgccgaagctctccagtgcacaggtatgtccctccgtcactgcctgccagtgttcatcgtcaccgttgacgattcccaccttgcactgtttgaacaacaatcccttgcagtgcagatattcctcaaagcttgcatgctcgttgggaccgatatgatccggctccagatttgtaaaaataccgtaatcgaatacaaatccctgggtgcggtgcaacatcagtgcctgggaagatacttccataactaccgtatccagtccggcatccaccatgcgggcaaaatattcctgtaacaggtaagattccggtgtggtgttatttgcatgaatatgttcgtctccgatgatcacctcgatggttcccaccagtcccactttatagccggcattctccagaatggatttcaccaggtaggtggtcgtggtcttgcccttggtgcccgtgataccgataactttcagtttctctgccggatggccgaaccaggctgcggagataaatgccatggcatatcgggtatccgctactttgatcacagtcacatccgcatccgcaggaagctctatgtccttttgtaccaccagcaccccggcgccctgtgcagccacctgtgcggcaaaatcatgtccgtcaaaattggctccgttaatacaaatgaacaggcatcccggaatgactttacgggagtcatagactacagctgtgatctcccgctccgtttttccgcatacctgttcatattccagtttatccaaaagttctgttaattttctgttcatacaggtgtccacctttctataccgatatcggatatcccatggttattccgaaaatctttgcatactacggtatattttactctattttccgcaaatgtaccacctataatttttcgatccccattttctcagttttccgtcacacaatccgcaccggtctcctgtgtgcggttaaagttctgtacaaacccgatcagctgtcctgacaaaagcacggtgaacagcgaatacccgatgcgccgtaccgggatatagctcaaggacatgaccagcacgatcaggtccgacatcaggtacacccactggatcttccagccggtggcatgggaaatactcatggccagggcatcgtctccactgggagctccgccgacgcgcacgcacagtccggcgcccacaccaacaaacagtgcacccaccagggctgctacaaggggcatgtccgccagtccgggccacaggtgcgggaattgttcgcagatcttatatgtaccggagaatcccaccgtagccaatgcggaataagcgatgaattccttgccaagcagccgccaacccagtacatagcacaagacattcataatgccaccggttaacgccggagaaatgccggtccagtgctccagtaacagggttgcccccagtacaccgccttcggtaacaccggagatagagtgtacatgatataatccaaatgccagaataaaacttcccaataaggttatggcacattttttaaatgtgatatttttcaacgcttctttccattcgtaaagctgtgatttcattttgttcattttgtaatttctgttctttctataaatttgtgttcgtatctttatgatgtcccgcctttgatgcctacgaattgttccgtgctgcgcactctcacaattctaccctctattcgcatatcgtgggattatcattcttacattataaccacggatatcggtctgtcgtcaagtcttatcgaagaatcgaaaagccccaggctattatacctagggcttttcgatttcttatgaggggggggagatagtgagttcatcaactatctgaaatacatattacagaaaaaatatgtacagaatgtgtacgaattctaatttaattctaaaatgaatcttgaggttttataaactctgaaaagtcctaccggacaccaaaaagcctcaggcatcgtacctgaggctttccggtttcttatgaggggggagatagtgagttcatcaactatctgaaatacatattacagagaaaatgtgtctattttgtgttcaaaaaataaaaaaataggaatgtgattctgaacagttacgaaactatcagcaatagttctgcatgatatactgcacttctgtcctgcccttataagtattctgaccgacctgatatactacagacaaaggaaaattccctcttccggcataaagggtttcttcacttccgataccatatttttcattcaaaaaagctcccagtcgttccaggtccccgaaaaacaccagcgtctgtattgcaccttccggtgtcttcacacggaatctggcacaggttttattggcacccattttaaatcccgcctggaagatcagattcttttgtgcaaaaaggggcttcggattcccggttccgaaaggttctaataacgccagttctcctgccagggcttcgtccgcatatcccatgggcattgccacatcgatatgtacccggggaataaaatcatcttctgtcagcgtacagtttttattgagagcaatccgcagaggttcaatattctcctcccgcatggacagacctgccgccagcttatgtccgccatacttggtaaaaaactgttttacctgggtcatggcatcatacatatggtatgcttcgatagaacgcccggatcccttcacaccatcttcgcctttggtaaggataaataccggatgatgatatttttccctgacttttccggcaatgattccggcaatgctctcatggacctccggaagatagatcaccatgaccttatcttctgtcatatgatgttccaaaatatactcatccgctctttgaatcccctggaccgtcagattcttgcgactttcgtttaaatctttcaattctctcgccgctgtcatggcatccgctctggtaaaactctgcaaaagctccagcgcccttttcgcagtatccagtctgcccgtagcattcaggcagggtcccagtacgaatcccagatggtaggcactcaaccggtccggcgcgatgtcattcacctccatcagagctttcagcccctcgttatatcccttttggatccgtttcagtccttctttgaccagaatacggttctcatcctttaactccataacatcgcataccgtggaaagtgccgcgaattccaacagctcatcctgaatatttataagacccggatttccggtcttctccgtgattgcctggatcaccttcagtgccacaacgccgccgcagataccttgaaacggataagagcaatcactgcgcttgggatccaccaccgccagtgccgggggcaactgttccttacgttctccgttttcttctatgtaaggaacctcatgatgatccgtaacgatcacacgcatgccaagggaatttgccagctcgatctgtggtgccgcggcaattccgttatcacaggtgacgatcatgccaacgccttcccgcttcgcctcttcgatgagatgctcgttcaatccataaccgtcatgaatcctgtgtgggattgccgtatccacctgtgcaccaagcatctgaaatcctttggtcaggatgtaggaagagcagattccgtccacatcataatctccgatgacccggatatgcagaccttcctttaccgctttcagaatctcctccactgccctgtccatatccttaagcagccagggagagtagcagtcctccagttttccatagaggaacttctgaatctggctctcttccgtcagatcacggtttctaaggatcctcgctgtcaccggactgatatgaaattccttcgcccatttatcaaaatctgccttctttgcagccacataccatttttccatgcaggttcccactttcgtaattgtttttccctgagactcactccttaggtattatagcataaaaaggcttgtgcatctccttttttgtgtatcaggtagattcccggatgatcaaggttgggaatgtgatatgggactgcacatagagattcgatcttttaatcttctgcaaaatatatttccctgcctgcacccccatatcgtagacatcgatgttcacgacagagagcatgggcttcaggatctgagaaaacgggaagtcgtcaaaagtaatcaccttcatttcctccgggatcaggattcccctgtcatgaagggcattcacacagccgtaggcgatatagttgtccgcacacactaacgcatccggacgtcttctgttctccaggatctgcatggtcatccggtaaccgctgtcacaaacggattctccttttttcacatattctctgggcagtaacacatcatgctctttaagtactgtcagaactccgtccagacgtctcgctgagatctggtcctccggcttgcctccgataaaagccaccgactgacagccccgctccagcagatgcttcgccgccagttctcccgccagccggttatcgatatcgagccagcagaaatggctgttaaaattcggattaccgatcacaatatgcgggatctcatgggtaaacagcagttcatccagtgcctgggagatcactgacgcatggatcacaaacccatctgcctgcttggtatccgctgcattccggataaattccgcacagtctcccgctgctatattcctgactacaagcgtatagtccttctgtgccagcacttcctccaacccacacaagatctcaaacatctgtggattggcaaacccggttccttttcccagctctgccacaaatataatggttcgtgcagactgcctggcgaaatttttcgcccgcagattcggatgataatccagctcctccatagcttttcgtactttatctgccgtctcctgcgagatcgaataagagccgttcatcactttcgatacggttgccgtagaagttcccgccagttttgccacatccttaatggttgcccccatcgttcaccctcctcgtgcgattttctctgagaatattttaatcccttgcccggatcagtgcaaatccttttgctgccaactgtccttccttaagaccttcctgccaaagaatctctccgcccagcagttcttcaggaagggggacgttttcctcttccatattcagaaaaatacggatactttctatactgccatcttctttctccagatatctttcatagccatacactctgctgcctggttccgccaacagggtgcggtactctcctctccgcaggacagcctcctttttgcgcagggtaattgctttctgatatagcaaaaacaaaggactgctctcatccagtgtatcccagggcatgggctgtctgtattcctcctccaggataccggtcagtcccacctcatccccatagaatacagagggcattccggggaaagtcatctgaaagatcaccgccaggcggaagctttcttcatcccggcacaacgagcggaaccggctgacatcatggctgtctaaaaggtttaactgtgcatagaccgtctgcttacgatagcgcatacgcatatccgtcatgcggctgtcaaactccctggcatctgccgtctgttccccaaaaaatctccggcagtgcttacggaaatcataattcatcgtagaatcaaacatggttccatccagccagtgtgccgcactctcccatacttctccgatgagaatagcattgggatccacactttttacgctctctctgaattttctccagaagccgtcattgatctcacttgccacatccagccgccacccgtcgatatggaatttttccacccagtagcgccccactttgcagaaatattctgcggtctccggatttgccagatttagtttcggcatcatccgttcatagccaaaacattcatatcccggatattcctccggatcctccggtcgcaccaccggataggtaagtccatagaaccagtctctgtaagctgactgttctccttttttcaccacatcatcaaaggcgaaaaaataccagccgcaatgattgaacacaccgtcaatgattactttcagtccgttcgcatgaaatacatcgatcagccggtgaaaatcatcatcggttccgaaacagggatcaatgtgaaaataatctaacagatcgtacttatgatattctccggcgacaaagatcggattgatataaatagcgttcacgccgaggttcttcaggtactccacgttctcgcagatcccacggatcgtaccgccgagctttcccctcgtcggtataccgccccattccttctcctctcctctgccgcaaagataccggtattcagtggcaaagctgtcgggaaaaatattatagatgatcgtatcctgtgcccattcgggaggtgcaacaatatctgcgcggtgattgaacggcagctgataatattccgagcggtcatccacggtatgatccgtgaatcgttctccgtagtacaacacctcttccctgccatcggacaatgtgaaataatagcaaagtcttttatagggatgctccagcgtagtctcccagtaatcgaattcttccgtctgcgccaccactgccatcttctgttctgtaaaaagcaccggtgtcaggcgacaggctctgtctccgtaatggagaatgcattctgtcagatcccctctgcctgcccgcagacggagcacaatatgctcttcatctgtcccgtatgcatactgggacatgggtatatgtaatactgcacttcgattcatacttcctctttctgcggtctatcccttcactccaccggaggtcagaccctctgtcatgttcttttgcaatgcgaaaaatacgatcaggatcggcagagacacgatcagggatgctgccgagaaaatcggccagcttccgctcatctccgtcgcctgcagcgaatataagcccgctgccagtgtataagtatcggatcccgtcatgaaattgatggcgaaaatatactcgttccatacatagacgagaaccatcatagccgttaccgcaatggtaggcttagcaagcggcagtacgatctttgtcacctgttctaactgtgtggctccgtcgatcatggctgcctcctcgatctccaccggaatcgtgtcaaaatatcccttcatattccatagtgcaaacactgccatcgtaccggtatacacaatgaccagaccagttctggtattgatcagccccataggactaagcagcttatacagggccgtcatggacaaaagggacggaaatgcataaagtaaaatcaacagcttcaaaatcgcttttctgccgggaaatcgtttccgggaaaaagcatacgccgcagggattccggtccccagcgagatcaccagtgtggtcaccgccaggatcagactgttcttcagccacaaaagcaccggtttctcggtaaaaactgccttatagttctgcaaagtcatatgctttggcaaaaaggaaaagtcagatcccaacaggctgttctccgcattcagcgacacggaaaacgcatacaataccggcaccagcacgaaaaagcataccaggatgaaaaacacatttaccgttataagtaccagcacatgtttcgtctttttactcatctgctctcctcctttctgccgtttgtcaccagagaaaacactaacagcattccgaagatcagaatggaaatcgccgaactatagccataattgttcgtaataaatgccttctcatatgcgtaagtcaaaatggtatgaatatttgcaccagtcttggatcccacctgctgggtcagcagatagatgacatcgaactgtttaaaagtcgtaaatgtcgtgatcataaccgacggtgctataatggggcggatcatcggaaccgtaatatatctcgtccgctccagccaggtggcgccgtctagcagcgcactttcgtaaaaactccggtccacgctctgcagtgccccgtcaatgatagtgatcatgaagggtaacgccagccagaggttcactgtcgtacagctgatgaatgcgatcacgtcacttccaagccatctcaccggttccattcccagtctgatcatccattgattcaacagaccgaactgggaattgaacattcctgtcttccacagcaggatggatacataccccggcatggcccaggggaagatcaacagggtacgatagacattccgcagtctcaatcccttgatattgagaagtgtcgccatgataaaagcgatcaccagctgcaacaccatatttaccacggtccacaatatcgtcacaagcagtgccgtcaggaaaccattatcaaataccagcaaggcatccttataattctccagtccgatgaactcataattattccagtgataaatattcatgttggtcatggagatatatccggtatagaggatcgggaagattacgatcaacaggatcaatactaaggacggcagtgaccagctgtaggcaaacagtgtctctcttctttttttattctgttgtctgttcccatgagcatttttatttcttgccatatttattcgttccacatccttttgcctgattatgcctgattacgcagcgtcacttatttcatggattcgatcagctgcaaagcttccttctgtgctttctccgcactttccgccacatcattgcccgccatgttgacatccgtcagcagtccgctggctacggtccacatcacatccatctccggcagattcggcatgggcaccgcattttccgcagtctccttcatagccatgaccacttcatcaccgtttacttcttcataactgtaacaattttctctggcaggagcacaaccactggcctgtgccagcgcaatacccacctcgtccttcataagtacccgcagtacctgctctaccgcatcctttttattctctgctgcatttttcagcacctggacaccctgtactcccatatagggagcgattggttttccggtctcatcgatcacaggcatagaggcgattcccacgtccattccgctttctcttactgtcgggatcagccagggaccggctatggttgcatgcgccattccttctttgaacagagtattcactgtggcgtactcggtctccccgggcatgagatccacgaactttttatgataggccagggcttcctctgtctccggcagatttaatcccggctctccggcatcattcaggatatagcctccgaatccattgatccagcctgccgcataataaggggtactatgctgttccacgaacccgtaatgtcctccacgggtattctcctgcatgtaagcatacagttcctctgtcgtagccggcacttcctcatccttcatgtagagacggttatacataaaaagtaaggtctcataatagataggaagctgatagaccgttcccttataagtcgccgcttcgatcgtgttatccatataggcatccagttcctctgccggaatgatatccgtgataggcgacagaatgtccatttctgcatagacacctatcttatcatgggcaaaaaagtacatatccggagctgccttaggatcatttcccaccattttgagagcttctgtcagatcactctttttctccagtactacgtggatctgcggctctaattgggcaaattcctcttccaggacctgcgttaccgcatcttccttgtcatgccagatggtgatcgtaacctctccgtccgtcttttcgccctgcgctgtctgctccaccgtctggctgccacagccggtcaggctgccaatggtcagtcctgctgtcacgatccatgcccatgctctgttccggattcttttctgatttttattcttcatatcctgcactcctttgatatgtactttcctgctgcttgtttttatatcttatttctgtgactttttctttgagactgctactgccgcgccacctgctgccaccactaccagcacgccgatcacgatgggtacgaccggagtggatttctctgtattctccgctgcttcgattgtcgcttccacagcttccgcaggctcttgtgttgccacagtttcgttcgtctcttccagcgcgatttcttcataagatacggtgtaatcctccggaccgtttatcgtaagccagatatccttaccggtctctacggaaatatccgttgtctgtacactgccttcattaccattgacgattatggaattcacccagccgggaatctcttttaccagccagcctccttcgccttcctctaatgcctctccgggccatgctgcaaatgcgttagtgccgtccggtgccgaccatgcccacagacagggaccgttccagtccgcaggagcagatacatggatcgtcacattgggaatttctgcctgatccggattcttatagctgaaatcgtagctgccgtcggctgctaccgttacccaaagctctgcgggatcaatggaaatatcttctgtctgtacagttccttcgttcgcattgacaatgatggaattgacccataccggaaccttgatgctgtaccagccatcttcacctgctttcatctcttccccgggccatgcagcaaaggcattggtgccatccggtgccgaccacgcccacaggcagggggcttcccaggaatcatctacttttgcatgtaccacaaatttctctacgtaagccggtgcctctccggtagtcctgctctcataagagatctctacggtgtccgctgcactcaccgtgatccatgctgcattggtatccagaatctgctcctcggtctgcacgctgccctcattggcattgacgatcacatgattcgcccatgcaggaagccagatataataccaaccgtcattagctgcatctgtttccatctcctcgccgggccatgctgtaaacgcattattgccgtcgctgtcccacgcccacacacaaggattttcccagtcctccggcacctgcacataaagcgcatttctctcttctgtattctgtgttgtttctgcatttgccgtcatcggcagaatcccgatcaccagcagaagcatcatcagaaatgatccacaacgtcttatcaccttacccataatatcctctctttccgattgtgttatattttcgtaactattcagaacccaatcgcaaaaccgctctttcagagctttccttttgctcatgtggttacttcgccaaagaaattttcaaaattatgctcattcatgcaagcatgattcgcaaatttgcgaaaattaccttggctctgaatagttacatattttctgtaacctttctgtcgtttcaaccgttttaaaaagtgcactttcccttgggttattttgattataacgttgctgtttccggatggtcaatttgattttgggtaatcgttttccctctgcattatttatttttcacagtttcatcctttcttttttggctgttattcacaaatattttttaggtttcctgcgttttcctaaatatttgtgaaagtttcacgaaaatgtttcctatgaagtacccattagaaacgtgcaccgcaaggcgcaaacataaaaggagatggaagtctttcgcttccatctcctttgaaaatacttttatgctatttttattactttttacttattcctacttattttgccttgggtgcgaacttttttctcagtacataccacagggcacctgcaatacatacagaggaataagcaccacagatgatacctaccatcaggggcagagcgaagtcacggatgctggtcacaccccaaatgtacaacgcgcctaccattaccagagtggtcagggaggtgaataagcttcgggacagtgtctgggtgatgctgtggtttacaacatcctgcagatcatccttcttggtcataactgccatattctcacgtacacgatcgaagattacaatggtggcattgattgagtaacctacgatggtcagcagacacgcgataaaggtattgctgacggatactcttgccagtgcgtagaaggtgatgactaccagcacatcgtgaagcagacaggcaatactgctgacaccgaaacggatatcgctgaaacggaagcggatatagatcagcatgcagatgattgctactactaccgccaggatcgtatcggacttcatctcgttactgatggtggagctgatggtctcagaggtgatcagtgtctcatccacaccaaaattatccacgaacatctgattcagtgcctgtctctgatccacatccagagaaccggtcttgaagataacttcattggagccctgtacggtctggatctgaactgcactgccggtggtgctctcgatcagaggtaccatctcgctgttgatctcttccagcgtatagctcttatcaaaagtgacagtagttgcagtaccgcccttgaactccaggctgtaattcagcgcatcgccggtgttcatcttgtagacacccatagtaataaatcctgcaaggatcactgccagagacagtccgaagaagattcccttcttgcctaagaagttcactgtcttgtgttccttacctacaccataccacttgggatcctttaatcccagtgcatagaaagctttcatgatatacttggtcactaccagtgcagtgaacatggataatacgataccaagtgccagcgtctgtgcaaagccctttacggtaccaggtcctagcagccacagcactgctgctgcgatcagggtagtcacattaccgtcgatgatagcggacagtgccttgtcataaccgatctgcatggcactcttaacagtcttgccggttgccagttcctcacggatacgggcaaatacgataacgttggcatccactgccataccgatggacaggatgatacctgcgataccggacagggtcagggtcatgtcaaagccgttcagcaaaagtactaccaatgctacataaatgcccagtgcaatgacagaagcaaatccgggcaggaaatatactgcgatcatgaaaacagccactacgataaatccgatcactgctgcttttaagctggtggagatggcttccacacccagctgtgcgccaactaccttggaatgcagctcttccagctccagcttcagtccaccgatacggatggtggaagccaggctctctgcctcttcataagagttcatgggagatatctgtgcattaccgtcggagaatacaccttttacggaaggaacacttacaaaggatccatcataatagatacccagggtctcgcccttctcgtaagcatttctggtagcctcttcaaactttttagtaccttcctccgtcattaccaggtctaccgcataggtggaattgcccatcgtctgatccttgatagagcctgcggtagcagtcttgacatccgtaccctccagcatgatggatccatctgccttcagttcatcgatggtcttattcagagcgtacgcatagcttgcattgccctgtgcatcggtcactgcctgcatagagtagttcgcattgccgtccttgtctgtctctgcaatgaaatacagggaaccgggacgtcccagctcttccaggatcttgttggcatctgttacaccggggatctcgatattgatacgatcggtaccctcctggtatacaatagcctctttactgtaattctcaacacgcttctgcagcttggcaatagtatctgccatatcagttgcatccggctcttcatcgcctaccacctgataagtgatgctgacaccaccggccagatccagtcccagactgatgtctgaagcactggcagttccttccgcatctacgccattaagatccacatagccgacacccagcaggaccagaagtgcgcagagcagaatgatgattgctttactttttttcatctttcctttgtcctttctattcttctgaagcttctgctgcttccgcagccttcagcatgatagcacattcgatacgttttctctgcagctcacagccgatgtcatacgcatcattgatattgccatggaaattataggagttcgcagcacatccgccgctgcaatagaacttggcaaaacacttcttacacttgtcctttgcatagacattacagcatttgaactcgtcacggatatcatctcttaccacaccggtatccacattgcccatgaggaacttctcgttacccacgaactggtggcagggatataagtctccccagggagtaaccgccaaatattcagtgccggatccgcagccggagagtctcttggctacgcaggggccgccctgcagatcgatcataaagtggaagaaattgaaagccttgccctctttcttacgcttgatcatttctactgccagtttatcgtattcttcctttaagattggaatatcctcttctctgatggcataatcatccgtaggctgtgccacaacgggctccacggagatctgcttgaatcccagatctgccagatgcagaacgtccttggagaaatccagattattgtgtgtaaatgtaccacgcacataatagttcatctggtctctgctctccgctaccttttggaacttgggaacaatgatgtcatagctgccctgcccgccgcggaaaggacgcatcttatcgttgatctccttacgtccatcgatactcagcacgatattacccatttccttattcacgaactccaggatctcatcatttaataagataccattggtagtcagggtaaaacggaactttttattgttgggtttctctaagcttctgccgtattctaccagctgctttaccacatcccagttcatcaggggttcgccgccgaagaaatccacttccaggttcacgcggttgccggaattggctaccaggaaatccagtgccttttttccgacctcaaaactcatcagcgctcttctgccgtggtactcaccctcttccgcaaaacaatatctgcaggcaaggttacagtcatgggcaatgtgcaggcacagtgccttgactacggtctggcgcttcttaaaatcaaaaatataattctcgtaaatatcgggagcaaacagctgtcctgccttctcaagctccagaacttcgtccaccgcttcggtgatttcttcctggggataggggatattcgcaagattcagtacagcggccttgatggtgtccgcatccttgataccttctgtcaccagaggctctaccagtgggatcatatcatacacaatatcatctacgacatgaacggaaccactgttcacatccataacgatattatagccgttgctcttatactggtgtatcacagttttattcctcttctttctacttcttattgcttaaaacacattaacattaactattcggaaccccattcgcaaaatcgtccttcggactttccttttgctcatgtggttacttcgccgtattttgccagacgtatcttcttacatatgcaagcatccgacgaagaatacgctgtcaaattcggctccgaatagttaacagagaataagcagcgacctgaatcgctgcttacgttagtctcttctcaatttcttagattatttaatcttttcacaactctgatttcctactgtgcaggaagtcttacatgcagactggcaggaagtctggcactcaccacagccgccctttttcatagattcctttaaatctctggttgttaaagtcttaatatgcttcattaaaaatagcctccttatgatttcaaagcgcctatagacgccggcgtgtatataaatatgcagacacgcgactcatttttgctcattatatcatgtatttggcatttgtaaaagctttttttctcaaaaaaccttaaaaaaagcggtaaaagtcattgttacctgcttttcaccctaacattccacccagcgttccccctgccacgcacaatatcatggtagtccagaaggaattgcccaatgcggtctccggtgtcctgatcagcactgacaccaccgccaggatcacaaaatatgccgctcccacgaaagctccccataggaatttctgcttttccattctctttcctgcaaggaagcccgctgtaaaagtagtgactacatagatggcggagatggctatcgtcactataccttccgtcagatgcagtttatacaataaaagtgccaacagacatagaagcagtaatgtcagcacataagataccagcaggcatttcgccagtgccagtaccggaattccttcttttccttctcctcttttttccatgtcatccctccttttacctatgtaaaatgtatattcaaagccttcagaaaacttgacaactattcctgtcctattgtatattgttgcttaataacacataaataaggcataagcctgctattttatttaagaaggagtgaacttttttggatacctctggtgtcatacaactgatttctattattgttcttattttcctgtccggctttttctcttccgccgagactgcactgtccacggtgaaccgtgtgcgaatgcgttctttggaggaggaaggcaacaagcgtgctgcacgcgtcaataaaattctggataattacagtaaaatgatcagtaccattctgatcggtaataacattgtaaatctgacagcatcttcccttgcaacaactttagctatgcgcattaatctggctgtaggtatcgcaacaggtattttaactattgtcgtattactctgcggcgagatcgtaccgaagacctgggcggttctgtgttctgaaaagctggcactaacctactgtaatatcatatacctgctgatgcaggtactcacaccggttattatcgtggtagacctgctctcccatggcatcatgaagctgttacatattgatccgaataaaaaagccagtgccatgacagaaagtgaactgaagacctatgtagatgtcagccacgaggatggcgtcattgaatccgaagagcgaaagctgatctacaatgtgtttgatttttccgatgctcatgccaaggacatcatgatccccaggatcaatatggtaacggtcagtcttgatgctacctatgatgatgtacttgcagtgttccgtgattccatgtacacacggcttccggtctatgaggatgataaagacaatattatcggtctcatcaacatcaaggactttatcctgacggaggatcagagtgctttccatgtgggaaatatcttaagagatgcttattatacttacgaatataaaaagattgccgatctgatgtacgagatgcgggaaaagaccacgaatgtctctttcgtattaaatgagtacggtgctaccgtaggtatgatcactttagaggatctattagaagaaatcgtcggcgagatccgtgatgaatatgacgaagatgaagaagaactgatccagaagatgtccgacgacacttatctggtagaaggcagtatgaaactagacgatattaacgatgctctcggtaccgatctgaccagtgaagactatgattccatcggcggtctgatcatcgactgtctggatcgtctgccggaggacggtgaggaagtcaccctggaaaacggtattcatctgaaagtacagggcatcgaccagaatcgtattgtaaaggtattgatgacgataccggaagttcccgaagaacatgatgccggcaccgccgagatttcggaagatcacgaatagcacacggacaatgctttcttctttgttgatccataagtaaggaaagggaaaatgatgtcacaggataaaaatacagaaaacaagaaaacaaaaataaaaatgacttccaaacagatcttcgcgattgcaggaatcgttgtgctggtgctgttgtatgtcgtaacactgttagcagcgatcttcgacagttccgccagccacgcattgttcgccacctgcctgttagccacggtagccattcctcttctcatttggatctacacctggatgttcgggaagctgacgaaccgctccaccttcgcagatttccatccggaggagaagaataaagacaagtaaattgaaagttacgagccatgcaaaaatagaacggaatacctcggtgggagcttgctcacacaagaggttatttcgttctatttttataccgtgcgtccaacggacacactcgacagccgtcaatgaaataaatgtggagcgccctttgcgacacatttatgaattgagtgcatggctcgtaacgtagggctgtcgtaaaccggacgaacgcccacggcggatggaacatcacgccttgaggtcgcgtctccggatgtgaattttctacgaaaagtgatgagtagttctcgtcatgacagggccgcctacagtcgacatccatgtcgactgtaggctgacgcggacatcgtgtccgctttccccctgtctttcagcacttttctagaaaatatcaacatcctccgacaaacatcttcgacatggcaccgcatgctccgggagttctgcgttttgaaatataaagttcccgtgttataccttccggttttcacaatttgggtatctgcaatagaataagcttcccataccctcaaactttccttagcgtgggtatcagcaacaaaacaagcttctcatacccacaagctttccacagtgtgggtatcagcagcgaaacaagcttctcatacccataaactattcacgttgaggcggaagaatgggtacagagaagcttgattctatctcctgtgcccacgttgaggcggaagaagggtacagagaagtttgttcctgtcacctgtgcccacgctgcggcggaagaagggtacagagaagcttgcccctgtcacctgtgcccacgctgcgacggaagaagggtacagagaagcttgcccctgtcacctgtgcccatactgcggcggaagaagggtacagagaagcttgcccctgtcacctgtgcccacgctgcggcggaagaaggggcacaggcggagtttgtcctgtctacgacgcccctacgttacgagccatgcacccaattcataaatgtgtcgcaaagggcgctccacatttatttcattgacggctgtcgagtgtgtccgttggacgcacggtataaagtcaaaaacaaaaacagcgacttgtgagcaagctcccagatcgctgtttctgttttgactttgcatggctcgtaaactctcaatttagcagtccacgccaagcttgcgcagttcctcttccgcctgctctttggtcaggaagtggatgccatggattccctgttcttcggcggcttcgacgttcttcaaggtatcatccaggaatacgctctcttctgccttcaatccataacgtttcaaaagcaattgatagatctccggttccggcttgatcagatgctccttgtaagacaggataccgccctccatctccggcaggaaattcaatgcgtctgcacactctacctcggccttgtgggaaaaattagacagataatacacatggtatccttttgcctttaattcctgtagccaagggattgcataggctctcggagttactattccggcaatactcgtaaacgcctgatacagctcttgctccagctgtggtgcatcttttacgaacgctgccagtacctgttcatccgtccaggtaccgcgatcatactctgcccatgccggatgcatcacggatgctttggcgatcttttgaatcatctccgcatcgaatcctttgtctgccagaaatccttcccagcgataatcagtcagtacatttccaatatcaaatattatattacgtatcatcttatcccgtctcctatctgtttgtacattctcttgcatacaccatctgcatcattaatatcggcctctttataccgtagcagctgccgcatccagttccatgatctcaagcagcttctccgccgccggcgccataggcattttcgtattccttacaacacagaactgtctcttcggtatcattttattgaacctgagttcaaaaagcagaccggattccacataatctctggcgaaatcccgcatcacacagcccacgccaagattccttctgacaaactgtacgatcatatcactggtggccaattcaaactccggctgcacatagacaccgttgcccgcaaggaattcatccatataacttctgctgctggtatttttctccagaaaaataaggggcaggctctccagttcctgaaaatccagcattttatttttatacccgaaaaatcttctcccggccacaaacacatcctcgatctcccgcacggggatcatctgaatatccggtctgtctggaaaaggagtgctgacgattccgaaatcaatccttccctctcttagagaattcagtgtctccggggtgggggcattggatacgattactttaatgccgggatacttctcatgaaatttttcaagatagggaagcagatagaactgcagtgtcatatcgctggcaccgatccggacttcacccagctccatattctgcatctggtggaccttcttcacccccagttcgatctgttcgtatccttttgccacataggaatataacaattctccctcaccggtcaggcgcacaccttttgccgcccggtggaaaagcgacacatccaaagtgttttccagctgcttgacagcctgactgaccgccggctgtgaaatggacagttcccctgctgccttcgtcacacttccgcattttgccacataataaaatactttatatgcctccaggttattgatcatagtgcctcccatcaatcccgcaaaccgctttgagaaaaaagggcataggctgcatcttctgccgcgccatgcccttttcctgcattactataaatcataagctcacgaattcgtgctatcgcactctacatcctgcttcgcagggtatttcgtattatactctatcattatttcttcagaggactctcacgataaatgatatcttctcttccgggaccgttgcttaccatggtgatagggaagccgatctgctcctcaatgaactctacatactttctgcagttctcaggcagatcctcgaattttctgatgccgcggatatcacaattccatccggggagcttcttcagtacgggtttagccttctccagcttgtaggttacagggaaatcagtggtcacttcaccatcgatctcatagcctacacatacagggatctcctccagatatcccagtgcatccagtacggtaaatgccacatcggtagcgccctgcagacgacagccgtacttggtagctacacagtcgaaccagcccatacgtctggggcgtccggtggtagcgccgaactcaccgccgtcaccgccgcggcggcgaagctcatctgcctcgtcaccgaagatctcggatacgaaagcgcctgctcctactgcggaagaatatgctttacttacggtaacgatctgcttgatctcataaggagggatacctgcaccaatagcaccgtatgctgccagggtggaggaagaagttaccatagggtagattccgtgatccggatccttcatggtacctaactgaccctctaacagaatggtcttgccttccttcagtgccttatccaggaatgcagatacatcgcatacgaaaggtgcgatcatgtcacgatactcatgcagggtatttaacagttctgcgggatcgatcagcggcttatgatacagatgctctaagatgacattcttcatctcgctgacgcgctgtaccttttcctctaacagttcgtcatcaaataactcacttacctggaaaccgatcttcgcatacttatcggaataaaaaggtgcaataccggacttggtggaaccgaaggacttgccacccagtctctcttcctcatactgatcaaataaaatatgataaggcattaccatctgtgcacggtcggataccagaatcttaggcatgggaacatttctgtctgtgatagacttgatctccttcataaggatgggaatgttcaatgccacaccgttaccgatcacgctggtggtatgattgtaaaatacaccggaaggaagagtgtgcagagcaaatttaccataattgttcacgatagtatgtcctgcatttgcgccgccctgaaaacgtacgataatgtccgctttctctgccatcatatctgtgatctttccttttccttcgtcgccccagttggctcctacaactgcctttaccatgttttcctccattctttatcacaattcgtgataaatctaactcaactctcttactcttttgagagaacaatgtttctctcacactgtctcttagtatacaacactttgtgatataagtaaaatcaatatttattatattttatataacctgtgattattgtgctccatcccagcaataggtacagagtttgcctcttccgatccccacagactcgatcatatcatccagtctctggaactgcagggtagtgaagttcagctgccttcctatcctgcctaccatttcttcatactccggcgtatccggatccacatagttcttcaggtcgatctgtctgtcttcctgctccatctccttgatcacacggcgggtgatcagatccatctcggaggaggatctggagaagttcagatacttacaaccgtataacaaggggggacatgccggacggatatgtacttccttcgcaccgctctggtataaaaattccgtcgtctctctcagctgtgtaccgcggacaatggaatcatcaatgagcaacaggctctgatcctggatcaggtcatgtaccggaattaatttcatcttggcgatcagatttctctgggtctgtatcgtcggcataaaagatctcggccaggtcggtgtatatttgatgaacggacgggagaaaggaatccccgaacggttcgcatatcccactgcatgggcggtaccggaatccggcacaccggctacgatatccggctttacatgatcacgctccgcgagcttcgcgccacactgataacgcattttttcaacactgatcccttcgtaagaggaagaaggatatccgtaatatacccacaaaaaggtacagattttcatgtcttttcccggctgtaccagcgtccgcacaccttccggtgtcaccacggcgatctctcccggtcccagttcacgtaccggctggtatccaagattcagataagcaaagctttcaaaggaaacacaatatgccccttcctttttgcccacggccacaggagtacgccccatcttatctctggccgcatagattcccttcggtgtcatgatcagaagcgtcatggaaccttcaatgatctcctgggcgtactgaatgccctctaccaggttatccttctgattcacgatggctgccaccaactccgtggcgttgatgtctccgccgctcatctccagaaaatgggaatgtccttttgcgaacagatcctttataatggcatcagtattattgatcttgccaaccgtggtgatggcataagttccgtgatgggaacgcaccatcagtggctgtggttcaaaatctgagatacatccgataccgagattgccccgcatttcattgacatccttgtcgaatttggtacgaaacggcgcattctcgatgttgtgaatggctctgttataaccttcctctttgctgtagactgccattccggcgcgtctggttcccagatgggaatgatagtctgttccgaaaaacagatcaaatacacagtcttcttttgctgcgactccaaaaaatccacccatttttatctatctcctgctctctctgatatttctccgcaacgcagaaaaccgccattggctctcctggtcaaatgacggatttctgtgatgatatgatttctatttatacattgatctctgcctttacgcccagaagatctttgttggcttccagaatcggatggatcacgttctttaagaatgcttccacctgttccttagaacgtccgatatacttagaaggatccatggatgccttcagttcctccagtcccatggggaatgcaggatctgcggcgatcagctctaacagattgttttcttttccttctaccttcacgttgcggcccgcctccatggacagctcacggatacgctcatgcagctcctgacggttgccgcctaactttacagcatccatcataatattctcggtagccatgaagggcagctcgctcatcatatgcttctcgatcactttcgggtatactaccagaccgtccacaacattcaggcacagatccaggatgccgtcgatggcaagaaagccttcgggaatggacagtctcttatttgcagagtcatccagcgttctctcgaaccactgggtagcggaagtgatcgcgggattcagtgcgtccaccatcacataacgggacagagacgcaatgcgctcacttctcatgggattacgcttatatgccattgcggaggaaccgatctgcttcttctcaaacggctcttccacttccttcaggtgctgtaacaggcggatatcattgctcatcttgtgtgcggatgctgcaatacctgccagtacgttggctactctggtatccacctttcgggaataggtctggccggatacgggatagcactccttgaagcccatcttggcagcgatcatgggatcgatcttatcgatggtctcctgatccccgttgaacagttccaggaaggatgcctgggttccggtggttcccttggagcctaacagcttcatggtacccaaaacatgatccagatcctccagatccagagagaactcctgcagccacaaggttgctctcttacctacagtcgtaggctgtgcaggctgaaaatgagtgaatgccagggtaggctgtgccttatacttatctgcgaagtcagccagctccttcatgacattgatcagcttttttctgactaacttcaaagcctctgtcatcacgataatatcggtgttgtcacccacataacaggaagttgcacccagatgaatgattccggctgccttggggcactgctgtccgtatgcatatacatggctcataacatcatgacgtaccagcttctcacgctcttttgccacatcataattaatgtcctctgcgtgtgccttcagttcctcgatctgctcatctgtgatgacgggtttcccgtcctgggacagtcccagctctttctccgtctctgccagtgcgatccacagttttctccatgtacggaatttcatatccggggagaaaatatactgcatctccttactggcgtagcgttcggataacgggctctgatatctgtctgtacctgtactcatttgtcttgctcctcttattttattctctctgattttattctctctttgtttttattttctacttgtcgaagtccccgcggatatcttccgcaggcggttccatagggtatttgccggtaaagcagcccttacagataccgagcttaccgcccaccagttcttccagtctctcgatcttcagatagtccagactgtctgtaccgatgaggtcactgatctccttcacagaacggttatatgcgatcagctggtctctcgccggaacatccgtaccgaaatagcagggccacagaaaaggcggtgagctgactctcatatggacctccttcgctcctgcctcccgcaacatcttcacgatacggtcggaggtggtgccgcggacaatggaatcatcgatcatgatgacacgcttgccttccacggcttcccggataggatttaacttgacctgtacactgctctctctgctcttctgcttcggcttgataaaagttctgcccacataggcatttttcacgaatcccataccataagggattccggactgcatggaatatcccatggcagcgcagttgccggactccggtacaccgatgacaagatccgcatccaccggggaatccatagccaggaactttcctgccaggatacgggaatcatacacgctgatcccatcgataaagctgtcaggtctggcgaaataaatatactcaaaaatacatcttgcggtatccgcaggcttcagcacatggctggtgtcggactcgatccccttctccggagatatggtcacgatctcaccgggtaacacatcccggacaaattcagctcctaccgtatccagagcgcaggtctcactggacagaaaataggtatggtctctcttaccgatacataacggcttaaaaccataagggtctctggcgccgatcagcttcctcggagacatcaccaccatggagtacgctcccttgatcttcgtcatggctctgcccaccgcttcctctacggatttggaattcagacgctctctggcaatatggtatgcaatgacctcggagtcaatggtggtctggaagatagcaccggtgtactctaactctctccgcaattccggagcattgatcagattaccgttatgtgccagtcccaaagtaccttttacataattcagtaccagaggctgtgcattttctctggtagaaccgcccgccgtggaatagcggacatgtcccacaccgatatccccctttaacttctcgaggtgttccggtgtaaatgcctcattgaccagtcccatatccttgctgcttaagactttccctttcggtccgtttgtatcgctgacggcgataccgcagctctcctgacctctgtgctgcaatgccagaagtccgtaatagatcgtagatgccacatcgtgtccgtcaaagtcgtacacaccgaagacaccgcattcttcctttaatttgtcgttattttctgtctggatataaatgttgtccgtcacttgtaagccttacctttcctgcctgcccccgcaaaaaggaataccccaaattattatttacagatcctttcctgtcagcatcttgtatgcctgaaggtatttgccgatggtcttctccacgatctcctccggcagtttccagcccttttcaggattggctttcagccagtcacgggcgaactgtttgtcaaaggaaggctggccatgtccgggctcatagccgtctaccggccagaaacgggagctgtcgggagtcagcacttcatctcccagtaccatattgccgttctcatccagaccgaattcgaacttggtatctgcaatgatgattcctttggtcaatgcgtaatccgcacactttttataaatagcgatggtataatcacgaagcttggcagcatattctgcaccctttccggggaaacgcttctccagatattccacactctgttcgtaggagatgttctcatcatgatctccgatctccgccttggtggaaggggtatagatgggctcaggaagcttatctgcctccttcagaccttccggaagcttgatgccgcatacggtaccgttcttcttgtagctttcccagccgcttccggtaatgtatccacgaacgatgcactcgatggggagcatgttcagcttcttgcacatcatgctgttgccgtcaaacttcggctgtctgaaaaattccggcatatccttaacatcagcggataccatatgattggggatcacatcctccgtcatatcaaaccagaattttgacatctgggtcaatacagttcctttcttcgttactgtgttgtccaagatcacatcaaagcagctgatacggtcagttgccaccatgatcagggtatctccgttgtcgtagatctcacgaactttgccttccttgatcggtttcatttcctgtacgctcataccatcagtcctcgcattcttatgtttttcagtcttttattgaaacaggtgtgggcaagatacacccacacctaatagataaacagatttgcgaaaaaaaatcaatatgtttttactgcaacttaccgataaattcccgaacccggacattttccgttgtaaaaagtgcttcgggagaaccttcctccacgatcacaccctgttccatgaaaataatgcggtcggatacttctctggcaaactgcatttcatgagtcacgatgatcatggtcatatgttcacttgccagctgtctgatcacctttaatacttctgccgtcaattccggatccagtgctgaagtcggctcatcgaagaacaggatcttaggctgcagtgccagtgccctggctatggatactctctgctgctgtccgccggacaactggtaaggataggcatctgccttatccgacagtcccaactgtgctaaaagcttctccgccctcgccacggcttctgtgcggcttaccttatccacatggatcggcgcatcgatgatatttttcatcaccgtataatggggaaaaaggttaaaattctggaataccagtccaaaacatttacggatattatgtaattccgccttcgatgcatattcgcactgtactctgccgtttttatccgttttctctgaagctgccgtctgccctaaatagatcagctcaccgccgtccattttttccaaaagcgttgcacagcgaagcagtgtggacttcccggaaccggagggaccgatgatggagaccacctctccctttttcacggtcagggagatatcccgtagcactccgtttccatcaaagctttttttcacatgattcatttctaagaggatttcgccgtctgtctgttccatatacgatactcctgtctgtcacctatctgtaataagatgtcttcttctccaggtattccatgaaggatgctacaacgagattaaagatataatagaatacacctgccgccagcaacggaaccacactggtctgtgctgctccgatctgcttcgcgactgtaaacatctccgcgatggaaatggtaaatgccatagaagtatccttgactaatgtgatagtctcattggtcaccggcggaagcacccgcttcaccacctgcggcagaatgatcttcacgaaagtctgtgccttactgtagcccagtacctgcgcagcctcatactgtcccaccggaatagattcgatccccgcacggtagatttccgcaaaatatgctgcatagttgatcacgaatgccacgatcaccgccgggaaacgataccccgttcccacgtgcatgcggaacacataaaagggtgcgaaatacaccacgatgatctgcagcatcagaggggttcctctcatgatggatatgtaaattttagaaataatgcggatcaccttacatcccgacattcttccgaaggctacgatcaacccaagaggaagggagaataaaagggtcagtacaaatatttccaccgttatcagaaagccctctgccagctgggcactcatggtcagcaaactcatgaaatctactccttaattatcctgacttacatcaattatcttttgttatttaccgaggcagacactgtcggtcagtccccacttttcagcgatctgtgtgaaagtaccgtctgctgccatctcatcgagggtcttctgcacggtattttttaactcatcgttaccctttaagaaaccaacggcgtactgctctactgccagcttgttgtcctcgccctgcagcataacgaacttccctgcttctctctgggcaatctggtactgtgccacaccgatatcgatagctacggcatctaccgcaccctgctccagatccatgaatgcagtgttataatccgcatactcgatcagctgtgcaaaggaatcacgaagtgcaatgttatcggtgttctcttcatcattcagtgcagccagtgcggaagaatccttctgtaccgctacaaccttgcctgccagctcttccttattctgtacaccggaagctgctgctacgacgaacacctggctgttatccacatagggctcggtccaggtgtaggcatcctctctgccgttcatggtgaacccgttccagatacagtcaatagttccggaagaaagctccatatcctttgcatcccaatcaatgggctgctttaccagttcccagccctgtctcttgcatacttccgctgccagatccaggtcaaagcctacatattctccattgtcatcacgatatccgtaagggggaaattccgcatcaaaacctacggtaaatgtcttatcagatcctttagaaccacagccggtaagaacacctgctgccatgctgatcgccaataatgccactaatactcttttcataatacatcctcccgttctgccactcactgttggccgcattgtatactttagcatggtaaattgctaacacggtgtcatagtaacataacgggagggtcttgtcaattctttatcggtcgtaacgctccaccatcgagagaatttcctttgcatatctggggtatgctgctgctacatccttcacttcgttcctggcggtctccgccacctcctggttgtaatccatctgtttgcggagcgcctgtcttctctgaatgagttcatgtcggatttccaccatttcgcgtttatccaaaagagctgccgtctgaccgatccagcgttccggcatctgtacccgatagttagacagctgttccaccagttgcttctggtaatattcgatcttggcttccgcctccgcgaactgtttccgttcttccttttcatcctggtacattttccacagcttttccagtctggctgcactgtccgtattatatttcagatacagatattccatcagctgacagttgttcacatacctgatctttactttgttctgcagctggatcagtttattgatggtcttctccacacgctgcaattccctgtcactgtccatgtatttgatacacacataggagattgccactgcgccggcgcctaccgccaggaaatatccaacataagtatccatttcaaatgcaaactgcagaacagctagcatgatcacgcacacgatcaatgccgtcaggaagatcaccgccattcccctctgattgttcatcagattctccagttcatttctgcgatattcataggcatgccgttctccatccagtcgatgcagatcctgtcgtaccagattgccgtatttttcgccttcccggatcttctgaatcccttcttcgatctcatcttctcttttacggatggcataataatccgcatctttcatccggtttttcttctcacgatatttactgcgttcctgttccagcgcagatattttacctgcggtacggttgatctcccctctctgctgtgcaggtaacgcctcaatctcttccatatccgtcaggtacgatgttaccagtgtatattccccggtgagcagatcgatctccctggaagcttccgctatctgctccaggcagttcacaatgtaacgtttccgctgatcttcctcttcaaaatttacaccgttacgtgtatagactaactgttcccagtcatcctcttccaccggttctgtttttttcttaaaaaagcgtttccaccacgccatagttttctcctgtccgttccagtcctgttatatactgacactcgtccgataactgtttttcaatgctgtgatgagtctctcattttccgcatcgtatttctgtctgtcatttgcgcgccattctcttcgcagtttcaactgccggaattccggctgctgttcccattctctcccgaattgttccatacttttctccagttccagagattctgtatagaattccgggttccgggccgcaaatgccacataagcatcttccgaaagctccatgcgttttgccgcaagataagcatccagatggcttctgtccggatccgcctgccatgcctcacgaaaatactctgctgccttctcataaagcatcagtccggtaagggccacgcctttattatgcaggatcgccgccctgacttttccggccgggagctctcttccttctctctccagatcactccaggtctccaatagcatatcatatccgcgaatggccgcggcatattttcttttttccaccatatagtcgatctggctcttacgtttctccaggttgctgagtccggatccctgcttcagcacctgtgcgactgcctgcagctcttcgtccccatagattcccacatactgcagaatcgtcagtacgaaagcactcagtgacccctgtttatgtaccatggggtacaattgctttgccagttctctgaccctgcattcctctccgatccagtccaccagtttatcattcatgatagacatatccagaagaaacgcattttccttcaggcaatagcacagttcctccatgcaatagacccggatctccagttcttctatattataggctgtctcacaatattcacctacacacagacttgccttcatttccattctcatctccgtccatcttcatctccggtcagagttcgatctcttccttccagatgtgatgtgttgcagcacgaaatgtgccaaatcccaaatcctccagttctaccttgaggtgtgtgtcatcccgcatttccacgctgatccgcaggcggatgattccctcctgtaattcttccggtacgattctggcgatccggttccccttgccggtcagggaagtgatcaggatctccacagctcgtccctccagcagatagaattccatggtatttttggcttcataccagttgattccggcatccagcaatgcctgataggattcctctccctgtctgagaaccttcattccgatattggatttgagtttatcttttcccagaaacacatgatttttaccggtttccccgggagtcagtctctccatcatgccataacaggcacccttgctgaacagattattgccctggaaaactctcctccccctacacagatagcgcagggattccttcatccagtcccgggaaaaagcttcaccgatcagatataccgaagatatcatctgattttcacacagttttttcgcgatctcctgcattttctcatcggattccggtaccgggaaaggaaattccctctcctccatatatgccactacaggtgtggtatgccggttgcattccatgcagtaggtacgtatggaagcatctccatattcgcataatatcgtcttatgccgccacagttcctccggctggtacagattatagtaataaaagctctccacatgactttggaagcagatctgatccgtcttcagatgaagtccctctgtggctgctgtcagcacttccaacatccgatgatccaattcttcgcaggtgatcatcagggcaccgatacgttccgtatttgtcacctgagataaaaggcccagacttcgtttcaggaaaagcgtcagcaacgcaaccggatcaatcggtgcaccgtcgatctgcaccggttctccgtccctggccagcttcaaaaggttctccaccagaattccttcttcctccccggcatatcgtattgcttcacttccgtaaaaccactggttgactccctgtctcttactgagcgccagcggaatggtatagaccgaagatcccgctacggaagacaatgttctgatctcttcctcactacccgtaacatagcagctgatctgcgcatatttgttgccaagatcatatccgacgattactttttcgcttcccggcagtcgcatcttccttccgcctcctctctgtggtctgtctgatcttacttcagagtgaacagtctgtgatccagatattctctgcggtaatattcctccagaagatgatccagtgtatcatcatcctgcagcgtcatactgatcatcatatcattgacaatctcgtatttactgtctggattatcattcatgatatcactcttctgtaagcttccgctctccgtcagttgttctccgtttgcggattcttccataatataatactgaatattctcaccaaaaaagagcacaaactctttgaaaaatactccactgtatacttcctgcatgtattccgacagataatcctctgcctgtccgttctcgtgcagcatcacataatgaattcttgcccggacaccgcctctggtatgatactccacaatggtcttgtcctttagttcctgcagctcgggaaggcagtccttatattcccggaaaaagttcagatgaatatgctctttcatcatttcctgcaggaagtcccggatcagcagctcatcttctctctccagcctgtctctgttctccgcatagaatttcagatatgccagtttacagattctctgtgtctcttccccccgcagatagcaattacggatttcatgaaaaatgtattcctccgtcagtttttctctgcagaagtaatcataagagctctggatcagaaccgcctcttcgatctcctgtccggctccctgagatacgtaatagcggaaaatatccagccgttctcccacaaatgcaccggaaaacaacatctgtaccagaattttctcactgagttcatagcagtctacttcaaaagatctggctgctttccagatatcacgcagctctttcgtcgttccctgtacataatgagacagatactccaaaacatttccgttgtattttcctctgcgaaaaacagacaatgccgccgcatataaggcaggttctccgtcatgtacggactgtgagatcagcgcatccgtcaggcgcagcaatattttggcttccgcaaaatacggtgtataccgttcgatccaccgatatgccttctcataattcccccgcagtatcaggaaacgcagtacggtctccctctgttccaccgtcagctgttctccatcaaactcctgcagatattcgtccaatgcctgcacatcatcggcatcaaaataagcctgcgccagctctaccgctattttatgccgcagcttcggctccacggcatcggatgccgcaagtcttgccatacgcattaactttgcggaaggcatagcttcttctcctctgtcattttgtgcaaaatacagatccagttccacagtatccggcacataatgttccaacagccgcagatattttccgggcaccaaaagcttctccagcgtgtattccacatttttcaggaatctgttcccataggcatcctcaaatgcaatggtataatcatttccgtagattgctacccatgagataccgttctgcagtaaagtctccgtcattttcaggttgcccggctgaccgacgatcaccttgcgtattctgttatcttccacccgtaccagatgtgcaaaaagaagacgggaaaggggctttgccattgtctccgtcacaatcgcgggtgtcaggaatccctgatacagcaccgccagatgtctgttaatgtgctgtttctgaatctgatcgatgacaaaacgttcgatacgcggttcgtaatgttcatacaattcttcgtattccgccctgtgtttcaacagatacgcatataaaaaggcactgtgttcgtaatccagattgttctggaacgagaaatacatcaatattaccttcggcagttccgttacggaatccatatctatcgaggccatataatattcatacagattggtgatccgcagatggctttccacacccttctcataccagccaaaagcatccgtaccggtcttgcctcctttgatcaacagactgcagatttcctgcaggatacgtacatcttcttttttcccatatacttttttcagaattctgcacaaaagcggcgaatattcccgcactctgcctgacagatacagaagctgttctaacaggctgtcactgattgcctcctgtctggcgccaaaatgcagcacctgcagttcaaatccgttcagtttccgcaacaatgcaggattgctgttcagaagtgccagtgcctccagatagatgaccggactggtacatccatactgatattgcttctccaggaacaaccattttccggaagcagaccggttatactcttccgacagatacaaaagcagccacgccacccgccatctggtcctgtcatagcgatagatctgctccacctgttccgccatctgcctggtatactggggatctctgtggatcagtgtcgtcagatacagataatatgcccacagatccccgccggcagctttctgttcctccagcatatccgctgcatgatccaggatccagccggcttcattgtatctctcttcggtgatcagaagttgtgcctgaaacagtctggccgatgcatcccgttcatccatagtcaccatacgttccaccaatttgccggtctctgccagccaggtacctgttccgatcttacgtaatctgaaatcctcataatatttcatgatctgtgctctgcactgcatatgactgtggtccgcatgccgcaccgccgtcatatcccccagctgtaccgtcaccgggatctccagcgacgtataagcattgtatatatagatcctgccgaaatttttaccgggcctgcatatactgctgtcgatatagaccgggagtctgcaccggtttcccagaaaatcgtcatcacttaatgtttctttttctgtgaagacaaactctccctcacattcgatctgtaaatcggtatatccccagccgtttctgacaatattcaggctgttctccgtcaccccgtaattaccttccgctctggaaagctttttcaccagttccttttcctctatcagaaactctatctgctgctttttattgatacagatcagaaattcctccacgttctgctcattgccctcataggcggacagcatgcgatagcagccataaaaatgttcatcattcccctggaacagacgccggaaatccggatcatagaataaccgtaccgcttccgcccagttacttttcgccagattagcaaaatgaaacagattccttatggtaccgatggaagaattcaatacgccatgctccacggtcaccacgaaaggcagattgtattctcccctgttgctgactacagaaaaagagcccttcaccacatccccttcctccagattctctccatggaagcaataaaaaatttctgcatcggagccggtaaactggtctgttatgcattccatcagcagatggtccgatattacagatccttttacatagccttccgatgcagaaaggatgtgaaaagagccttcgtacgctgttccctgagacagggaaatctctattttagagcaggagaattccaaagaaccattctcataatcgaagtttcctcctaaaattctatcaagtatctcctgcatgtaccttcacccgttccctgttgtcaatttggatttattataccaaatttcgtacgtaagggcaaggtgccatacctgttagtccaggtttaattttttattcataatgtaataagatactccgtacatgatcgctgccaggagcaggctggtgatcacattaatatcatagaccgaattggcactcaccgagattccactctgactgctcatgacatttgtaccaaacatgaaagcactctgtaccgtgctgccgatgatggaagacaggatcgtcactcccgcataggccaggattcccatgaaccctttatgtttagaagacagctgaccgatcgtcagggctccgaacagagtgaccatagtaatgaaaggtcctactacataggttaagagcagcgtgatcccataatgcagcagattgattcccatctcgtcttcatatgctctgccaatctcataaaaagcatccgtcaggaattcccagatattcccattatattgtgtcattacactactcagttcaccaacatttaaaagtcctgtcatcaaagacacgaccagtgccatcactgagataccaatgcctatcgtaaggaacagataccaggcaccggagaccagtaccttgcttaagaacagttggtttgccgtcaccggcagagtatgggacagatagccttcatccgtatacatgctgcggtaaaaacggattcccaggaagatcagcatgccccaggtagacgccaacagcatgatcacatacaggatcagtgttgccacaaaggaagagactacaaaccagctctgtgccgcatttatatcattgccgtccgcaatctccgctaccagccctcccggcatgcgtaataccacgcagccgatcacggtgactacaaacattcccagaagcatcagtgtacctgctctccagatatttttccattcatatttcatcaactttcctaacatgcgaatacctccctgaagtaagcatctacagacttacccttctcttctctgatattgtcaacggatgtatataacaccaattgaccgtagcgcatgaagatcacttcatccagcacctgctccacatcctcgatcaggtgagtggagatcaacacggtagcttccggattgtagttgttgatgatggtgcgcaggatgtaatctctcgctgccggatccacaccggcaatcggctcatcgagaatatacaggctggcattccggctcatcaccaggatcagctgtaccttttcttttgtacctttggataaggtccgcatcttcaccgtggggtcgattccaaggctttttaacatttcttctgcacgttccctggaaaagtccgcataaaagtcctgaaaataatccaggatctcccggatcgtctgattcatagtcaggtatgtgcggtccgggagataggccaccttactcttagtcgccggtcccacgttattgccatcgatcagaatagttccttccgtcggtgtcagcagaccgttcagtattttgatcagggtcgtcttaccacttccgttgggtcccagcagaccaatgatcttccccttgggaagacttacggtcagatgattcacggccacattggtgccgtatttcttggttaagttcacgatttccaccaaattattcatttattttccgcctctcttgattatttaccggaatccccggtctctcaggactgcattttagccaagagctctctgatctccccggtgtcataccccagctcctgcatattgtctataaagttcctcatatgaccagctgccagcttctccctcgtattggagatcagttccgtattctccgtaaccgttctgccgctggtcctctgcgtcatgatcagaccactccgctccagttccgcaaatgccttctgcatcgtgttcggattcaccgctgccaccgccgccagatcacggacgctggggagcttctctcccggctgatattttccggatacgatttcccgctggatccgttctaccagttgcgcatagattggcctgtcagcatctaattcccacgccattcctatcatcctttcttaataattttcatttcgtttttactttttcatatctattgttttgttgtattatttgtataatacaatagtacgacattctttgcatcctgtcaagaggattttcttttataacagtctgggaaaattgctttcaaaaaacaggaactcccggtcggaagcagtatctgcctccagccgggagttcttgaatttaccgatattgaaacaatgaacagatcatttccagattgctgtcaggacatgttctcctgtcatttggacaacggtatctgcggtgatcgtctgtccgctgtattcccagccggcaaagatgcttccttctttgaccggttccggaagtgtgccataggtctcaccgaaagtcacctgcttggattccgtgaccgcaccgtctgcatccgtgccaccgtcatagtcaaatttcactgtgaactgtgccggtatccaatgcgcggtcaatgtcatatcgcccgtaactttttccgactggaaataccataacaccgtctcgccttccttttccgtataccatccgtcaaaggtgtatccgggcttgtaaggtgtctccggctccgtaatgaactcgccgtagcggatcttctgtgcgggcacttcgcttccgccatccgtatcgtacataatgttgaatccaccgcgtaccgcgaagaaaatgatcattcccacgatcaccacgatcaaaacaccgatcaggccgtccaaaatgcggatggggacatccttgcttccgtagataccgcggccgaaccattttcccttcgggcggaccgcctcctgcgtctgtcccgccatttctgacgatgcggtgacctctgctgccttttcttctgtattctctgctgtcacttgttcctgattcataatctttccttttcctaatctgacataagcaatttcttcatgctcatattattttactccccacatagaaaacatcctttgcctgcaagcagtcacggatgttttctatgggtgagtcttatgtcattactttcttaccagatactttctcatatcgatcgcacaggcaaccagaatgataagtcccttgatcacatactgcatgttcatgttgatggacaggaagttcagtgctacgaagatgattcttaagaggaatacacccagtacaacaccgctgatcttaccggtaccacctacaaaggatacaccaccgataacgcaggctgcaatagcatcacactcatagttcagaccggtgttggcggtattggaaccgatacgggaggactcgatgaaaccggtcagaccgtacatagcacctgccagagtatgcaccagaatggtagtacgcattacgttaacaccggataccttcgctgcttccggattggaaccgactgcgaacatattcttaccgaaggttgtcttgttccagatgaaccacataatgataacaatgacagctgccagccatacatagttgggaatggcgattcttgctccgccggcattaaaggatactacgcttccttttaccacatcattgaaatgctgatccagaccggacagaggctggccgttattgccgttgatcatgatatacattaacagtaaaccatatacgatcagctgggtagccagagttacgatgaagggatgtaactggaacttcgccacgaagaatccattgacccatcctacgataccaccgaccaacagtacgatcaggatcaccagagggatcggaagtaccggaaggttcgggaacatcttggtcgcataggttacggactgcatcagggatgcggtaatacatgcggtaagtcctaccacacgtcctgcggacaggtcagtaccggtcaatacgatacatcccgcaataccacaggcaatgggaaggttcgctgcggacaggctgataatgttgacaatggaagccgccgacaggaaattggagttctggatgtaagtgtaaataattgctacgatcagcaggatgtacaacgcattgttcagtaaaaactctttccaataagttttcttgtccttgctgtccagcttcttataatctgcaaaattttgctttacgccgttaattttattttgaattgctttgccgggattcatacgcatatcctcctatacatattttgcagcaagagacatgatctcttcctgtgtcgtatttttggcatctacttctcctgccagtctgccgccgctcatgacaagtattctgtcacacacacccagcagctccggcatctccgaagataccatcaggacaactttgcccttgttcgccagatcgatgatcagctggtagatctcatattttgcacctacgtcgatacctctggtaggttcatccagcatcagcacctcaggctctgtgagaagccatctgccgaggataaccttctgctggttaccaccggacaatgaccggatcttcgtcttctgagaaggtgtcttgatgtgcatggcatcaatagcccatgcggtgtccttctccatggatttatcactcagataaaatcctgctctcttatgcttcttcagactggagatcaccgtattctcccggatattcaggataccgaaaataccggtagcacgacgttcctctgtcagaagtgcaaagccgtttttaatggattctctggcattgcggttcttcacttctttgccgtctaatttgatcagaccgtctttcctggtagcaacgccgaagatattctccagagtctccgttctgccgcttccgtccagtccggccagacccacgatctcaccctttctggccttaaaggacacatcctgcaacagagaataccttgcagtcagatgctccacttccaatgccacttctccgggtttgttcgtcttgggagggaactgattggtcagctcacgtcctaccatgagtctgatgatcttatctgtggtcaattcttcagcaggctccgttgcgatccaggtaccgtcacgcatgacggttacttcatctgcgatcctaaggatctctgccattttgtgggagatataaataataccgcatcctctgtcacgaagcatgttgatgatcttaaacagatgctccacttcttcttccgtcagggatgaagtaggttcgtcgaatacaatgatcttactgttataggataccgccttggcgatctcaaccatctgcctttgtgataccggcatcgtactcataattctcttggggtctactgcgatccccagttcttcaaaaatcttattggtgtcttccagcattttatgctcgttgaccataatacctgctgtcatgggataacggcccagccagatattatccatgacatttctcttcagtgcctggttcagttcctgatgaaccatggccactccgttattcaatgcttctctggaatttttgaaattaacttccttgccttccagttcaatctttcctgcatccttactgtagataccgaacagacacttcatcaaggtggatttaccggcgccattctctcccatcagcgcgtgtaccgttcccttttttacggtcagggatacatgatccagtgcctttacgccggggaattccttgcatatgtctgtcatctgaagcaatacttcctgtcccatacgcatcctcctatacataaagagcagctgctgcccgatgcagcagccgctctttttatttacttgttattcagatcattctccggtataagtagcgtaagggatgtaaatcttgttgctaaccttctcagagatattgaagctgtcggtatctgccatcagctccttaccggactggatattcttagccaggtaagcaataccgtttgccataccttctgcatcctgcttgatggtaccggtcatcttgccatctgcgatcagctgcttagctgcgtcagttgcgtcaacaccgaatacaggaatggtggtgcagctgccgtcgcctaagttgtagcccttgtcattcagagcggagataacgccttcagccataccgtcgttgttgcagattaccagctcgatcatgttaccagcggactcattgtactgagacaggttggtagtcatgtagttgttagctgcggttgcggaccagttaccgtcctggtcaacctggtacttatcagtattggatgcatcgaagtactccagagcgggcttgcctgctgcggtgatcactgcgtctgcatcttctacgccgtactgggtacgatagattgcttctacgttacctaactgacccatgaacattgcgtagctgatcttgccgtcgccgtttaagtcgatagcatcaaagttatctactacgtactggcctaccatcttaccctgcatatgacctgcttcgggagcatcggttcctacgaatgcacacttgtcatagctgcctaataccttaccttcatcctcatcggactcaaccgcacggttgaagaagataacagggattcctgctgcgcttgccttgtcaacgatagcctgggaagcgtctacggaaccggatgtaacgatgttaacgatcagaaggttggtaccctgtgcaatagcggtatcgatctgttcgttctgggtggtctggttactgttgccgtcgtaattctggaacttgatacctgcttcggtaagtgcgctgtccagtgcggtacgtacgctggagatgtaagtatcactgtaagtataatagaatacacctacgttcagctctccgccgttctttccgccgtcttttccgcacgctacgaggctgagcatcataatgccgaccaacagtagtgacatgatctttttcatacaaaaatacctccttgttttgatgaaattgtatgtgtttcatctcttgatgaggtaattatatgtcaggttgtacaaaaaaagatatgcaaaatcttacgcaaggggtaagaaattatactattctgtacatattttgttcatgctttgtacatatttttacactttgcttatcgttatcgtaagattttgcacaggatcaataaccttcctcttcaaaagaaaacaatatcttctgactctccggttcatacatattctctctggtgacaatggtcgtggcagtatccaccacgctgggaccgcctgtctgtccgttcatcagattggctgctgtctccactccgagatatcccatagcatatggattctgtacgatcagggcatctacttctccggtctccagcattcccacagagaccacattggaatcaaaagccaccacctggatcctgtctgcccggttcagatcccggatcgcccagcctactccgagactggtccattcattaaaggtcaccaccacattgatcctggaatcggacaatagcatttccttggctcccgctctggcatcttccgtggtggagagcacattgatcgtggttatatttttgaccctcggatcctgctccaccgtctgccggaagccaagctctctctgttgtccgttagcggaattcacatcatagttcacaataccgatatataattcctcatcatcagtggcaagcgctgcttccgctgcctttatccctgcctggagattgttggttccgatacggcagctgacctgactgctgttcacatcactatcgatcacgatgatcttgatccctctctgtgccgcctgatcaatgatctcggcattggcattataatccacggcagaaaatatgatcacgtccacaccgtcatccattgcccggcgtaccatctcattctgcgtttcataatcttcctccgccgccggcccatcaaaagatatattaatattgtactccgtggctgctgctccggctccggcaaaaacgcttttccaaaaagcactttctgtagatttaacgatcattgcgacctgtgtcttctgcgtctccgcttcttgtccacagccacacagcccggctgccaggattcccgcaagcagcagggacagtattttcttccttatcttatttctcataccttctcccatcctgccgctgcattttcttctactttaggcatccgtatcgtaacacaggttcccacatccagttcactttcaatggacagtccatactcttttccgaaatatattttgatcctgtcgtttacatttttaataccgataccggaattgtcccccggctccttatgcagaatggatctgcactgttcttccgacatacctaccccattgtcttccacccggaaaataacatcctcaccttcactgtagatccggatctggatatgtccctcatccaccatgcggtccaacccatgatatatcgcattctcaatgatcggctgtaatgtgatcttattgcaataatactgcagacagtcttcttctatctggaagtcataggaaaactggttcttataccggaagttctggatcttcagataactcctcgcatgttccacctctttttgaatcgtgatcagctcatgtcctttgctgatactgatacggaacagcttggccaatgcgttgaccatctccacggcatcctgacatctttcttcttcacacagccagccgatggcatccagtgtgttatataagaaatgaggattgatctgtgcctgcaatgctttcagttctgttttccgcagagatatttcctcctgacggacctgattcatcaatttttggatttttcgtaccatgtgctcataggactgggatagtgcctcgatctccatagtcccttccaccggacgataaacatatcccgctgcatccttttcaaactctcccatagcccggatcaggcgctgcaccgggttcgtcaccagtctggagaccagaaagcttaccaacattgtcaccagcaaaataatggtaagcattacgcagatattgcccaaaagttccatttccttggctgtcaccagttcgctgatataactgactcccacaaccttccagtcacaattatccagagacctcacgctgcagatcaggtcatctgtctcaaaagaaccgttgctgctcagatccagtccggcggttgcctcttttttcagcccggaatataatagctgttgctgtggatgatagataatctctccgttgctgtccgtaataaagcaataaccatgttgtccgattcccacgttatccacataatccgatattttagagaagcggatatcaatgacaacccgcatcctctgtccgtctgccccggtaagttcctgaagcaccgataccacccaggggtaatagtcctgcagaagagactccacatgcggttccgacaaataaagcacgtccggattgtaagaatccagtgcaatataagacagatctttcagataatgctccttcagagtatgcgtccccgtataggaatccgcaagctgtcccttcgcatcatagatatagacagccacgagatccgagcgtacatcgcaaagcgtctccagagtctggtcggattttcctccgctctttgtcagattcttttcaatcaggctcatgatctcctgcatgtccccgatatagttggagatcgcattggatgcctgtgtcaccgcctgttcactgctggtctgtgctgcctgtttcatactggatacatacagtgataaaaagaaaaaggtagaccacagtaaaaaaagtgtaaccagtccaaccaccaatatcgtaatgataaaagaaagtgatgctttccgttttttcataatgattctttctcctgacgcatggcattgggagacattccgcaatattttttaaagcaataactaaaataatgctgatcgctgtagccgcagcgttccgcgatctccctcattttcattgcgctgcccagtaccagctctctcgccgtctcgatccgttttttggtcagcaggtctacgaagctggctccggtctcctttttgatcagtgcgcttagatagttcggacttacatgaatgttgttgctgacacccaccaaagacagcgtcggatcaccataatccctttcgatgatctgcattgccttctcacacaggatctggctgctttttttcttgccggcgttgatcagctcccagacctccagacataaggacgtaaaacggtcttttacctctcgcaccggaccctccagcatggcaaaccgctggaacagggcgctgtcatccgtcacggtataagctatacggatgagtgccgatgacattctgaaaatcataaacttgcattttaactgagcatcctgttccgactccagtttttcaaaaacagttttcagatactgctccagttctgtgcgggaaccgcttcggatcagattctccatctgcaccacgtattccgaagccatttccatatccatggagttgtcccgttcctcatccgcgatataatggatcccgctctctcccggtttgcaatatcccagtgcactcatggctccgtggtatgcctcgtgacattctcccagacgctctctgatacggctgacaccaatgtggcaatgcatgttcaaaatacgttccgtactctgtaccatctcaccgactgcaatatgaagatatttttcaaacgtggtcctcgtagccgccagtatcgttatgatccgcccatccatggcaaagctgtaatgcttcatatatttttgcaggatcatatcagccgaatgtgcgagctccggccgggtgcagttctgtccgtctctgtcttccaccgagattgccagtacagcatactcaaacgagttattccggtccttcaggaatccattcgcgatcgcctgttcgatcaacttctcttctctctctccactgtcgaaatttacataatcatccaatagcagcggtagaaaaaactgctgaagattgggattatcattttttctggtgtcaaattccgcaaaaatgccatcgatcttaagcttgatcttcttcagttcttccgtcagatccgccatagtaatgggcttcagcatataactgataatgttgtactgaatggcctgttgtgcataggaaaattcatcaaatccgcttaagaaagcaatctgtgtggtaggccgcacctctctgacctgtctggccagttcaatccccgacacaaagggcatccggatatccgtcagtaaaagatccggttccatccgctccaccagctccaatgcttcgataccgttttcagcttctcccaccacacggaacccagtactttcccaatcaattttccgtataatcgctctgcgtaattcttcttcatcatctgcaactacaatcgtatacataggtaacctcactgttttattttaaagtaagtatctgcgcggaaaatgcgatcggaagagaaatcttccgtgccgtgttttctcccaaaaacaagatttccgcgattctgccgtctcctgatatgatctcaccggttccgtatttccgatgctgcaccttacaaccggtaacacatgcctcaatacatttttccacctcctgcgcagacaattgctgtacttttttctgtacatttttatgtatgtttttctgtgctttttccggaaggatctgtcgctccttcggctttttcaacacttccccggaaaacacagaagtcatattcggtccaaaagtaaatatataaagctgttcctttgcacgagtcatccctacataataaagccttctctcttcttcgtaggcatttgcctccggagagtccggtctgcatcctccgggcgggatcgctgccggcagtactccggccagcatatccgccagatagacccttgtatattctaatcctttgctggaatggatcgtcgacaggataaatttgctctccggatcgccacatccttcccggatcatctcctgcaatttctgtaatctcttcgggaaatcaaacagactctcctcccggtctcccagtactttcaagatctctgctttaccactgtccataccgtggctatccatgaattcctgatatcccatataattcaggatccggtagatcgccctgcctgccgtctcatacctcatattgtccaggtgcgttgccagcgccctgcactgttttctggtataaacggacacatcctcctgctctgcgaccatatccagcaatgtcagtctcccggtattggcatcaaccgcttccattgccgcctttttgctgattccggcacccattttataataaatcctcaaaaaagtctccccgtcccatgggtccagtgacaaatgaataaaatcacagatatcgttcacgacaggatgtgagaaaaaggtcatatccgtatttttcacccgataagacagaccctttcgttccaacatatcaatgatgggaagtgcactctcattgttccggtacagtaccgctgtctcctgttcacagtcctccgcaactttcagcagatagttatattgtccctgtctggacactgccctgatctccatgacacagccaccggctgctctggctgcggtcatggtcttcgcatggcggttccgatttttctgtatcagttgatccgctgcccggacgatctcctgtctgctgcggtaattcgtctccataagcagcagctgcgccccgggatgtctgctttcgaattccaccagtgcccttggatatgccgcccggaacccgtaaatactctgatcttcatcccccaccatgaacagatttctgctttttgtcgccagcagatccatcatatcatgctgtatcttcgaagtatcctgtgcctcatccacacagaaatactgatatttttctctgaaatacgcaagcacctccggatactgttcgagaatccgcagagcatagatcatctgatcatcataatctatcatttgcatctgtctgagtttcgcattatacgcccgaaaaatctccgggaacttttccacttccgtatccatattgcggatttcttccggtgtcagacgcatatttttcgcgtaagtgatctccagctgtgtttctttgatatcgttttccgtagcatactttccggtcacttcccaaaaggactgcttaaccgcggtggaagcttctttatctgccacctgaaatggtgtcttctgcgtccggtatgcaaaatactgcaatactttctgagaaattccgttaatcgtacggaattccaatcgctttgcatcttcctccccgaatattttagcaaatcttctgcgcatatcctcggtggccgccacagtataagttacggtcagaatggattccggccggatccccagacaatagatcatatatcccagtctgctgaccagcacggtagtctttccgctgccgggtaccgcaagcagcaacaccgggccgtccactgcctgcactgcccgaagctgttgttcattcaattgaatgttatatttttccgtaaaatcagtgaagttcaatgtcgcaccctgccttcatgggtttcccatccaagattgcctcccgaagaataccgtcatctccgtaggacaattttaaggagaaaaatggccggttctctcgcagtaaccggaagaaaatcttgtctccctcccaaagattcaattcttctattctgtccatatcgacccattccaaggtgccttcatcacattccacaggagttcctgagaatccatccgccgtatagagacacatatactcgtattcctcaccgcatacaaatgtgatcaggcctcgaaaccggtaagaagtcagtgtatatcccgtctcttcttttacttccctgagcacacattcctctgggctttcccctgcctcaaaatgaccgcctactccaatccacttatccttatttatgtcattttcttttttcactcgatgaagcatcagatacctgccgccctgctctatatagcaaagcgtcgtaagattactgcccttctgttgtatacccatcaaagttctctccctcacaaatgtcatattaaagatagtataacagattccgggtgggcacacaaatagaatgttgagagttacgagccatgaaaagtcaaaacggaaacagcgatctgggagcttgctcacaagtcgctgtttttgtttttgactatatacggcgacagccgtcaatgaaataaatgtggagcgccttttgcgacacatttatgaattgagtgcatggctcgtaacgtagggttgccataaaatccacgcagaaagggctgcccgacccggactcggatgctagctacaactgtggattttctaaaggaaagtggccaagtgtttctcatcatgacggggccgcctttacgttgccatccatgtgcacaaaaagccatgcaggcatggcttggctaacgcgaacatcgtgttcgcgttgcccctgcggttcaaccactttccaagaaaatctcacagtctccgccgcatctacgcccgagggagcagtccttttctgctggaaaccttctgcctcagcatgggcgttctgtgttttgggtctatacagaaaaaatgagttgtgagatactaaatttgctacaaataacgcataaaaagatgactatgggtctataggaaaaaaactggctctgagatactcattttgaagaaattgagtatctggcaggcgaagttttcgctataggcccatattgtttcgtttttgttttttacccgttccaaaaagtacctacagggaaatttatcttctatagacccacgaagattttagatcaactatttcactaactttcaattttctacacatccggttctgagatgcgtgtgactcccacatagatatccgatatttcaaaccatgtaggataatcgacgataccggtctgcggaagatgaaatattttttggaacatcctgactgcttccgcagtatcaggtccatagataccgtccgggatcagagtagggatcgccggataatttctggcaatccggttcaactgctgttgcagttgacggactttttccccggaagacccaatggtcaggtcataccccggccaggaagacggcactcccgatataatatccgcagaattgatgtacatatcattaccgtaataataatgaatgatatcaatggcggaatatccctgctccgccaacgactgagatccccactgactaagtccccggcaggtagtccggttgccgtcacagtatgatgtgaaaataggctgccgtacaccaggtcttgataaataattggtaaaaatggaatctaccagataatcgatctcttcaaacacatttctgccatagatccatttttggtcatatgccgtagaagatgttattgtaaagtcatatccttttcccctataccactctgtaaatacacgatttagcgtaaacgactggatcaccagtatatttgcatagatcgcactttccgaccaggtcggataaatctcgctggaagctacatttttaatataatccttatagcgtacccagtaatttctggcagtgggatcctccgggtcgccatcatgtacgatcacgtattccggaatgaccacgcggcttaagacaatctcccctgtctcgttcataggcttgatctcttcttccggaatcttagggggatattctccaaacaaggtatgtggcgggatcaccaccaccttctcctcctcttctgttacatccaatggattcattcgtatcggttgtaatgaatatgcacctgccagaatctcagagccggataccaataccgtttcaaagccttctgccgtcacttgaatgttatactcagaataaggctgctccgtaatatcaggagtcagagaaagctctctgggcggtgctttcagattgatctccggggtctgccccgattcatcggtagtaagtgtctctatcggagaatccggatctccggtataagaaatggtgaccgtagcaccggggatcggtgacatccccagtgcagagacaacactgatctgtagtgtccctgtataagtagtatccttaacatccatggacatgcgtcctttctgcctatcccgtaccacatcgtcctcgtatgttcggtcaggcaataaatcttccttacagaatatgctccgttatgcgaagatgtgcttaaatgctagctattcaaagccatataaatatgattgcatgaatttctgaataactaccataatttttctaacaaaaagcaggaactatgacttatgcaaaaacactcatcacagttcctgttctatttattgtccttcgccggaccctctgcgtaatttatttcgtcagcagcatcataatgtcattgcttcttgccacgaacttggtcatggcatctgcatccagaggggcatgctggagtttagccagatcatacagctgctcgcagatcatttctgcattctcgccgtcctggtgttcagtaatgtactgtaccagaggatggttggcattcaggatcagggtctcgccctcgccgccgaaagcactcatatccatgccgggcatggagtacatcttcatcatatcctgcatacgtctgctctcttcggacagcgtgatcatagaagagatcttcttgttcttcagcttctctaccttgatcgtgatcttgtcattcttcagagccttcttcatcagcttgctgatgctctcagcctgctcttccatctctttttcagccttcttggaagtcttggacttcagggcatcggtcacatccgcatcgatacgctggaacttgattccctcgttcttccgctccaactgggagatgaagggctgatcgatattgttggtcaggatcacagcatccatcttggcagccttgaacatattgatgtactggctctgctgctgttcatccgttacatagtagatgatcttctccttcttctcttcctcggtattctcctcggaagccccatcttccgccttgtcctctacgacttcggcttctaccttgttgccgttctcgtctacggcattctccttgttctcttcctcatcctgaggcttgatctccaggcactccggcagagtcagatacttgccgtccagattcttgaagaggatgtaatcattcatcttctcacagaacttgtcatccttcagacaaccgaatttgatgaagggactgatatcatcccagtacttgtcgtactcttccttgtcggtcttgcacataccggccagcttgtccgctaccttcttggtaatgtactcggcgatcttcttgacaaatccgtcgttctgcaatgcacttctggatacattcagcggcagatccggacagtcgatgacaccctttaacaacagcaggaactctggaatgacttccttgatattatctgcgataaatacctgattgttgtacagcttgatggtaccctcgatggactcatactccatattgatcttcggaaagtacagaatacccttcagattgaaaggataatccatgttcaggtggatccagaacagaggctccttgtaatcctggaataccttgcggtagaagtccagatactcttccttggtgcactcgttggggtgcttggtccacagaggctgtgtctcgttgatcagttcgggacgctttctgatcttcagcttcttgggctcttctgctgcctcggcttctacattctcgccctctgttttttccttcttctccggctcgatctcttcgaggacttcatcatcgggaagcttttcctcttccttgatgatctgggtctccttggtgttcgccttggacagatagatctccgtaggcatgaaggaacaatacttcttcactacctcacgagccttatactcattacagaactccaggcaatcctcatttaagaacagagtgatagtcgtaccgacatcggtcttgtctccgtcttccatggagaactcggtgccgccgtcacactcccagtgtactgccttggcgccatccttgtaagataacgtatcaatatgtacttcatccgctaccatgaatgcggaatagaagcccagtccgaaatgaccgatgatctggtcggaattgctcttgtccttatatttctcaatgaaatccgtagcaccggaaaatgcgatctggttgatatactcttccacttcgtcggcggtcatacccagaccgttatccttgaaggtcagtgtcttcttctcaggatccacgatgacatccacacgtcccttataaccttcgggaagagaatattctcccatcatgtccagctttttcagcttggtcacagcatcgcagccgttagagatcagctctctgtagaaaatgtcgtgatcggaatacaaccactttttaataatcggaaaaatgttttcactgttgattgataagctaccgctttttgctgccatttttaccacatccttttctataattgcacagtcatggctgactgttatctaactgattctaagtgtaggactgcaaaaataaaaagtcaagacaaatttagcactcatttcaaatgagtgctaacaatctgtcaaaaacccagtatttatcagtgtttccacaattctaaaattttaataaagcatatggtgatcctaagaattactcctccggaaaatactttgcatacacatcaaaaaagttatccgtggtcacctgttcgtccgtgatcagggtaatctcatcccacagtttgtcattgagctgacgcaccagcgtattcacgaagctgtcatactcctgtccgaagacttcccttttccgttcctctacaatcttaagcttattggcatcggtttcttctctgtccagggtattggtacatttgataatataataccctctttcgcactggatcacctggctcacttcatccgttgccagattgaatgctgcttcctcgtaggcactctccgcctcacccttaccgaaagaataggtgatctcggaatcatcgctgtatttagaagccagctccgtgaaatcatgctctccgtccaccgccatggctctcacctcacaggctttttcgtaagctttctggatagagctttccgaatagggctttaagttaccgtccatatctgtggatgctgttgcgaaaaagatctgctggaccgtaatcttgcgcgcctcgtcatcactgatctccggattgatatcctgaatgatcagccgatagaccttatctgccatggcgtattcccggtacagattttccacgatctcctccgtggcacccatggtctcgatctctgtgtcattcagggaagaataatactcctgcgctgcctggacgacctttgcttcctcggcttcatctaacgtgacctctttttcctttgccagcagatacatggtcttgatctgcgcgatccgagccagtaccgtctccttgacgttatcctccagtgtcacaccgtttaaggaagtgttccagatctccgttccgtagacattcgcatactgattctgtatcgtagtcagatagatcatgatctctgccttagagcaggattcatctccgatacggaagacctcatttttcccgaatcccgtggtgaagactactttcgtgccgtcatccccgccacaggcggtcagccccgttaccatacttactcccaacactcccgccaccaataccgcggtgatattacatctatttttaaaaaacatagcatttcctactttctcaaagtctctgaattctgattataccctatttttatcttccatgctacgttttcttataagttcagaaaattctaagaattctccgccagtctgtcctctgcgggaagcttttccacttttaccgcgcagactttgtattccgggattctcgcatatttatccaatgccgcattcgtcaggatattagcattgccatccgggaaatggaacggcatccaggtctccttcggggatactttatctcccactctcgcagtcgtgatcagggtccctcttctggatgtaacttttaccttttctccattttcaatgccaaggcgcactgcatcctccgtattcatctcgatgaaggaatgaccttccttctccatcagtcccggagtttttccggtcatggctctggtattgtaatggtacaggatacgtcccgtcatcatgataaacggatattcctcatccggcagttccgcactgggcacatattctgcagggtagaaccatcccagacctctggagaacttacccacatgcaaaatcggtgtgccgggatgtttcttatccgggcagggccactggatactctcacccttatccagtcttctatggctgatacctgcaaagctgggggtcagggacgcgatctcatccatgatctcttcggaagtaagctgggcttgcggatatcccatacggttcatcaggtcgataaaaatatcggtatccaggcgcatctcgccttccagtgtcaccgctttacggacacgctgtactcttctctccgtattgctgaaggtgccttccttctccgcataactggtaccgggcagaatcacatccgcatactgcgcggtctctgtcatgaacaggtcggacaacaccaggaaatccaggctttccagcgccttgcggatatgatgctggtctgcatccgttacgaccgggtcttcgccgaagataaagagtccgcggatttccttacggattgccgcagggaatacatccgttgcatgtacgccgggttttttgttcagctccactccccatgctttttcaaatttagcaataacctcgggatttgtcactttctgataaccggggagatcaccgggcaatgcacccatatcgcaggcaccctgcacgttattctgtccacgtaagggattcacaccacagccgctgcgtcctaactttcctactaacatcgccatgttggacatggacataacaccttcggttccggtggaatgttccgttacgcccaggcaatagatgatcggagccttcttcgccttggcatacatcagtgccgcctcccgcaggtggtccgcatcgatatgacagatctcggctacacgctccggagtatattcttctacaatctttttcaattcttcaaagccttcggtcctggtgcggatgaattcttcgtctgccagtccctcatggatgatcacattcatcataccgttggcaaatgcaacgttcgtaccgggctttaatttcagatgaatatctgcctgtctggacagaccgatatctctgggatctaccacgatcagccgggtaccccgttccactgcctgacggatctgcataccgatgacaggatgtgcttcctccgggttcgaacctaccagcatgatcacatccacatcattcgtaatatcactgatgggattggtcatggctccgcttcccagtgtcatggcaagtccggctacggttgcggaatgacagactctggcacagttatctacattattggtaccaaacgcacagcggaccatcttctgcagcatatagcagtcctcgttcggagaacgggagcaggcgaaacctgccagtgcatcggaaccatactttttcttgatctctgtaaatttcgccgcgatgagatccagtgcctcatcccaggtagcacgctcaaactctccggtctcatggttcttgatcagaggatattttaatctctccggcgaatgtacgaaatgaaacgagccaaatctgcccttaacacacagcagtcccttgttggaagggccgtttgccggttccacatccacgatctcgttatcctttaccaccagataatactgacagccggtagcacagtggggacaggtcgtcagaacctttttcaccttgccgacctggtactttttacggtttttggctacgagtgctccggtaggacatactgccgcgcagttaccgcaggactcgcagtctgtctccttccagtccggtccgaacggagcatcgatcagcgttctcgtaccgatcttgctgttatgcagggtgccgttacaggacaccttgttacaggtgctgacacatctctgacaattgatgcacagctccggataatacgtcagaaaaggattctcttttttcgcttcaaatttggctgcacttccgggatagcaggatttcgtaatgccgtattcattggacagatcctgcagtcggcagtcgccggatttgctgcaggaaaagcatctgacatcatggttggcaagcagcatgttcaatacctgttttctgctgttcaccactctctcggaatgagtgttcaccaccattccctcttttacttttgtattgcaggaggttaccagatgtctgctgccttctacttcaaccacgcacatcttgcaggctcctacctcattgacatccttcaggtagcagagtgtggggatcttgacgtccgcctcctgtgcagcttccagtatggataaattctcatctacggaaatctgttttccatctatggtgatcgttaccattatactctgcctccttctaccactccgcatccgaagtgatcacatcttaagcacttaccacattcctgcatcgcctcatcgtaggacattccgttttccaccggttcgaaattgttcttacgctctctggcggaacggtctgtcagatgcactctgccgtaatgggttctgtcattctctctgggctccgggatcttaatatcctccagatatttatgatgatacccaaggtattcatcaatgttcagcgctgctactttgccggcaccaatagccttaattacggttgccggaccgaatacacagtcaccgccggagaaaatcttgtcatagctcttaagtctggtggtatctaatgtctcaaatgtctttcttcggggattcacatcatactctgcaaaaggtgcagagacaatatcctgaccgatggccataagtaccacttcacagggcacctcgatctcgggtttatttgccaccgttacggaaggctttccctgtttgtcatacacactgatgatctggggctgtgccacaaatccacagacattcccctccgcatccgcattgatcttcaccggtgcattcagtgtcaacagttccacgccctcttcaatggctccctggatctcggaaggcagtgctgtcatgtcgatctgacgtctgcggtagatcaccgttacctcttttgcatggcaccggatggcagaacgggcacagtccatggctacgtttccgccgcctacgaccaccacacgtttgccggtataatccgggatgttgcctctaccgatctcgcccaacatttccactgcggaatagactccgttgctgttcacgccgtctacgtttacagatttacctacctgggcaccgatagcaatatagatcgcattgtactgctccttaagctgctccatagtgatatccctgccgatggcagtattgtaatgcactgtaatattaccggtagacaggatcgcattgatatcttcgtccagtctgtccttgggcagacggtaattgggaataccgtatcgcagcatccctcccagcgcttctctctcttcatatacatctaccttatgtcccattagagacagataataggcagtcgtcagtccggaaggacctcctcctacgatagctacttttttaccggtggtgacattgcactccggcacctttacctgatctgccgcgatctgatccaccgcaaatttcttcagtccacggatattgaccgggctgtctatcaggtctctgcggcattttgcctcacaggggtgttcacagataaatgcgcatgccgtgggaaaaggattgtccctgcggatcagattaatggcatctgcatagcgatgttcaccgatcagcgcaatataccccggaatatccacatgtgcgggacaatgggaaatacagggaaccttctgtcccacttccgcctggcatctgtgctgttcaatatggctcatgtattcatcacggaacagctccacactctgcaatacgatgttggccgcctcataacctatcgcacagtctgccgtatcctgaatcatttccgccagggataccatattgttaaaagtatccatatccgccttaccgtccagaatgctgcgcatcatattctctacctgttccagtccgtcacggcagggaacacacttaccgcaggtctgacttctggcactttgtaaaaaagaaagctgcactgcgatcgggcagacaccgggaggatttcccttcaccctctttacaaatttatctaggaattttgttgtcttttcattcatttcatttttgtaaataatattctcggaatgcatgaaaccctcctgtgtacgtcctgtcatgatgagtactgtatctcttccaacaggtataagattttaccgactacccgaatacttaaaaaggtataatgtaagtgcttacattataccttcttgagaaacattcttcaattagattaattatttaacaaacctgttatttttttagcgaagtaccattaccgcattccccgtcttcttcccgtaagatacggattccgtgagccagtgtatccagtactgcctccaggcattccttcactgctttcggacttcccggcagatttacgatcaacgtctggttacggatgacactggcagctctgcttaacatcgcccggggagtgatctgcagactgtaatagcgcattgcctctgcgattccaggtgcatttctggtagctgcccgcatagtagcttccggggtattatctctgggagaaaaaccggttcctccggtagtgaataccacatccacatcctcttcatccgcaagtcttaccatttcccggtataagccttccgcatcatcagacagtaccacctgacttaccacttcatacccctgtttttctatgatactgcggatatcggaaccactctcatcttcccgctctcctttgctccctttgtcactggcagtaatgatccccgcatggagttttctggtactgatcagttttaaggtatcaccgacatcgatcctgccgccatgcagtaccctggcgaacacgccctctctgggcataatgcagtcccccaccatatggaagatctcgcattccgaatggcattttttccctatctgcgtgatctccagcaccacctcattacatttgaaaatacttcccaccgggtaagatttaaaatcatatcctttcaccagcagattttcaccaaaagctccatccgccacgttcgcgcctcgtgcgcggaatttttccacctcttcccaggataacaggcttacctgtctgtgccagttgcccgcatgggcatccttctccagtccccagtcttctataaaattacagcttccgatattttgcttggctgttccttttttctcactgatacatactgctgctacttctcctgccataactgtcaacctttctttcccgcccggtccgttctgcctgcccgcaccggtcatgttttgtatctatccgccgatctgtaccatcttgcgctgttcttccgctccatccgtcagacctccgtcagctgccttttcccggaaatgatgctctgatggtttctcccggacagcagccagaatccgctcctggatctcttcatccaaagctccgcttcgaagcagtggtttcagctccagtcccctgtcataatgcaggcagagctttaatcttccttcgcaggtcaggcggactctgttacattccctgcagaacttgtgggaaatcggactgatgaatccgatcctgccggaaaatcccggaaactgataatattctgccgggccgtccgttttttcgtaaggatctgctgcacgccccgccactgccagcggcgatttccccggaactgctattgctgctccaaatcttctctccagccgccttaaaatctcctccgaggaaattcccgtataatcttttccacagccgatgggcatcagctcgatgaatcggacatccacgggcctgtccgctgccagtgcggcaattccttcaatatcctctccattcatctccacgcaggggacgcagttgatcttcaccctaagttgctgctccagcgccgcatcgattgcgcggagcacactgtccacacctgctgcacgatctgctctgtcacagcctgtaatgcagcgaaaacgttccggatccagcgtgtccaggctgatgttcactgtcgtaagtcccgctttgcggtacacctctgcctgcggtgcgaacagcgtcccattggtagtcatggcgatctcccggattccgcacagcccgtggatctgctccaccagccatggcagatttttccgtaccatgggttccccaccggtcagacgcaccttccggattcccagttgttccatgatccccatcagccggaagatttcttccagcgtcagtatctcctcatgggctaacggcgtgatcccttgcggcggcatgcagtatctgcaccggagattacacttgtccgtcaccgatatcctcaaataatcaatttctcttcccagaccgtcctgcattatgtactccttttatttttccagccatatgatctgttccggcggcattttcaggtacagtgtttctgtatttttcagtgcctgccattcctccttcggcaattcataggtcaacacctctgacgcatgttcccctgtccggttaccgttacaaaacagtaccactgtggaaaaggtatcctcgatcacccgcaggatgtgacactccaacacattcgttgcctccattgccggaacgacctgaaaatagtgtgcccggaatgccgcatatttgtagctgccttcctcggacggcgcagacaggcggattccccagtctgctgccgcatatccgctatcagattcagcctgcagcatcgagacatttttacatccggtcagaagtgttgccgccagagacgccggattctgaaaaagctcctctttcggctgcacatccaggatctgtccgtcttccatgactgcgatgcggtccgtcatacgataggcctcgttccggtcatgggatacgaacagtactgtcttcccataatcttccataaccttcatcagttcccgctccaactgcatcttcagataattgtccagtgctgtaaagggctcatctaacatcaatatctccggctcccctgccaacattcttgccatggcggtacgctgcttctgtccaccagacaactgcgccgggtacagctgctccttaccttccaggaaaaagcgtttcacatactccgatgctttcttcctgtcacctgcgccgcacaggatattctgcagcaccgtcatattcgggaaaagggcataatcctgaaataaatatcctactctcctcttctgtaccggcagatggatccgtttctccgaatcaaaaaacactttatcgtccagccggatcacacctttatccggcttttcgattcctgcgatgcatttgagtgtcatgctcttgccgcagccggaagcacctaacagccccaatacttctttttgtgcggtaaactttacttttaacaggaagtctccacactttttttcaaaatccacatacaaagccattatctctttccaccgcctctccgctcctgataacccatccagtaattcatcaggaaaatggtgaaaaaggatattcccatgataatagctacccagtaatagacaagactgcggtcaccgctctgcactgccgtgtagattgccaccgacatggtctgtgtccttccgggaatatttccggctaacatgatcgtcgcgccgaattcccccatagccctggcgaatgccagaatcgtggcagccgccaccccgggccatgccgccggcagctgaatccggaaaaaaatctttgcctctgacattcccagcgtccttgccgcatagatcagattcacatccacctgctccagggcgccgcgggctgtccggtacatgatgggaaaagataccaccactgccgcgatcaccgccccctgccaggtgaacagcacactgattcccatttttaagagcagcccgcctaacagactgtttctcccgaagatgatcagcaggaaaaatccgactaccgtaggaggtaataccatcggcagagagaaaatgccgtcaatcaacgccttgccccttcgtaaagagatgaccagcctggcagaaagcagacctaaaaaaaacgtaaataccgtcgcacatactgcgaccttcagggagatccataagggtgaaaaatccatttctgctcctattctgccgcagagaatccgtagccttcgaatttctgcatggtatgatcggtctgcagatatgcaaggaactctgctgccgcatctgcgtgttcactcgccttcacgattcccaccggatagatcacctgtttacaggaacctacgggagcctcgcagacgatctggatgttctcgcccgcataagcatctgttgcatataccacgccacagtccacagcaccggtttctacccaggagagtaccgtgcagacatcggagccgtagtttgcctttgtctttaccgtatccagaattcccagagaggtgaaaatctcctcggagtactgacctaccggcacacttcccggctctcccagtccgatcatgccgactttatctgttgccacatcttcgaaagaggtaatgtccttatcactgccttccggaacgatcagaactaccttattttccaacagcttcacaatagaatccagatccatcagtccctcatcgttcaaagctgtcatctgtttggtcgctgcggagaaaaacaggtctgccggagcgccttcctcgatctgtgtctgtaaggctccggatgctccataagaaaagtgcagtgtcacatttgggtgcgctgcttcatactctgtcttgatctcgttacatacatccgtcagggaagctgccgctaaaatcgtcagttcctcagccaccccggtatctactgcattcttcgtttcagatccacatcctgcaaacaacattgctgccaggatcgttgtcatgactgctgtcatttttttattatattttttcaaaatattctgttctttgaaaatgtccgctcttgccacccatcttttcctccagatggatctctcccatttccatgccgcggtccattgccttgcacatatcatagatggtaagcagtgccacgttcaccccggtcagtgcctccatctctacgccggtacgcccggataattttgccgtacagaaacaccgtatcgtgcaggtctcctcttccataacaaaatctatggtgacctttgtcagcatcagtggatgacacagagggatcagctcccaggtccgtttggccgccatgatccctgcgatccgcgcagttcccagaacatctccctttttcgccgtaccgtccttcaccgcgtcaaatacttcacggctcacccggatacagccacttgctgtggcacatctctctgtaatattcttgtctgttacatctaccatgatggcatttccctgcgcatcaaaatgagtaaagcctgacattttcgtttcctttctgttgtttactgcttcccaaaaccgcaattggggaagtgacatacctcacagttttggcacagtccaccctctccgtagctgtccagatcagctttcgtcaatcgttctcctgccagtactctcggcagtaccaggtcaaataccgtgcgtcccgcatacatcacacagcccggcagtcccagcaccgggatctctcccagataagataacaggaacatggctccgggaagcaccggtgccccataagacacaatatccgctcccgtagctttgatcgctcccggtgtcctgtcatccggatccacgctcatgccgccggtacacaacaccatgtctgcgccctgacggacaaacttaagaatcgctgccgaaatatcctcctggcagtcatccaggatcacctgtcccatcacttccgtatcatatgccgcaagctttgcccggatggcaggtccgaaagcatcctgtatcctgcctttaaatacttcactgccggtggtgacgatccctacctttttatgggacatgggcaggatcttaagaagcggttccccgccggctgcttcctttgcccggttcattttttcctcttcgatcaccagtgggataatgcgtgtggctgccagcctgtctcctgctttcaccggaaaattgccgtgaatggtggcgatcatcatctctcccagtccgttcaccgcacgtaatttttcggaattgatcttgagcaatccgtctgctgctgcccggatctcgatcttgccttccttcggttcactggcagtcatattgtcattgatgcacagatcccgtaaaattaccgccgcctcgtcctcatgcaggataccctcttttttctcccacacatagagatgttccttacccacagataacaatacgggaatatcctctttcgtgacaatatgccccttacggaacacggcatccttcactactcccggaatgatctgggtaatatcatggcacagcacctgtcccacagcatcttctgttctgatcagtttcattgtaatctccctgatataccaaagtatcctaaaatacaggtataaatacctgctatgtcatttatgtcatacacaggacagttcaccgcatcctgcatcaccacatcggttgcaaccgcgatcaggtgctctgtggcacataccgtatgttccgacaccgctctccgtaccacttcaaccttcggataagcggaatccttcaatccctccaggatcagaacatccacattcccgcagaccgctatcatatcctctgcggtcacttttcccttacggttcacagaggactgcgtgtcggaataaatagcactgatccgggcccctgcttccgtaaaacggtacgtgtccgttccttcctgatccatggcgtactcatgcccgtcgtgtttgatcacacctacgcggtatccgtcccggatgaactcgttgatcagcttaatgatcagtccggtcttgccgctgtccttgactccgctgacacagaagataagcggcaggcttaaactttcgaattcttctctggtattgatattgcgcagctgctttttatcaaaacagctactttccagacggatgtatttggtccgcaccctgcacaggatctgcatcaggcgatactttccctgttcgatcagttcttctatcaccggcaatatttttttcgaataaatggcacacagcggatgaatatgatcctcatccaccatgcaatagcagtcatagtccgaggaaataaattctgccatataccgcaccagatctcccgtgataaagggcatatctccggcacagacaaatacataatcgcaagatgtatggatcagaacctgacggattccttccataggtccgatctccctgtgctcatcacagacaacgggaagccccagatcctcatattctccaggtatagcagcagaaatacagggcttctcatcgaacccccggagttcctcacagattctgtctaagaatctgcggttctgatattccattaagaccttgttctgccccatccggctgctcttgccgccggcgaggaccgctgtgccaagggtaaatttttgcatttcctgcatgttgattttcctccagtgcaagcacgtcgaaacggtttttcccgtcgttgcctttcatgataccataaggattgctccgtgcaagcacgtcgaaactatttgtcttgtgacctttgtatcatttaaaataccggatcctgacctcatctccggggtgcagttcccgccccggttccatatctataaagcaattacaatctctcatgttggaaagcaccgaagacgcatgtactgctgtgggcagtgtcactctgccttcctccgcatatgcccggacaaaacgtctgagcttattcaccttcggataagggtcagaaagcaccgcttgcgttcttcgcaccttcaaggatgcatcctgtgtcaaatacgctgccagttcccaaaaataatactcaaaattggcatacgccgcaaaaggatttcccgacaggcttaagatggctttaccatccaggacactgccgatcgtcggagttcccggctggatgttggcatgggaaaatatttttttcgctcccagttcttccagcacttccggcagcagatcctttttccccacagacacaccaccggtagtgatcacaatatccgctgttttcaggcactgctgtattttttccttcaataattctttatcatctccgcagatttccgtgaaaggcacctgtattccctgtctttccatggaagcccgcagcatataagcgatactgttatatattttccccggtaaaagtggcgttcccggtgccatcagttctgaacctgtggatagaatactgcactttatcctctcacagaccagcacctcgtaaatgccgagacttgccagcagacccatatggagtgcacgcagatgtgtcccccgtgcaaggatctgctcaccctcacggatgtcctctcccacacagcaataatttgttcccgctgtaatctcccggtagatctgtacctgtttttcgccataatcggtatcttcctgccggatgaccgcatcgtatccttccggcacataagaaccggtcatcacccgtactgcgcatccctcttcataaggaatctctgcacaatctccggcaaataattctcccacgatctgcaacgtaaccggatgttctctgtccgcacccgacgtatcctccgcccgtacggcataaccgtccatggcagacttcggatagggagggatcatcatctgcgccacaatatcctcaccgaggatccggtcacaggcatccgtaagtgccacatattctgttttttctataggctttacctctgccagtaatgcctccagacattcttccaattctttcatgcgcggctcctctcactgtgttttattccgtactgttccaccggaatgaaacaggctccctgtccgttctcaggattattttcttgcatcatgatagatctctatccgatccggccaggctctgcagatcagattcagccggtacttttttgcaagctctattgcctgatctgtaggtactgccttggacgccagcaccggaatcccggcagcgatcaccttctgtaccatgtccgtaggaacccgccccgtagtaaacaaaatgcactcggacaattccagctgtttcaaaagtgcatagccgatacatttatccaatgcgttatgtcttccgatatcttccatgcggcatacgcatttgtctcttactccgagataacagctgtgggttcctccggtctgtctgtgcagcttactgtctccgacgaattcttccgccagggcaaatacccacgcattctgccattctgtcccgggtaattcccgtaactgtctttttccgtttttttccagaaaagtaagattcccgatgcaacaggaagcctctctgtctgtcgctatctgtctatcgcttccccgtaaattttcctgcagaaaaactctcgcacttctaccgctctcgcagatcgtaatgctctccacatcccggatgctttcaatccagccttccgtgaaaagtctccccagtatcagctccggcagatgtgtggctgtgcaggtcagacgaaatgtcagttgctcatccacatagacatccaggaaatgttcacagacaatctctctgcttctgcccctttcctgcttaccacaattcccggggccgtccggctccactgcagtgtaagtctgtgagactgcattatgtagttgttccatacggtcattgatctgcatttatcgttctctttccatcattcaaagtaacatttctatgtaagcacttacattttacatcaaactccggctccccgcaagcaaaaaaatgcgtgcagagatgatccacacgcattttctgattatcctgttttaaacaattccaaaccttctgtcaacgattactcgatcacatggatccagcccttaggagcttcgatcctgcccatctggataccggtcagagtctcatacagcttcttggtgacaggtcccatctcggtcatgccgctgggcaggcagatctctttgccgtggtcaacgatcttaccaacaggggagataactgctgcggtaccgcacagaccagcctctgcgaagtcttttacttcatccaggtatacttctctctcttctacttccagtcccagatattccttggcaacatataccagagaacgacgggtgatggaaggaaggatactgtcggacttgggagttacgaccttgttgtccttggtaacgaacaggaagttcgcaccgccggtctcctctaccttggtacgggtagcagcatccaggtacatattctcatcgtatccttccttgtgagcggatacgatagcatgtaagctcatagcgtagttcagaccagccttgatgtgaccggttccgtgaggtgccgcacgatcgaagtcggtgacacggatggtcaaaggcttagcgccgcccttgaagtaaggtcccacaggggtgcacaggatacggaactgatactcatccgcaggctttacaccaatgacagggttgctgccgaacatataaggacgaatgtacagagttgcgccgctgccgtaaggaggcacaaaagcatcgtttgctttaaccgtctcggtaacagcctctacgaaacgctccttggggaaaatgggcatctccagtcttgctgcggaagactccaggcgttcaccgtttaagtcaggacggaaggttacgatatgtccgtcttctgtggtgtaggccttcaggccctcgaatacggtctgtgcatactgcagtacacctgcgcactcatttaatacgatgttggggtcctgggtcagctgaccgtcatcccatttgccgtccttgtaattggacacatatctgtaatccgtagggatataaccgaaaccgatgttaccccagtcaatgttcttcttttccattttgtattccttctttcctcggtttaccactctgcctgtttatttctcttaacagaatttattgattttcattattataccatttgtaataaaagtcaatatacacatttatgctttccagtgcttttttcagcgaaaatgtggctcatttctccttttagctgaaaactcaaattaaattcactacaattatttttctccggtagcttcctgatatgcactgttcgctaccactgaccatccggtcttatcccccgcaatgacctgcagatcttcactgcggaccgcataaaactccacgatctgtgctgcctctgtggacagattctcttctggattccggtacagcacgaaaatctcacattttccgttctgcgaggtacgattgtagaccagcgtgtatgcataggtctttcccgcctgctcctgttctcccagctgcagatagaaattgcctttggcattgtagcagacttcgaaggaaaagccctgttgttgcagcacagcatcatatactgcctgtgcgtaaggctctaagggatcctgtacatcttccgcggtttccgtctccgacgcatagtattccgcaagccactgttcttccatcgcctgctttgctaccgtttctgcatcctccgggtgggtattttcttccttgtccatcaattccgtcagataagtaatgtaatcctcaccggcaagctccgtctctctccgaaacagcacgccctctggacgccagtaggaataccagtgcctgtccgggaactccatctcttccacactgatcagattctctgtgagccgcgtctccgaagggatgtcattttcaaaccaaatccaggcaattccggcaaacgtgacgatcaggcacagcactgcccacaaagcaatgccgatatcctccagccactcccatttcccgggagttccccacttgtcccgtattttccggtgcagcctgatgggtactctcagatatacataaaacaggagaagcagcagacacagcagatcccccagtaacaacacataactgcgaaaacttacgggaccaccccacagaatcattctggctgccacatatattcctgccagtgtaagcagtaaaaccgtaactgccaaatatatcttctttttcatcgttttccgcactcaggctttcttgcgctcgtactttaagaactgataggtaatgtcaaaatagacctgctcgtcgctgtccgcggtaatctcccactcaggatcactgtccagatccgggaaataggcatccgcctcgtaggcatggtcaatcttcgtcacatgggccacgtcacagtaaggcagcatctggcggtaaatactctctccgccgatgatatagatattctcttcgtcgtattttttcagttcttccagcagctcctcgatggagtgtaccacgatggcatccttcacctgataattcggatctttggataagatgatgttggtacggttctttaaaggcattccctggggaaacgtctctaaggtcttacgtcccagaacgacgaccttaccggtggtctcctcgcggaaatgcttgtgatcgttggggatgcggatcagcagttcgttcttgctgccgatggcccagttgttgtctactgctacaattaaattcatggtgtacctcgtttctgtttgtttctatgataataaccggtttctccgtgcttcgcactcacgaaaccgtactgatattcgtattccgggctaccgccctacttactcatgtcagattgcaatcggaatatccctgatctgctcccctgtctggtaaccttccagcttcacatcatccggcgtgaactgatagaaatccttgatctccggattcagccagaacttcggtgccgggaaaggctctctgctgatgagttccttaatggcatccacatggcggtcatagatatgagcatccgcaatgacatgcaccagctcgcccacgttcatatcgcagacctgcgccaacatatataccaacaccgcatactgtaccacattccagttgttggctgccaatacgtcctgggagcgctggtttaaaatggcattcagggtcagcctgtcctctccctttttctgtgtcacgttaaaggtcatgctgtaggcgcagggatacagattcatctcgtgcagatcctgatggacatagatgttggtcatgatccggcggctgaagggattgttcttcaggtcgtagatcacacggtccacctgatccatcatgccttccttatactgatgcttcacctgcatctgatatccgtatgccttaccgatcgaaccgttttcatctgcccactcatcccagacgtggctgtttaaatcatgaatgttgttggacttgcgctgccagatccacagcatctcatctgtggcggattttaatgccgtccggcgcaaggtcaggattgggaactccttcgacaggtcgtatcggttcaccactccgaatttcttaatggtataggcaggagtgccgtccggccagtgggggcgcactttctcgccctccgtactggtaccgttcgttaaaatgtcattgcacatatcgataaaaatatgatccgctaaactcatgttgtctccttattctgattctgtcttctaacatataatatataaacgatttctccgtgcttcgcactctcgaaatcgtccccccttcgtattccggactatcgtcctacatactcagggttgtttgtgcctatggatgcactttatatctcccacttgtcacatagggaattgatctggtccgcgaacttcgccatatccttgttggtcatgacaccctcgctcttcgtaaccagtgccagtaagcgtctcgcagaagcaagcagtcgttcgaagactccggtagcaggcttcgtctttttctgcacggcaacaggtgctgcctcataggtgaacttattgcctgcaagatcgaactctgtaccgctataaggagcataggctctctgcccatactccatcttcaggcattcggcaaatccggtacatacactgtcctctccatgtaccacgaacaccttcttcggcttttcttcaaaggcctggatccagtcgatcagaccttccttatccgcatgaccgctcagtcccgtcattttccggatctcggcgcgcactgaaaccgtctcaccgaacaacttcacctcgtcagcaccctctaccagtgcccggcccagtgttcccaccgattgataaccgacgaacaggatcgtacactccggtctccacagattatgcttcagatgatgccggatacgtcctgcatcacacataccggatgcggagataatgaccttaggtgtctcgtcaaagttgatggctttggattcctcactggtgatagacagctttaatcctgaaaaagcaatgggattaatgccctcttttacgaattccatcgcctcatcatcgaagcattcccacctgttctcctggaatataccggtagcctctaccgccatgggactgtccacatacaccgggaaatcttcatgaccctttaccaggcgccctaccttgatcttccgcaggaaatacaaaatctcctgggtacggcccacagcaaaagacgggatcaccacattaccgccccggtctaaggtctcctgcagcaccttggtcagttctgccacataatccagcttatccttcggatgcagtctgtcaccgtaggtagactccatcacgacataatccgcttccttcgtaggtgtcggatccttaagtaacggctggtgcttgttgccgatatcgccggaaaatacgatttttttcgtattgccgtcctccgtcagccagacttcgatgctggcagaacccagcagatgtccgatatccgtaaaacggatttttactccctcgcatacttccacgatcgtattgtaatggcagggaacgaaccggcggatcacaccatctgcatcctccatggtatacagtggctccaccactgcattattcgcagaacgttttgccttacgattcttccattccgcttcggcactctggatatgtgcacagtcacgcagcataatgctacacagatccgccgtagcatccgtggtatagatctgtcctctgaagcctctggcatacagaagcggcagaagacccgaatgatccacatgagcatgagtcaggaatacataatcgatcatggattccgccaccggcagcggcacattttcaaatacattgacaccctgctccataccgtagtccactaaaatatgtttcccggcaacctccagataatgacagcttccggttacttcatggtctgcccccacaaacacaagtttcatagctctacctccgtttttgtaatgttattttaaagcattggctgtttcatagaactgataataaattcccttctgctccatgagctggtcgtgatcgccttcctcaacgataccatcgtccgtcagcaccaggatccggtccgaattgcggatactggatagtctgtgggctatggtcagggtcgtgcgtccctccgacagctctcctaaggacttcgccaccgcaaattcactctcattatccagtgcggaagtagcctcatccagtatgataatgggcggattcttcagaaatactctggcgatgctgatccgctgcttctgtcccccggacagcttcacgccccgctctcccacataagtatcatagccgtccttcagttccatgataaaatcatgtgctccggcgcgttttgccgcctcgatcacgtcttctttggaagctcccggacgtccataggagatattttcataaatcgtaccggagaacagatatacatcctgctgcacgataccgatattgccccgcaggctcttcaacgtaaaatgcttgatatcctgaccgtccagcaggatctttccttccgagacatcatagaatctggggatcagattgcacagtgtcgtctttcctccaccggagggtccgacgatcgccaccttttcccccgcatggatctgcaggttcagattcgtaaataccttattgtgatcatccggatattcaaagcttactttttcaaaagagatctctcccttcggatctttcagttcgaccgcatccggttcgtcaaagatctcgatatccgcatccacgatctgtagaaaacgctcgatgccggtcatacccctctggaactgctcggcgaattcgatgatacgacggatcgttgcgatcagtgtggacacatacagcatatatgccaccagatcacctgcggctatcttacctcttaccatgaagataccgcctgccaccaggactaccagatacatcagtccgtcgaacagcttgactgtggtattaaatgctgccatgtagcggtaggtcagcttcttaatatccagaaaggtaccgttgtccttctcgaacttttcattctccacttcttcattggtaaatgccttaacgaccttatgtcctaagaggctgtcctcgatccgggcattcagttcgccgatctgattgcgctgcttacggaaagcgctccgcatccggaaattcaggatcatgcacacgccgcacataagcggtacacataaaaagatcatcaaagtcagcggcagattgatatttgccagaatgacaaaagagatcaccgtcttgatcccggcgatgaaaaattcctccgggcaatgatgggcgaattccgtcacatcgaataagtcattggtgatccgccccatgatctgaccgactttggtattgttatagtaggtattggacagcttctgcaaatgattgtacgcatctctgcgcatgtccgtctcgatcttcgctcccatgacgtgtcccatgtcggacatatagtagctggcgatgcagtccacgatacgaagtccgaaatacaaaatgccaagcgtaagtatggtcttcaccgacagggcagccagatcccgcagcccctcattggtaatatagcgcatgatcagtggcagtaccagttcacagaccgtagtcagtgccgcacagaacagatccatgcacagggtaaaacgatattttttaaaataaggtgcaaatctgcgaaacagttcgcgggtcgtgtattgtttattctccattgctattaaattcctttttgatcatttctataaatgtttcttataaatattttccctctccctgataaaaacgaactttccctttttgttctttcttctgttcatacaatgtattgtccgctgcagacaggaaatcccacactcggtttggttccttcggaatagcacagacaccacctacagaaatcgtaagccacggttccaattcggaatcttcattgggaattttgtattcccggataccggcacacaacgattccgcatgttccattgcataggtcagatcacgccctgtcatcactacgaggaattcatccccaccgtaacgcgccacatagtcctccggaaatattcttttcaacgtatctgccactgcacagattccttcatccccttttccatgcccgtaccggtcgtttagttgtttaaaatagtcaatatccaaaaatagaattcccagttctttctcatttaatttgcaggcttcaaagacatcctctagataacggttcagacttctcttgttgtacagtcctgtcaattcgtcatgctctgactgatacaataatttgtttctcttcttcgtctgctcccgctgctcctcttccaccgcctgcaggcgcttacgcagctccagcatatacataacctgattgctctcgatcatttcgttgctttccttgatgtggaaaaaagtctctgtagcctgacggaattcctctatagacatctgtgcactgcaataacgcagccgcaacattaaaagctgtagcaacaggctcctattctgttcgatcgccgccttaggctccagacaatccaatatctcctgcagcaattctatattaccggtcttttccacgtattggagaagattctgaatactgtcatattcggaagatacctgacgcatatcttccaatgccatcacagcctgtcttacatggtctgccgctttttcccggtgtccttcactttctgccagatacgtgaaaaacacattcgccgcaagtctcgtttcccgaatgatctcttcgctttttccggtttcttccagtttgcggtatacctccattgcctcctgatccatatccagatgcagaagacaacagccatactctgacagcattttccggaaattgatccggctgtaaatgctgtcatcacctgctttttcaaattcacggatgcattccctataacattgcacggctctgtcatagactccgataagataatatgcatccgccatattacttaatactatactatgtaccatcttatcattgtatttcgctgtataatccaatgccctgccatactgttccatggccagagacagattgttctgcatatgtgccacgataccgatcatattatagaccctggctacgtgaatctcctgatccgttcccagcaggcatctcacgctttcgtccagatacttcagacactgttcctgattccctgtatccagatgataaaatgctgcgaaataacagatccttccatggattcccctatccctcttctccgtcacaaaggacaatgcctgttccagtgtctcccaggtatatgggatcccatctgccatctgttggtttaaccgttctgctgtctctaacatctgctgtctgtctacactcatatttgttccatcctgtcaattccccaatgctttactccttatcattgtattattttataccccggtgcgcaagttattttacggaatagataaaatgtttccctattttttaaaaaaatgttagaatgagaatatgtgtcggaaataagcaggaaaaaggtatgatttttatggaaactatcgcaagaaacaagagatttcaagatctgcattttgacagcatccaggctttacgcggtctggctgctctttttgtagtattccagcatgtccgcttcttaaatttcggtgcattcggggtagacatatttttctgcatcagtgggtttatgatcatgttcaccacagaaaaaagtacaaaatacttcttccggaaacggctgatccggattctgccgctgtattatctgatgacattcggcacttacgcaatgctgcttttattcccgtccctgttccagcagaccaggcacaatctttcctaccttgtcaagagcctgctgtttattccttttgatatcggtggtggaattatccagcctctggtgcggatcggatggactatcaactgtgaaatgctgttctatctgttatttttcattgcctttcacatcagcatgaaataccgtggtctgatctgcagtacgtttctggctattctggtgggaatggtacagatattcgctccatcaatctcctcctggcagtctccgataggcgggatgctttctcctgttcttatgttttacggcgatcctgtcatgctggaattcattttcggaatcctcgcctattatctgctgcgttttttatatcacaggcatttggagcatccgtttccgattgctgtaagtgtgctgtctgcggtaagcattccagtgattttttgtctgctggcatttttcacccccaggatcaatgtgctcggtttccgcaggcttccgctgtggggacttccggcacttgtactgttggttttagctttcctggccggacggaagctctctctgccccgctttttcatccttatgggaaatatcagttattccctgtatctggtgcattactatccggtaatgttcttagaccgggcggtgtttgacttctccaccctctctgtaatgtctgtcatcggagtgatcttaagtgtggcgctgagtatcgggttggcttacctgtcctggatcgttgtagaacaaaaattctccggatggctgcggaagaagctgctgcactaagcatttcccttgtagcactgcttctgtcatttaattattttatgaattgtatatgcaattattcaaaaagatgcacactttttctgttgacatttagaacaccttatagtatattataacttgtctgtaagacatgcgcgagtggctcagcggtggagcacctccttgccaaggagggggtcgcgggttcgatccccgtctcgcgcttgaaaaaagaacgataccaaatcggtatcgttctttttttcgatccctggcagggctcgaaagttcgatgtctacgctccgctccggtccgcgcagtccgaggtcccccggacctcgtgcgccgtctcgcgcttgttaagacccgcatttccgttttcatggtgcataaaatataagcaaaaagacgactgcactttgttgcagccgccttcttactgattgtttgtctattgttcgattttatcagcatatttgatgcggtagatccgacgcagggaatcgttcacgcggtcctcggagatggttccgttctggacagcctccagtactccgttgtatgcggtctcgaagttctccggcgcatagatcatgtcgcagccggcacgcagtgccagtactgcggcttcatcggcaccgtagtaattcgtgatcgctgtctggttcatggcaccggatacgatcacaccgcggaaattcagttcatttcgtaaaatatccgttaccaccgcacttgaaaatgagcaaggcgtattatctcctgtcagggaaggtgctgccatattgctgacggtgatcattttggtctcaccggaatcaatacagctctggaataccgcaaattcattggccctgaaatcttccgcacttctgtccgtagaagccatgccattcttcgtgctctgggtcgtactgccgataccgggaaaatgtccgatggcagctgttactttctgttcctgcaatcctgtctgcatgccggtcacaaaagatgctaccgttgtcgcatccgtgccgtaggagctgctgcctgccgcatttccatccactactttcagatctgccgcaggagcaaaatcaagattgaaacctagctctgccaggtaactgcccactgtggttccggcagtataggcgttgttggtatctccggatgcgccgatagtctccggggaatcggtcttcgttccaaggcctgccgctgccacagcgtcggttccggatccctctccgtcgatcgcaataaacagtggatagctggtatacagcttcgtattgtcgatcatctgctttaactggtctgcggactgaatatttttcgccgcatagacgataccgcctaccggatatttggataacgcatccttggttccgtctcctgcctgcactgccgcagatacaccggtgatggattccggcgtggtgataaacagtcctgccaccttgtcctccaggggcatgttctgaatgatggcttcgtctatgatcttatccagcttctgttcatttgtcagttccggtacagtctccaccgattccgtaggcgccgtgatggtctcctcggaagctatgatatcatccagtttattctgttgttcctgccgattgtggctcatgccggtaatcttgcttacagcaaaagcaattcccgctgccagcaccaggatcataattcctacgactgtatatgcaatgatctggcttctctgccgtctcttatgtctttcttcccgtctgttctgctgactttcctgtctctgttcgtttgtatccatttttataactcctctatctgtactacttttctattgtacatgatatcggtaggtttttccactggaaaattgtacaactattcagagccatgtaaaaattgataaatgggcgtcgaatgctggcattcgtaagaccattttctaatttttatttggcgaagtagcctcaatgagcaaaaggaaagcatcgaagatgcgattttgcgaatgaggctctgaatagttgttccatctgaatagttgttccatctgaataattgtacaacaataagagagcgtaccgatcattctttcaatcagtacgccctctcagactacaggctccaatggcttgccctctctttcttaaatttgatcttccattttgtcttttgttctctttccacttttcttttgtacgtatgtactgtaatgtgagataattcttatcttctgttgttcattactttttcttctgtgtacttgatgttctctatataaattggttctctttggtagttctattcagttgtacatcatggaagactgtggtaggactttacttgttaggtggactatacctctctttctatagattcttttgtacttctctcccaaccttctctgttgggctgttccgtttctcttttgttaagtttaatataatacaaggctgtgcatttgtcaacacatttcttgaaatattttaatttattttcaatatttttactgaattggcatatttttacatttttcgacattttattatgtattgtctgtcattttcgcctagtaaaaagactcctgcaagtcaatgcagaagtctttcttttcattttccttatacctgctgcagacgttgcagtacttcctctcgttccgggatcgcactggctgcgccctctctcgatacagcaatgcttgccgccatactggcaatgctgagtgccctgaccggatcctgttccttcagatactccgcaatgaagtatccggtataggtatctccggctccggtggtatctacggcatggcagggataaatcttctgagggattattttcgccgccgggtcacttcctttgcccgcatagacagaaccttctgctcccagggtcagtacaatctctgcctctgggaattttgcctgcatactcgcaagtactttcgcaggatctttttcaccggtgagttgtcctgcctccacttcattcaggataaacatggatatttttgacagatcacatgccagcacctgatcgtccatgggcgacggattcaggatgatcttcataccctttgcataagcactgtcgatgatgtagggcagattgttgatttcattctgcagaagcagataatctccttccgaaaatgccccaagcacttcatcaataaagctcttctccatgcagcgatttgctccgggatagagaatgatacagttctgaccgtttgtatccacctggatgattgcattgccggtacgtgtctccacgttgcggataaaccggacatctgctccactgtcagcacataccttacgcagcatctcgccatcttctccaatctgaccggcatggaagacctcagctcccgcctttgccagtgcaactgactgattcaggcccttgccgccgggatggattgccagtcccagggatgtcagtgtctccccgggggctacaatgtgcggcacctgataggtatgatccagattcaaggagccaaaattcaatactttcataataaacacctatgtctttccgtaacctgtggtccacgggactcaggtacaaatttgtgactaaaatgccatttcataaattttacgacagtcatcacgattcagatgtacgatgcctccgatagaatgatcatctccccggaaagcaattctgtcaagcatatcttcaatgcgatccgttggaatgttcatatcatggaaagaaataggcatacccatgctcttaaaatactcctccgtcttcacaatgccttcctctgctgcctgcagggtattggtgccatcccagttcacgccgaatacctctctggcatatctggcaaaacgttctggcttctgacggtacacatagcgcatccatgaacccatgatgatcgacagtgttgcgccgtgaggagtatcgtacagagcactgagttcattaccgatctcatgagtgccccagtcctgtactcttccgatacccacggtgttattgtgggcaatggttccgatccacatgatctctgcacgatatgtatagttccgtcggtcctccagtaatttgggtccgatatccactaacgtccttaaaatgccttcggacatgcggtcgatcacaccgatctcatcatccggagcgaaatagcgctcgcatacatgggaaaacatatctgttacaccacaggctgtcaggaatttcggtagggaataagtcagctccggatccatgaacgcatacttaggacgcagcaccggatgactgactaaaagctttttaccctcgtcagtattgttcactactgctacctggctggactcacttccagttgcagggcaggttaaaagaacagcaaccggcagagtgtgttccggctctctctctccaataaaataatcccatacatcaccttcggagacagtacccagtccgatggctttggcagaatcaatgacactgccgccgccgattgccaatacgaggtcaatcccttcccgttttgcaagctctatgccttctcttaccagagacagacggggattgggcaagacacctccaagctcggcatgggctatgccatttgctgtcagctgatcgcacacagcctgaagtagtcccgtatcatagagatactgaccattatcatggtggatcagcacttttttcacgccatcctttttcaggatttctccaatctgtttctccgcaccttttccaaagataaatctcgtgttgatgcagatatcaaagttattcagcattatctattgtcctcctgttccagtcgttttttcaattcctcaccattggccgccagctcatcaggacctgtttccaacagcttatttgtatcaccgtccccataggttacaccgatacagtggatatggttctcatgtgctgccgttacatcactgtaggtatctccgatatatacgacactctcacgttccatctgtccggaggccatgacgtcctctatcacctgagccttggaccggatcacctctccaaaagaatccggagaaaagcatccttcaaatagatctgtccatcccttctttttcaggatccttaacagagcttcctcaggttttagtgtgataatgtaattccggactccgcagacccgtgcttcttccaggatctcacggattcccggatatagttctgtcttcggatattcactgatggtacggtaatggatcgtcacccattcgtcaaatgtggctagcttttcttcacccggaaacgggtgcacctgccgaaagatttctcccatcggcttaccgaggttgctgtcgcagcttttgaacttctcatccatgctgcctcccagcttcccagccgcatattccagagaatcccagacatctgcacccgtattggccaaggttccgtcaaagtcccacagaatcaccttgtatttcattccatttcctcttaactttaacttctgtgttaaaactccttgaagcagctcttgctccataaggttccgatgactaccagcagggatcctatgatgatcggtacggtaatacctacgcccaacataaacgaggtcattacggtagagatgatcggcaggaagtttgataccagtaccaccagaagcatgtttcctttcttgatggaaaggttccataaggtattcgccaatgcacccactacgataccggcatatagaatctgtccaatgaggcttacagaaaaatttctcggttcatccataaatatggagataatccctaaaatcgctgctgtcacgatcatgtagattccaacgccatctacctttttggttcctacatactttttcaccaggttagtatacactccccaggagattgctaccacaaatcccattgcgtatcccgccagatcccctccggacaggatattatccgcaaaactgctcaaatggaagatatccgctccgagtttggctaccacaattcccacaaagcttaaggctacactgcagatcaaccacagggatgcccttgcatgtaaaataggaatcgtaaagatcagggtaaacaatggccacaggaaccggatcagtaccaatacgatcactgactcatcactttgtaccatgctcatggatacataggaggatgcggtgtatatgacgaacaggcttccacataccgtccagtattttctgggaacttcacggataccggtcagtccctctttcttgatcagttgcgtaaccaacaccacgataccaccgatcagattgaccagtgcggctgaggtatatgcccccagcccggtactcagatttctggtaaaaattgcgctggttccccagatgataatggtcaggaatcctagcagtgtataataaaatttagattttgaagccatacgctttcccccttgatcgttatttcttagttataatttctcaaggtcgtatataacagctccataaatccggggaagtcaagttccaaagctgcctctgcgttgggcttctcaccacggaagtccatctgcggctctctgtacagatcgattgcaggatctacgccgcgcagatgtctgtagtcgcatacggtcataccacgggtcagttcacccttcagttcaatatcgatatgcatctcagcggacttgatcaggttcggatcgatcagccaggctactgcgcaggcatcatgcatattggcaccggtgagtttagcacttttgacagtagaatcaatgaagaactctgtcagatctgctgcaaggtttgctgccttggtgccgatcttacgaaactctgctacatgctctgcggtcaggcagcactgtctggtcaggttcagcccggacatctttacatggatgccggaatggaacaccttgtatgctgcttcaggatccacaaaaatattgaattctgcggtaggtgtccagttaccgaaggtaacggagccgcccatgatgctcagctctttgactctctctacgattctcggctctctgtggatcgcgcaggcaatattggtcaggggaccggtagcgatcagggttacatcatcggtattcataacggtgtcgatgatgaaatctactgcgtgcttgttctgaggctttgccacaggctccggaagcacgggaccgtccagtccggactcaccgtgaaactggggagcagttacaagaggcactaccatgggacctgaattgccgggatatacggaaatatcggtccgtcccagcacttccagtaccttcagtgcattcttggttacattctctaatgtacagttaccgccaatggtcgtaatacccagaacatccagatgctgtacagctaacatgattgcaaaggcatcatcatgccccggatcacaatccaggataactttctttttttccatatataaaaacctgcctttctaaaccagttcgaaatcagtttatttattttctgccagaaatacttccagttcctcggtatttggtgaatttcttgcaccctttctcataacggtgtatccggatactgcgttaccgcggatcaggcactcgcgtaaattcatgcccgcaagtcttccactgataaatccagcattatacacatctcccgcacctacggtatcttccactttcaccgaaaatgcaggtacgtattcctcgccctctttcgagaaaccataggatccttccttgccatttctgacgatgacaactctctcgtcggaaacgagtgcttttgcattttcccgccagtctctgccctcgccgaggtacttgaactcatcatttccggagcctaacagataggtcgtatagcggatgacttctctcaccgctttctcatactccggatctaactgtccatcgtccacccgtaaattcagatcaaaggaggtcggtactcctgcttcataagtttttttaaatatctcaataatttctgtgcgtgcagatgtgtcatataccagagacattccggaggaatggacccagtcggctgcttcgatcttttcaaacggcaccttgtctctctcgagtaccttaaatgcctgatctactctgggccagccccacagatatctctctccgttctcatcaataaaggcaaagactcccacggtatttaacttcggatccacgatcaggtcagcggtattcacgccctgttccttgaaatccttctgaatatacttaccgtactgatcatctccgatggttccgagaaagctgaccggaagtcccagcttggccagtgccacggcagtgtttgcacttgtaccgccaccgaccagctcagggttaggatagtctaccagtgtcctctcttcatttaaaaaacggggatacggtacgatgatgtccacatttgcatcgccaactacatatatatcacgcatttaaggatgcctcgatgaatgcttttactttcaccggatccttgcagccgccggttctgtccttctcatcgtcgtagttggtccagctgtaggaatctacgccgtaaggatgcgtgatatggattgcctctgccacgttgtctgcatccagtccacctgcgatgatgcagggaaccttggtgctctcaacaatcgccttgtcgatcattctgtcatgggtaagaccggttgcaccgatatcaccggcacctactgccttggtatcgatcaggaagaaatcggttaccggctcgtagtcccggatatactgcataaccttctgctcctccagaggaacgcctgccagtacggggattgcctgcatgatcttcagtccggggaagcggtctctcagttcctgtacctgtgccggtgtgataccttcgatatctccggagagatgcaggacatcgggacacacaaccttcagattttccgtgatctcatcaatatcctcagctactgtaagtcctaccttgacagcctcaggctgtactccttcgaagatttctttcgccttttcacaggtcagctgtccgggtgttctcttgatcttaccataggatactccgatatgatgtcctcccatatctatgaccattcttgcatcctctactgttctgataccgtaaatctgaatgattacatttgccattactatttacccttcctttcttcaaataccttcataaaagcttctgtagtaaatacagtttccttaaaccctgcgccctgtgccactttagtgatgggcggaggtgttacaaagctcttcttcagtgtctcaacctgtgcaaatacttcctcaaccggtccatctaacaacacctgccctttgcacattacaatgatacgcttaaagttatctactacgaatttcatatcgtgggaaatggtgatacagagctttccattttcctttaactgacggatgatctcgcggagacggatattacctgccacgtcctgtccacaggtaggctcatcgaagatgactgccttgggatccatcataatgatggcaccgatggtacagaactttttctctgttgaggtcaggtcaaagggatgcatatccagcttgtccttcagtcctacaagctctgctacccattcgattcttttctggatctcgtcctctggcatacctatctgcttgggtccgaactcaaactccttgcggacagattccagaaacagctgatcatccgggttctggaatacatatcctacctctttagaccattttgcagtagatcggttgttgatatcttctccgttgatcagcacttctcctgaggtgggacgcagaattccattgaaatgttttactatagtggtcttgcctgcaccattctgaccaatgatagcgacaggctccgttccttctattaccagattgatccccttcaaggcttcgtctccggtaggataaacatgtttcatattctttaattcgattttcatcccttcaaagcctcctttacgagttcaaccgtaggttcctccgtaatctcgatatcacgatctgtgtatcccttttctttcaacgcattgcagatcttaacgtaatcaggtactccgatatgatgtgctacgatatcaggattaccgaatatcttcttgggttcatcgattgccacaacctctccggcatccaacaccatgatctgatctgcgcatctggcaacacgttccatttcatggtctaccatgatgacggtaattccgttcttattcagatcttttacaatatcgaagatttcctcacttcccagcggatccagctgagtggtacactcgtccagtacaaggatcttgggttccataatgaaagtggaaccgaacgctactctctgtacctggccacctgacagctccaacggatttttgtgtataatatgatcaattctcatcagcttggcaacggtgtccaccttttttaccatttcttctctggggataccgcggttgcccagaccatatgccagttcctcagctacggtacctgccgtataggacagctggttgaagggattctggaataccagaccgatctttgtggacagatccgcaatagtgctgtcttctaccacactgccatcaatcgtaacgcttccggacatttttcctacaaaatagtgagggatcagccctaccagtgcattacacagggtggatttaccggagccgtttgctcctataatacagaagaagctgccttcttctacctggaagcttacatttttcagtgccttatgcttcgtctgacgatatttaaaactaaaatcttttacatcaactactactttacccatctcgtcaccgcctttaaataatattaagcttcatcagaatcgtaaggatcaaaacgatcacgaagaatgcgatcagcagtatcttcagcaccttatcagcctgagatttcgtcacttccacgtaagtggtctgctttacattcttgattccgaatcctctggtctccagtgtcattcctctctcctgtgcatctgtcagggaggacataactaccggtcctaacagagggatgaatgctttgattctgccggacaggcttccgccggtctcaacgcctctggcgctctgtgcttcctggatcacactcattcttctctgcatctgcggaactacgttcagacttgccagtaccagatatccggccttcggattcagtccggaggctgtcagcgctgctaccagcttaccggtatatgtagttttgttcataatatagaaggtaccgaggaatactaacagggtggtaacgatcttcagtgcatacaatgcaccctcctcacagaattttgcaaatcccagatcaaagatcacggtctcattcttaggactataacagccctgtatgaacatcagcataaccgtaatgggaattccaaaaccaaatatcatttttgcaaaaggaaccaacatttttgccattgctgccacgaaaaataagccgatgatgatcacaatacccagccatgaattagggaaaatcagagttcccagacccagggagaatatagccaggattttggtcataggattcaatgcctcaatggccgtattcttcgggacaaagttatttgttactttagccatttacaaacctccgtttagacaaagagggtacccatataatctatcagaattttataaccttccggtctcaggacacagcacatctgcagtgaccttccccgggcagttgccaactatgaaagaaattattatggataccctgctttaagatcataattattttaaggattcagaatcaatcctcatcgtcgtcatctgttgcatcagatgcatactggcttaagaatctcttggggatcttcttaacgattacgtatgcgattgcgaatgcgatagctttgtcgatcagattctcaagcatggaagaagagaatacggaaacgacaatatccttggtagctgcaatcagagttgcagttactacggaagtaccggttacacctgtagcgccaccatatacgaagatggtgatcagggaagcggaaatcgtattggtcagggagcaggccaaccaggtcaggatcacaccccagatcttcttgaagagaccagccttaaccatgtaaccggttaccagaccacagaagatacttactaaggaataaggtaagtatacagggttagctaccaaagccaggaacacattggtcaacagaccacacagtgcagatacccaaggacctgacagacatgcgataacgatcgtaccgatcatatcaaggaataagggcagcttcagtgtggaacacagtgttccgccgatcaggttaatacctacagcgatcgggattagtaccagagatttggttgaaaactgagcctttaagctttccataaaagtcattttctttttcttttgatttgccatacgtttaccctccacgtttttaaaatctttatcaacttataagttgtattagaagttgtaaatatttaaaatatcatgcggcgcctgcatgatattttagttcgttcttaatgcttcgctattcttctccatggaagttctcatcgaaagtctcatcctctatcgccttcagggactctctggtgatcttgcggagccttttggcatctcttgccttaatgcactctatgatctgtgtatggaacgtaactccttcttccgctcccttcttcgttacggtaaaagaaagagcagaattcaggatgtccttggtaatattgctgatcttaatgataaatgggttcctcgtgatctcatacatcttcatgtgaaactcgatatcgtattgtttgtacttattgatgttccatcgttcacagtactgacgcatttttccagtcagccgctccagaaccttaatatcggtatctgtagctctctcgatcacggcatctataatgccgacctccatgatcttacgatattccagtacagacttcacatcctcattatccatcatgagcatcggagtcatggatttcagataactgttggaattgacatttttcacaaaagatcccttgccctgataagtctccaccagattgatcgccaccagcttctgaattgcttccctcacagtgatccggctcactcccattgccttcgtcagctcgttctccgaaggtaacttctcacctggcttccattcaccactctggatcttggacagcaactgttgaaaaacctgctccttgatatcctgtttttttaaatattcaaagccttctgcccccattaacgtttcccattttacctttgttttcaagtttgcttttaactcattggtatttcgtttgcttgtaactatatcataaacctttttctgattttgtcaatctgttttagcaaatttgtaagttgtattacaagttgcacgcattgttttgtgcactattaacaatatatttttgaatagtgcacaaattttgttgttacatttcgcagcattttctatttttcattttttagtacattcgtaagttatattacaagttttttagtttctctgatcccgcttttgcatggctcgttacacggcaaactggctattatacaggttcgcgtagaatccgccctgtgccaggagggtttcatggttgccctgttcgatgatattgccgtctttcattaccaggatgacatcagcgctctggatggtggagagtctgtgggctacgataaagctggtgcggccttccatcatcgtggcaaatgcattctggatcttgatctcggtacgggtatcgatggaggaggttgcctcatcgaggatcagcatgggaggcaggcacagcataactctcgtaatgcataagagctgtttctgtccctgggacaggctgccgccgtcctcagtgatcacggtgtcataccccttgggcagacgtttaatgaagccgtgggcatgggaagccttcgccgcccggatgatctcctcttctgtggcatccggcttacccatgcagatattgtcacggatggtgccggaacgcagccaggtctcctgtaataccataccgtaattggtacggaggcttcctctggtgatgtcccggatatcggtgccgtccactttaatggagccggagttcacatcatagaatcgcatcagcagattgatgacggtggtcttaccgcatccggtaggacctacgatagcaactctctgaccgggttttacctgcaggttaaagttctggatcagcttcttctccggtacatactggaaatatacatccttcagatctacgttgccctgagcctcttctaatactcttgcatccgcggcatcgggcacctggggttcctcgtcgatcagttcgaagatacgtccggcacagacaaaggcattctgcaattccgttaccacgccggagatctcattgaagggcttggtgtactggttcgcatagcttaaaaagcaggacagacgacctacgctgataccgcctttgatcgctacgagcgcaccgaacacaccgacaccggcatataccagactgttaacaaaacgggtcgccgggttcgtaatggaggagaaaaagatagctttcagagagcatttctgcaatctgccgttgatctctccaaacttgctcttcaccgcttctcctctggaaaaggtatttacaatcttctggttgtcgatcatttcctcgatcagggaggtctgctcgcctctggtctcggactgctccttgaacatggagtaggtcttggttgcaatgaattttgccaccaggaaggataccggagtgatacatacgactaccagtgtgatgggcacattggtcaccagcatgaatcccagcgtacacagaattgtcagtacaccggtgaacagctgggtaaatcccatcagcagaccgtccgcgaaagtatccacgtccgcaatgacacggctcacgatatcaccgtaagcatgggcatccagatattttaagggcaggatctccagcttcgcaaaagcatccgtacggatatcccggatcacatgataggtaatatagttgttgcaggtgttcatgatccactggccgactgctgtaatgatcattgcgatggcaatttttttcataatggcaaagataccggccatatctacctgtcccttgccgatgatcagatccaccgcattacctgtgaggataggtatatataaggtcagtaatacagtcaggcctgctaacagcagggagagtaccagtgccggtgtatatttccggatatatttcaatacccgcttcatcgtctctttgttatttttcttctgcattaccgaacacctcctctctgttcagggtactgggaataatagatctcctgatatacggtgcaatcctttaacaactcatcatgggttcccatacctgcgatctctccatcatccagaacgatgatcttgtccgcatggcggatcgtggaggcacgctgggatacgataaaggttgtggtcttatcttccaaagtccggattgctgcacggagttttgcatccgttgcatagtccagtgcggaggcactgtcatccaggatcagaatctcgggatttctgaccaaggctcttgcgatcgtcaaacgctgtctctgtccaccggagaagttcttgccgttctgtgccaccgttgcatccagctttccgggcttaccgtctaccacttccgatgcctgtgcaagctccagtgctctccacatctcctcttcagtagcgtccggcttgccccactgaaggttactgcggatcgttcccttgaacaggactgccttctgcggcacgacaccgatgcgtccccgcagctcttcatcacccatggtcttgatatctctgccctctaacagaatctcaccttccgtcgccggatagaaaccggggatcagattcaccaaggaggtcttaccggaaccggtacctccgatgatacctacggtatcgccacggtttacggtgaagttcatatcctgcagagtcggtgcaccggctccctgataagtcagggatacatggttgaagttcagaaaaggggctttttcatccacttttgcagcaatactgttatccagagctgctttcttctcatcctctgttgcatcggcaccgatctcaaacacgctggctacacgttccgcgcacgccaatgccttggtcatggtcacgatcagattcgccagcttcaccagttctaccaggatctggttcatatagttgatgatcgctaccacctcaccctggcttaagttaccgatattgacctgtacggcaccggtatagatcagagcaatgatggcgccgtttacaatgatataggtcacaggattcatgcaggcgctgatcttgcccacgaaaatctgcatggccgacaatgcttcgttattctcccggaagcggtccgcttccttggcttcctgatggaacgcacggatgacacggacaccggtcaggttctctctggtaatgcccagcacctgatccagtttggactgcacctttttgtacaggggaatcgtggataaaataatgccgaataccacaacagacaataatggaattgccaccacgaagatcagtgcacatttcacatcaatggtaaatgccatgatcatggcaccgaatacaatgatcggggaacgtaagaacagacgtaaggtcatgttcacaccggactgcacctggttcacatcactggtcatacgggtgatcatggtggaggttcccgccttatcaatatccgtaaaactcagatcctcgatatgattaaacagtgcctggcgcagcttggtagaaaatcccactgccgccttggctgcgaaaaactgcgccgtaatggacgatgccagtcccactacaccaaggagcagcaggagcagtcccattttaccgatatagcccatgttccggttggaaataccatagtcgatgatattcgccattaccagaggaaccatcagttcaaaaaaagcttccagcagtttgaacaacggtgccagtatggactctttcttgtaatccttcagatacatcattaatcgtttcataagatcctcatttctatgcattgttccatgcatttaccgtgcagtacacaactgcttttcgtgcttctactcccttttactatttaccattatccttcattttaacacttctgctgttccgtagcagaccgccagcgaataccccgcttccaaagtctgttcccggaagcagatcttcttttccttccatctgcgctcgtcggaaaagtcttctcccacgacgctgccgatcccctgtccggtatatttgccgtaggcttcttttctgctccacaagtggtagaacagctcggtccgtttctccacgcccgtctcctgcagcagtttccactcttcctttgcgaaaaaacgctctgccgtccgctctttgaagggaacccatttttggatatccactcccacttctccgtcgctaaccccacagaccacatagtctccggaatgggacagattaaatttcttcggaaaatttacaatctgcggtttgccctgttctccatatttataggaaaaagagaaggggggcgtctgctctctgaacatccgcgcctgcagcactgcaagcagttcatcctcttccaggaacaggatatcggtattctcaatgccttctgtcagatccattgccagcttttgcaacagcattccggcgccgagactggctgctttcgccccggtcccttttaaccgttctgtcttgttccgtcgcaccggatccacacattccaatgcttcccgtaagaaactctgtctcgtctcttcctcacaggaatgcagatgcaatacataaattcctacagccatgtccttctcccggcagatcgccatatccatccaacacaaaggctgtcgcatgaaaaagttcctgcgacagccttatgattattcttccggttttgcggtgatcgccagatgcagttcgtctaactgcttctgttctaccgtacccggtgctcccatcataatatccattgcgttcttgttcatcgggaaaggaatgatctcacgaatgctttcctcaccacagatcagcatgatcatacggtctacgccgggagcgattcctgcatgagggggtgctccgtagcagaatgcattgtacatggcagggaacttagccttcacatcggcttcacctaagcccaccagctcgaatgccttgatcatgatctccggatcatggtttctcaccgcaccggaagacagctctacaccgttgcagaccagatcgtactggtatgccaggatctctaagggatcctgattgttcagtgcgtccataccaccctggggcatggagaacgggttatgacagaattccagctctccggactcctcgccgatctcatacatcgggaaatccacgatccagcagaactcataacaatccttcttcatatgtttctcgctggctgcacccaacagctttctgtagacacctgctgtcttctgtgcttccagcttcttgcctgcggcaagacctacaaagtcaccgttcttaagacctaatgccttgatgacttcttccttgcggtcctgtaagaacttggagataccgcctacgaactctccgttctcatctacacggaaccagaaacccttgcgtgcagtctgtacctctacctctgcacagatcgcgtcgatctgcttacgggtagcagtgaagtcatctacaacgatagcctttacagtctgaccttcaaaagctgcaaagccgcagccctgcattacttccgtagcatctgtcagcaccagatcgatacgcagatccggcttatcggaaccgtacttgtccatagcctccagataagggatgcgtacgaaaggcgccttggaagcttctttataaatgccatacttttcaaatacgggaggcagcacctgctctacgatggaaaatacatcttcctgggaagcgaatgccatctccatatctaactgatagaactctccgggagaacggtctgctctcgcatcctcatcacggaagcagggagcgatctggaaataacgatcaaaaccggatgccatcaggatctgcttgaactgctggggtgcctggggcagtgcataaaacttgccgggatgatttctggcgggaaccagataatctcttgcaccttccggagaagaacaggtcaggataggagtcgtgatctccatgaagttcaaagcatacattctctgacgcagttctgccacgatctggcttcgcatcacgatatttttcttcatgttcggatttctcagatccaggtaacggtatttcagacgggcattctcgtctgcatccttggactgattgatttcaaagggaagtgcattgtaaatacattttcccagaatctcgatcttgtctggcactacttcaatctcaccggtgggcagattagtatttttgctggaacgctctctgaccacaccttccacggagatggtggactccttgttgatgccatccatgacattcatcatttcctcggtctctactaccagctgagtggttccgtagaaatcacgcagaatgacaaaaccgagatttttgctgacttttctcatgttctcgaaccagccgaccagtgtgactctctcaccgacgttgccgatccgaagttcattacagttatgtgttctggactgaatcattgcttttgctccttgtctgttgcttttatctctttaattcttccttatagaattccacgaattcttcgtagccttccttattcagctgttccttctggaacttcttgttcttgttcatgcgggctaccagcacctgggtaccgtccttacgggcttcctgcgcctgtgcgatcacttcacacagcctttcgccgctgacacccttctcgatcagatatgctacctgcttcggtctcgtgggcaccttgaagcctctctccatgagcaacatgatgatacgttcgaagccgatggagaatccgcacgcgggcacatcattgccggtaaatttgccgaccatcttgtcgtaacgtccgccgccaccgcagctgccgccgaattccggcatggcgatctcgaaaatggttccggtataataagacatacctcttaccagcgtagcatcgaacacgatctcgaaatcggaagccttggttgctctgacgctgtccatgatctctctgaggctctgggcgatctcgggctctaagaatccttccagggtatctgccaggtaagccacaccgtcctcagcactctccaagcctttgaacagttccagatacttgtctacacatgccttatcaaaaccgttctccaaaagctcagcttccacgccttccagaccgatcttgtccattttgtccagagtaatgaatacactgtcataggactcttcggggaatccgctgtaagcagccattgccttcaggatacgacgctcattgatacggatctggaaattgttgaagcccagtttgcccaatgtcgtggtcgtagccaggatcagttcgatctctgctaagttagacggctcaccgagaatatcgatatcacactgcatgaactgacggtatcttcctctctggggtctgtccgctctccatacattgcccatctgcaatgccttgaaaggagagggcagggatgccgcgttgttggaataataacgtaccagaggcaccgtcaggtcataacgcagaccactgtccactacctcttcctctgtggttgcggctgccacgttcagcttctcgccgcgctttaagatcttgaagatcagcttctcattgtcgccgccctgcttactgcttaagtttgcaatattttccacgcagggagtctcaatggaagtaaaaccgaatttgccgtaggtgtccttgatgacactgatcacgtaatcacggatctgcatctcctccggcagaatatctttcatgcccgttgtgggcttcttgctaagtgccatggtcttctacccttccgctcttatgatgaattgctcaatatcttatatatgatactttttttccgtttcgctgtcaaccctcacagttcctgcttttgattagaaacagatcccctggattgtcatagaaatccccaccttcatgacacccgccagcaccatgacccagatgggattcagcttcttccgaagcagcagcacacagatcccgaagatcacgaccatgctccattccgtccctgtcagagacatactctccccacttccccaaaatgcatctttgaggatcagtattcctgccgatgcgatcattgctaccactgccggtcttaaggacttcagtacgccctgtaacagatccaggttacgatacttcaggtatagtcttgccaggatcgtcacaataatgcaggacggcagaatacatccggccgtcgccaccacggctccggggatcccggctatcttcattcccacaaaagtagcggaattcaccgcaatgggtcccggtgtcatctgtgatatcgtgatcaggtctgtgaattccgatatggtaagccatccatgaagtgttaccacctgcccctggatcagcggcattgcggcataaccgccgccgaagctgaacagtcctatttgcagaaagctgaaaaataattgcagatagatcattttccggccctccttttggcgaggagcgtccgtaccacaccaagcagtccgcagacaatcacgatatagatcacattgatctccagaatacatgctgccaggaaagctcccagcataatgacaagtgacatgggatctttttcttttacgatcggggctcccatatcataggtcacggaggcaattaccgctcccactcccgactgcatcccggacagcatctgcgccacgaagaagttactgcggaatgcattgtagcagatggagatcacagaaatgatgacaaaaggaggcaggatcgtccccaggatcgccaccagtgtccccgggatcccggccagcttgtatcctaccacgatggctccgttgactgcgatcgcgccgggcgaggactgggcgatggccaccagatccagcatttcgtcttcttcgatccagtggtattcatccacgaattttttcttcatcagggtgacgatcacataaccgccgccaaaggtgaatgcacttaaatataatgtggacaggaataatttccataatctcagtctgaaatttggggtatctttttccgacatatcttatctcctgtttctgttaacatgtaaaagccctccgaagttcttcggaagaccttttgtattccttatttactctacatgatgctccacctgttcaaacgtaaacacattcaaaaactgttttgctctctctgtcttcggatgttcaaaaaattcttccggagcagcttcctccacgatctttccctgatcaatgaagatcactttgtccgccactgctttggcaaactgcatttcatgggtgacgatgagcatggtcttaccctgctttgccagatccagcataacatccagcacctctcgtaccatctccggatccagtgctgccgttacctcatcgaataagagaatctccggatgcatacagagtgctcttacaatggctactctctgcttctgtccaccggacagctgtctgggatagctcttcgccttatctgccagacctacgcgtgctaacagctccatggcttcttttcgcacttctgccttatcacgcttctgtactttcacaggtgccagcgtaatattgtcgatcaccgtcagatgcgggaacagttcatagctctggaataccatgccgatcttctgccgcagggtggtgatatttttgctgcccttgcggatatccataccctgtagctttatcgtaccgccctgaatgggctccagtgcattaatgcatcgaagcagggtactcttaccgcagccactgggacctaccactaccagtacgtctccttttttcacttccagatgaattccatcgagaatcttctgcccttcgtattcttttgtcaggttctctattttcaacaatgtctctgccatgtcttcactccattcttattccaaccctgatccatctttaattccatttcttttccagaaccctcgccagtacactgaagggccagcaggcaaagaaatacagaacgaatactacaaggaatacgccaaaagcagcattgggactgctcatacgattcgcctcaatgatctgctgcgctacttttaacatctccactacgccgatcatcagtaccagactggtagtcttgatcatacgggtgatcaggttgatggacaatgggatcagtcgccgcacagtctggggaatgatgatgtacagatatgtctgtatcttactaagtcccagcgcctcactgctttcatactgatgcttcgggatgctgatcagcgctccgcgcaccagatctcccatctctgcggttccccacaggacgaatacgatcacggatgccacctcaccggataagttccatcccagtgctctggtggaaccgaaatatacgatgaacaataataccaactgcggcatgatgcggatgaattccagatagacacgaaaaaaagctttcaccactttattttttaccgtcatcagtgcccccaccaggatacccagaggcatactgatcagaatggatacgatactgatcttcatggctacccacaaaccctgcagcaggcggagcatgttcgtgcctttgaataatacatcaatccccaaatccggcataacgcatcctcctctccaccagtgatcctatgaccgataccggcagcaggatcagcagataaaatactaccaggaggaacaggctctccgtagtcttataatagagaccaatcaggtctttggcggtgaacatcaggtccatcagactgatggcgctgaacacactggtctcttttaacaggaaaatgatatttgccacaaatgcgggaatactggtggacattgcctggggcaggatcacatatcccaacacctgtcgggaattcattcccagactgatggcactttcactctgaatgggttctacggattccagaccgctgcggaagctttctgccatatagctgccgcctaaaaatgccagaccgactacaccgcacagctccgccgacatccggatcccgatcttcgggaagccgtaatagataaaaaacagctgcaccagaagcggtgtgttacggctcagttccacgtagactgtcacgatccaccgcagcaccggcactttatagtattgaaccgctgcacagatgagccccaccagaatcgcaaacaggatgccaacgatacctattttcacggtcagaagtgctgccttttcgtacatgggcagatatttttcaataaattcccagttcatgtatctatgtcctttccggtaaagttcaaaataatcttttagattatatcaaatgtatttctcagatgcaagaaaagactgcggcggcagcttacgtgccccgcagtcccctctatatcatcttattcccatcgtaccttactgtgcgtttactttgccgccctctactaccaggctgtcctcatagtccagaccataggtgtctgccagagttgcttcgtaatctgcatggaaaaagttctcctcacccaaagctacgatctcatcattgatccagtcaagcagtgtggtgttgcccttggaaacagcgggagcaatggtgtctgcactgcccagggaaggaatacctacggtatatccttcgttctgcagagcgaatgcgataacttcggtgttatcatttgcccatgcaacagaagtgccgttctcgaaagcttcttttgcggttgcataggaatcaaacttctgtaaaggaatatccggatagtttgcgatcagatatgtctcagcggtggtgccggagattacaatgatggaatcatctgcattccagttgtctaaggaagtgatcacattatcatccttggataccacgccaagtgacacattcatataaggagaagcgaaatccacttcctctgctctctcgggagttacggtaaagttcgccaggatcacatctaccttaccggtctgtaaatactcaatacgattggctgcctctgtagatacgaaattcacatctacccccaggtcttcgccgagtcttcttgcataatacacatcatagccctgatattcaccgttctcatccacatagccgaacgggtttttatcggagaatactccgatgttaatggttccgctctccttgatctcatccagtgtgcggtatactgccttgccgtctgctgccgctgcgcttcctgcgtctgcggttttgctgtcactgctgccgcatgcggtcagtcccagtgccaatactcctgttaatgccagtgccaaaacgctcttccactcaaacttcttcataatccttttcctcctcttcgatgtctcatttaagtatcgaatcaacttatgggtaggattatatctcctatttcatactatgtcaataggaaaacagtaatttgtttttgctttttgcgaaaaaataaaatcaatgctataatacttttgttacttttgattgtaaacagaccttgtaaccggaattccgtaagagataataaaataataaaggagaacaaaaggataatatatgaaaaaaccgatttcacgtttctatctgctgttggttctcgttccgttactgttactggcgagcatgggcggctattactttctggaagaaactgctgcaggcagcgatgttgttgtcgttccacagacccctgcaccgccttctgccacaccggttcccgtccctactccggagccgacccccactcccttcccggagcatgacattacgctcatggctgtcggggacaacctgatgcatctgggagtcgtggccagtggaaaacaggaggacggaacttatgatttctccatgctgtttcaggggatttcacccttcttaaacgcggcagacatccggatcatcaatcaggaaactgtcatgggcggcaattcccggggattttccggttttccctattttaattctcctaccgaagttggggatgcgattgcggatgccggattcaacgtggtcctgcaggcatccaatcataccgcggatcagaagctggacggcctgttgtactgtgcggatttctggaaaaacaagcacccggaggtactggtaaccggtattcacgaagacgcttcacaggcagatgacattccgttacttaccatcgatgatgtcactttcgccatcttaaattatacctacggtgccaataccgagacactccccttagatctgctggggcatctgaatcttctgtgtgccgtaaatgagaaaaacggacagatggacttcaccacgctgaacccgcaggtcttagaggatatctcccgggcaaaagaactggcagatatcgtcatcgtctgtcctcactgggggactgagtattcctccaaaatctcaagctatcaggaaaaatgggcactggagatgacagaagccggtgccgatgtcattatcggaacccatccccatgtggtagagcctgtggaatggatcaccgcagaaaacggcaatgagtctctgtgctattattcgctgggcaattatgtgtccacccagaaaaatgctctcagcatgttagagggtatggcctggctgacttttcacgttgcagaggacggtgtctccatcgagcggaagaccaccggtgtgatcccgctggtctgtcagtacacctccggaccggtacggtttgaaaatgtctatctgctggaagaatataccgaagagctggcggcctcccacggcatccgcaattatgccggtgtggtccttcatctggaagacctgcaaaaatggagcgacgagattctcggtgatttcgtactcaccaaagatcaggcgctccataatttcaaaaccgattctattaatcaataacgtttctcataccgatgatgggactgtagtccacagcactgataatgacacctttccgtgaattggcggaatggatgatctgtccgtcaccgatatacagtcctacatgggtacagctcttccctccattggaactataacatacaatatctcctggctgaagttcttcagaactgatactgcgtccggcaccggaatactgtcctcccggtgtacggctgatagaatagccgaactccgcatagataaagcaggtgaatccggaacaatctgtacctcctgacagactggaacctccgtgtacataccggttgcccagatactgcatggcataatcaatgattccctgtctgagctccgcatttgaggtataagttgtagtgggaagtgtgatgttcgtgatcacctccggggcatcctgctcggcagtctgttctcttgcctgcaatgccttctgcgcggcaatttccgcctgttcctcttctattgtcttcgcatagataaattcttccgagatcgtaacatattccgcagagacatagccttccttgctgtcggtgtactgtaccttcagccagtctccgtcattctccagaatttttaccttttctccattgtcaatgtaaccaattctttttgcatctgtggcaggatcctgtctcacattcagacggtctgcgataaccacagcatatctggtcacataattgtctacaacctcagctgctgcatctccgtaaatgaaaaactctgccttgatatagccctccacattaccggagatgatccggaaccagtcctgatcctctcctgccacatccaggatctgtgccaccgctccgtcataaattttgcccactacggcactgtctgtgttcggttctgtccggacattgacgtaattcgtcacattggcgatcgctaacgatgcatactcatctgcgttcgtatcctctacggaagcttcgtctaccggaacatcctccggatccgacaccccttccagtgctctgggatcttccgtctcgccaccctgtaccgccagcagatcctctatggtaatctgtccggtagccgggatcggctcgacaccgatctgatgtattcctgccgcatgtactttctgtaccgaggtttcactctgtattttcagttctccgtttcctgctgccaccaccatactgactccggtgagagcgaccgccagtgccatgaacattctttttttcattataatccctgttacttcctacaattactgttttctgatgacattctgcataatagcacataaagcagcacccgtccacgaatgtctccaaatatctcaaactacttaaaatactgcatcaactcttccagatccgtggatgcctttttaattgttcctgtatcgtccgaaattttgttaactgcttctgcgatatcagatacgtttgccgttacttcctcgttgctggctgcattctcttcactgatcgcagaaccaggcttcttaacatgtcggatattgcatcctgaactatgctctcccgttctccggcaaaagccattcccagaatctctccatcatcggaacataccggcatataatagacataatattcttctccctgaatctctactccatcagttttataatcgttaccggctctgaccgtctcccatatctgtggatcagccttggttccttctgccctgttcccatccttgtccacaatggaagtaataaatctctcatcctccatgaaaagcgtctgttcaatatgctcatcctgcaaagaatctataaactgataactgatatcatccttttccagaatatcctcacggatatcccatgtgaaatattgctccactgatgtagcacatgctttcagccgcagataggtactgtcgaccagttcatctttcattttgcccgatgcatatacagtcagagcaaccatcgttgcaagcatcggaatgcagccgatcattaaaatcacctgcaaataccccattttcttcatttcagcaccctcctcgttttctgatataaactttttcctgctgttacccatccccgtgcgggcatgatgaaacatccgcaagttgatctaattgaaaaatatcatagcatattttatcaggatccacaacacttcgacattcttgagtttccgcagttttatccacaactgcctgttttttcagatactattataaacaactttcaaatatccggcagattggtgctttaggagaagtttggctattggaatttggctacctgttctaatttcttttataaaaagaaccgttctttgctctctcctttctttaattgcagtctccttatatttcactacagtatccacatccgaatgcgcctgaaaagcagctccggtaatcctaccgcccttcctcctgtgttttctcaccacattttgtctgaaatttttaaaaataaagaatgcttacgccatgtaacatcgtggtatttctccagttctccgttcccaacgatccggtgtgccagatcagtagtccggtgttttcggcattttctcttctgcctacttctgccgtaagctccactccccgggcatagcccctttcctgctgtaccaccgtaggttccgtaaccgtccatgcttttgccgataatattccgttctcataccgcacccaaattctgcatcccgttacaaagcagtttgtcacgacctcgcgggaaatgcactgcgcctgttcacgcacatactgtatcagatacatggctaccgctcgtaaggaaccaggttcctgtcaaaaaaacatattgtgccttctgggaaaaagataattccggatattatatcgaagaatctgcagatattctcaaatcctgcttttaggaatatatataattatcctgcttgcctttttcacacttctaataaaccactgctgccagaatgatatataccagaatcgacaccatacagtacatagaattggttgttgatacataggcactgccctcttcctttttcagaaaagtctgcatgctgaaagtggccggtgccgacatataggaaatgatggcaagattcaacagcatattatctcctatccacaaatgcactgcccacagcactccaattgccataagtgtctgtagcagaactctcatcaggattgtcttcaggcatggccggatcagttcctttgtcagttccatgctatatcccacaacgatcagaatgattgctgtcacggatgtggtaaggatcccttccaccgccagatatgcaccgccgaagggactgtcaatcaggcaaatcaccaccttggacagtcctgccaggattccaagcacacttgcaataaatgccggtgtgtggaatgcactcatacatagtttctttgcattgatcttctctccgttttccacctgtcccagcatccccatatagatgctgaatccaaacaaaagtcctgcaatatccagtactgcgatctgtgagagattttcctgcccgcacagactggtatacaaaggatacgccatgaggccaccctcatatacactgaccataaacggcaggtacttgcggtattctccgttcataagcggcttcaacagaaatcctactccgaaagataccaccagcataacgaacataatccccaccagtttccaggtctccacactgtaatccgctgtggccagtgcatgaaagattgccaccggaagcatgatattggttaccagcagtttcatattatctattccgcttttggtaagtaactttaattttctgcatgccataccgagaaccagcatgacaagtaccggcaatataatttctaatattctcatttgttatccctttccgaggtatcctatacttttttatttattatacttcgattttcctatcctgtatattatgtatcccggaagttttgtagaaatgttttagaattgatgcagaaatgttaatgccagaattcggtctccatttcagatatgcaaaaaggcactgtatctcaatttttttgaaatacaatgccttttttacaacacaatcttacccaaagaaattatacttgttagcctcaaaagcttccatataggttgccccattggaaccataccggttggatgcgctgaccacattttcggaagcattcttattgatgtgctcaccgagaaatcctattttggaggcgatgccattctctcctcccagtaccttctgtaaggtatccgcatccgcattccggaatactttctcgtccacgatcaggcttccgtcctttgcctgactgattcctatactttccagtgattctttactgcccgctggaatgttttttaactgttgctggtaaaattcattcatgattccgccggtggtcttaagctgcttcatggtagcattgtacgcttccaccattttgttcacatcactcaggatgtccgtggtgtctccgctctcttttgccttgtcgtagatggaatccttatcgctgcctgcaagctttgacgcagattggctcaacttctccgacagatcctccagctttgcataattatttttcctcagaatgtccgtggcaccggtacttgtggtgttcatgctcttcccgatggttcccagcaggttctgggatgacttgttattgataatgtccaagagcgacgttctctgaatgggaatcccgctttttgctgcggaatttgccagcatttgggttgtgatcctcattttgcgacctcctttgatctgcaattttttctctctgtcttctatatcgccgcttttctttcacccttaatatgtcttgtaacgaaccgatcttttcatgtaacgaaacatcaaaaaatcagcaggcccttcacccgctgattcctttctgaagcatcaccgcttacacttttctcagatacttcatgtatgcggtgacaaagtcattgtatttctgttttgctaaaaatacgctctcaccgtttttcaattctatgttgctgttgtcataccgggcgacctcctgcagattcacaagaaatccccgatgggagcggaaaaagcgatctcccagcttctgctccagcacttccattttttcataaaaacagtagggctccttctttgacttggtgtgcagcataatttttctggcctggttctcggcatagaggatatcatccacaggaatcctgacatagttgccgcctacttttataaccagcggttcaacattctttttactccggatctggcagattgccctgtccatgacttctgtgaacttctgctcatcgataggcttcaaaagataatgaaacgcccccacatcatagccttcaaacacatattcacgtaaggccgtcacgaagataatcagtgcatccgacctttcacggatctttctggccgtctccataccgtccggttccaccgcattctgctcccggttcagggaaatatctaacaggatcaggtcaaacaccgtcggatccgccaacagttctccgccgtcggcaaacagtcggatttccccctccgtacatttctttaccagccttttcaggtattctcttatgggctgttcatcgtcacatattgctattttcagcattcgtcttctactcccccggatcttattccattcaaacatttccttttttatatcgccacttttcctttgaaattcaatcctatgtaacgaaatgcgatttttgtgtaacgaaaaaatcagcgggtatatagcatcccaaaagctctctcttgcgagagagcttggtctgcacctgtaaagtcaaggttgttttggtgtaaatagcataaaaacgacaaattccatacaaaaaattccccaaatcagaaatttttgtacggaatttacttattttgcttatatagcgaaaatggagacttttcaaacggtaaaattccacatttttgtattttttcgtccaaaacggcgatttaaatacaaacaagatttccactgactgtcccgatgcaacgctcacaaagagaattactatcactcttgacataaactctttacccttataataatccaagccgatgccactcttccggaaaatgcgtacacttcccaaagctgactatcacatctgcttaaaattc

SEQ ID NO: 11273 - DNA, 16727 bp, Unknown
  gut microbiota DNA sequence
ataaaacaggcaggaggatacagaaaagaataaacagttgatggcaaccagaagttactcgtgcaaaagacttttggaggcttcctttagtgtaccctaaaatccattcatttttaattattataggtcagaaagggatgaaaaacaacctgaaaatggcgagaaacagggcaaagcagaagttagtcgtgcaattctttttctgaagcgtggcagtagaagttactaatgcaatcaactttttatggaaaaaatttatttttctgcaaccgaaaatacgatatgcttatctaatgtatgtgaacacaaaataccttgcaaggcatccggccggatgaagaacgggaggaaccatggagaaactggtgaaaaaagcgaaaaaaggagacgcggaagccttcatcgctctgatggaacagaacaggcagagcatgatacggatcgcgttcgcttatctggggaacgaagaggatgttgccgatgccatgcaggagaccatactttcagcttttgaaaagctggataccttacgaagagctgaatatttcagaacctggctgattcgtattctgatcaaccaatgtattgcaatgagacggcacaggagtcggacggttcccatgaacgaggcggaggaagcttcacagttctatgatttcagtacggatctggaattcaatgatctgttgaaaactctgccggaggacagccggctgatcttccagatgtattatggggaacagttttccataggagagatcgcacagctgctccatatgaaagaaaatacggtgaagagtaaaattcaccggggcagagaacatctgagatcacagatgggtgtaggaaaggagaatagccatgacaaacagtccgttgattgacagaaaaatagaggaagcatacggaattatcagagaaagatcggaaaagaaaaaaagacagagtcgaaaaagaaagtttgtgcagacgggggctgcagctgcagcgattgttgtagctattggattctgtgcggcaaatccggtcttggcaaaagaactgcctctgatcggcagcgtgatagaacgggtacaggagctgctggggttccaggagattccgacagaagaaattgtaacgctggtaccaacagggcaaggaaaatacaatgccggggagagagaagaggctggggacaacaataccggagccactgggatccagagtacggaaaccagtgtggaagctacagaaccggcgcagtatcaggtatcggatcagggctacaccattaccttgacggattattatgccacaaaccaggcaattttcctgggggtaaaaatggagagcgaggaaggatttccggagatgtcagcggacagcgacggaaaaagccagatcatgatcgcaacgctggaggagtattctttccgaagcggcgatccggtacacgggggcagggcgcttgtggggcaacttgtggataaacatacttttctgggactgatccgtatcgattacaaatcgatccagacaggggatcagggatactatgaacagattccggaagacatgacactgcaactggaaattccgtattttttcctatatccgaagggggattccaaggagacagtacacggaagttggaaattcccagagttttccattgcgcagagcgataaggaaatgcaggtcatagagataggcgaaacaaatgaggcaggcttcgggctggacagaatcgaagtctctcccgtggagcttacggtatatgacattttcccggaagatcatcttgttgtgaccgtagtgttggataaagatggaagaaaactgacatacgcaggaaacaataccaacgagctggcggtcagcggatacgatatatccgagatcacagtgtacctctatgattatgacgaatacatggagatcaaggggctggcactgggagaaaattcgacagcattccgggaaatacttgagaaaaatgctctttatgaaaaaaagatttcgatagaaacagacaagtcgtagtatatctgctgtgccagccgcaatgacagctgaagtgggaacaaaaacggctttcggagatcccccggaagccgtttgttgatggatttcaaaatcgctgataatgcaccgcacatattatttggtcagttcagcaacgacctgattgatgaccttgccgtcagccttgcccttcagttcgcccataacagccttcatgatctggcccttatttttcgtagccagaacatctgcgaatttctcttccaggattgccttgacctcctcagcggagaacatcttgggagcaaattcgctcatgatctcatagcgttttttgtattcttccagcagctcggtacggtctgcggggcaggtatcgatctgttccttcacggatttgatctcttttaagatggcttcgttggccatctcatcgggaatgttgtcacggcagccgttgtcgattccttttttctttacagcggataccagtgcggagatggcatcctttctgaatttatcctttgccttcatggcagcaatcatagcatcctgtaattcttttaatttcattgtggtctcctctctggaacaaaatctccaaatgttttctgtgttttattatactctcacagatgaaaactgaaaagaagaaaatgtgaatatctgtcagcttatatccgggttgtttacacagatattacatgttgtttacctgcccaggatagtgtcgctgcaacagttttggtaacatataatgcgccttggagaaaaaagcaactgcgaaacaggatgtagcgtatcatagcacgaatttgcgggcggatggtacaatgaacacgaaataagatgtatataaagacacggtaatcaacacaggatggaaggaaagaagtagaagaatgacatatagtgaaattagaaaaaatgaagaagtactggcatttattaaaaagggaaatgcgaatctgggagccatgggatttaccgatcattcggaggcgcattcgggaccgggtgcagagcgtgtccgctatcggattgcatgacgaatctaccggcggtgctaccgatcccatctcagcggcgctgatcattgcagataagaccgatgtccgcaggagcagagtccgggagaagaataaggcaaccttcgataaacatgaccgcgtcaattatgcggttacggatacgaagcttaagatcaatgtggagaagagagtgatttcactgaatctgcagattgatccgaagatctgcagtatgtatgagtattttgaaatattccttggacgtatgatgatgtgtaagcgcgcagcggaagtgttggaggcatcctttaagctgaccgtgaacggatccaaggtgttgtaaattgagagttagcgaagaaaattgtatctaatccccgtagccctaggcagggtataagaaacgcggcactgcttattcttatacccagccggggctactgatttcttgaaaaccttcatgggtctatagaagataaatttccctgtaggtacttttggggacaggtaaaaaaacaaaaactaaacaatatgggcctatagctaaaaatttgcctgccagatactcaatttcttcaaaatgagtacctcagagccggttttttccctatagacccatattcatctttttatgcgttatttgtagcaattttagtatctcacaactcattttttctgtatagacccaaaatacaggacacccacgacgaacattttagaatatagagttcccttgttataccttccggttttcacattttgggtatcagcagcaaaataagcttcccataccctcgaacttttcatagtgtgggtatcagcaacaaaacaagcttcccatgtgggattgataatcatttaattttacataattagatgtcagtagaaagttttttaatttttcttatagcaatacgataagaaatgtaaaaaaataacaatactacaaggaaataaacagttagaaatattaaggagacaataattctttgattaatctgttcaagatagaaaacagtatcaatttggaaactctcaacaaaaacgataatagtatttaaactagaatagcatagtgcaaatagccaacaccagagtggaaaatgttgggttccattaaaaagaactccttttattgacatccaaatgattaacacatcaggcgctaatggaataacccaaccgtttaagcttgttttaaaaaaataatctagtagataagtaagttcatttgctataattataccccaaaaaagtttaacataaattgtgtgccgaatatttgtgatcctttcatcacagtgaatggtggttttcataagttgtcctcctcccaaaataaatcgtttaatgttttgttaagtactttacatatccgaatacaaagctgaagactgggattaaactttccgccttctagtaagttgatagtagggcgtgtaacattaactttggcagccagttcttcttgagaaagattcatctcaacgcgcgctaatttaagacgcatatttttcatttatataacctcctttctatatgcattatatgatatatcaaacaaaatgtaaagtatatattacaaaaaataataaatacataacgttatgtgaaaaagattattatgttttggtaatagaacttttaagtatttgattcaagtgtcggagtaataaaagagttacgaaataaagtaaaagcaaattaggaggaattgatatgatgccatatgaagtaggaaagacgtttattattagggttccattattatctatagagacttataaggaattatgttcagaaaaagatggattaccagttattaaaaccaaggaaacattgacagggtatacccacaaactattcatgttgaggcggaagaagggtacagactagcttgttcctatctcctgtgcccacgctgaggcggaagaaggacacaggagggtgttcgccgcatcactcttaatttccatccatgactgttttgcatatcttctatgcttgtggtacaataaacagaaagcaggcattttgaggagaaaattgtatgaaagcgcaggaattattatttcaattgcaagataaaagttaccgtgatttccagagcaaattaatcccgacgattcctgtggagacgattatcggtgtccgcattcccgctcttcgaaagcttgcgaaggagtatggaaaggatccggagagtgtagagtttctgaagcacctgccgcatacttattacgatgaaaatattttgcatgcgttgctggtggcggagattaaagattacgaagtctgtgtaaaagaagtggagcgcttcctgccttatgtggataactgggcggtgtgtgatattttttctccaaaggtgtttcgcaaaaacagagatcggctgatagacaaaataaaggaatgggctgcctcagaacacccatatacctgccgctttggaatgggaatgctgatgacacatttcctggatgaggatttccgggtggaatatctggagatcccggcagcggtacattccgaggaatattatgtgaacatgatgatcgcgtggttctatgccacggcactggcaaagcaatgggatgccacaatcggttatatagaggatcaacggttggatacctggacacacaataagacgattcagaaagcacgggaaagctaccgtataacaccggaacagaaggaatatctgaagacgttgaagatgtaaatagaatgatatctgcacaacatatggaagcacgaaaatacaggaaacaaaaaaggatgcaaaattgcagattatgaaaaagatgagagaggataagacagcatgaacggcaacatggaatttcgcagggcacgcagagaagaagcagaagaaatcctgcagttataccgttccctgatcggaaccgaatattgtgtctggacagaaaattatcccacagaacgggaagtggaatttgacctgtcgagaaatgcattgttttgcctgtatgagagaatgccggaacctgatgagagagaacgattaataggcacaatctccatagacgatgacccggaagttaaggcactgtcctgttggtcagaggatcttaccccggtggcagagctgtccagactgggagtggcggtagaatatcagaatcgcggcattgccaggatcctgctgcaggaagctatggcggaattgaaatcacagggttataaggcggtacacattttagtggcaaaggacaatgtgaaagccctgcgttcttatgaaaaattgcattttaccacggcaggggaatgtgagcttttcgggcattcctactggtgttatgagaaagaattatagaagtgatcactatgcaaagcaatgaaacagagaggaaagacgatatatggtaacgatcgatctgatcacaggcttcctgggatccggaaagactacttttctgaaaaaatatgcggaatatctcatggatcagggactgcatatcggtattctggaaaatgatttcggtgccatcaacgtggatatgctgatgctccacgaactcaggggagatcagtgcgaactggagatgatcgccggaggatgcgatgcggagagccacaggaggcgtttccgtacgaaactgatctccatgcgaatgtgcggttatgacagggtgctggtggagccgtcggggatctatgatgtagatgagtttttcgatgtactccgggaggagccgctggaccagtggtatgagatcggcaatgtcatcgccatactggatgcaagactggaggatcatctatcagagcaggcggactatctgctggcatcggaggctgccaatgccggaaaagtgatcctgagccatgcggatgcagccaccagaaaacaatgtgaggacacggtggcacatctcaaccgggcactggaacagatccgctgtgaccggagaatcgactctgagaaggatattttacggaaaaatctcacggatctgacaaaagaagatttagaggaagtatccaaatgcggttatcgtctggaaagttaccgcaagatggatttagagaatgggcagagcttcgattctttatttttcatggaagagaagattaagacggaggctctggaacgggcggtgcccagactgtttgccgacaagtcctgcggagaagtattccgtatcaagggctttgtgaaaaacggagcaggacaatggatggaattgaatgctacaccggacagtcatacgatgcagtctatcgcggtggggcaggaagtgttgatcgtcatcggagagcatttacaggaagataaaatcagagagattctgaaggaggaagagacatgtcaatcttaagtcagttaaacagtgtaccgatgtacctgatctgtggagggatcattgcttttgtggcggtggtctgtgtgatttttctggtgagggcataccgcgccgggcaggcactcggtatggataccacgaaaatgaagcgtacgatcatctccagtgcgaccttttccctgttgcccagtgtggggattctgctgggtgtcatcgccttgtcgggaagtctgggaacaccctggccgtggcttcgattgtccgtgatcggtgccctgcattatgagactcaggtggcgcaggcagcggcagagcaggtgggcatgagcacattgtctgctgcggaaatgacaccgcaggcattttccacgatcgcactgctcatgagcatctgcattatctggggcatgacattgtccattttcctgaataaaaaatatacgcagaaactgacctcgaataaaaaatcagataaaccgggctttggagatatggcaatgactgccatgttcatcggactggtcagcacctacatcggaagatatctcggcggttttatatcggagaacggattgtttacgttaaacggcgattacattccgttagtggtaatggcggtatcggcactggtgatggcagggtttgtatacctcattgagaaaaaaggaaaagcctgggtggacagcttttccattgccggaagcatgatcatcggcatgacggcagccgtactggtggggttgctgtaaagtattcttctgaaaaagttttaagtatctatgaaatgtcggaaagcaaatgaaatagttgaaataaagacattgtgttgaaaacagaaaagctgaaatctgaaacagatattcaggattgagagtccgaagctgaaagctgaatccttaggaagagcaatatattccaagatgaaaggaataaaaattatggaaaataatgtagaattaaataatatcaaactagataatacaggtgtaaatacccccggcacagtcggtgtcgatgcaaatacacagcaaacacagggtgacaaggctgcctgggatatttatacgaagaaaacacatgtcatcgggcggactgtgagcatcattacactggtgatgttagtgggagcaccgtttcttatcggtaagcttttaggtgcgtatccggatctgggggctgtcggcaaggggttcctctctgtgggaatcgtatggctggtcagcagcatcgcagagtttttgatctacacaccgatgctgggagccggcggcggatacctggcatttatcaccggtaacctgatcaatatgaagatcccctgtgcggtcaatgcgagagatatggtaggagcgaagaccggaaccccggaaaatgagatcatctccacgatctccatcgccacatcttctctggtgacaatcctcgttctggcactgggcgtgttgttgatggtgccgctgcagcccgtgttgcagagcgaagtattgcagccggcttttgaaaatgtggttccggcgctgttcggtgccatggcgtacaaatattatcggaaaaatatgaagattgctgcattgccgctgatcctcatgagcctgttgttcattctggtaccgtccctgatcggctccaccagctttatgatcgttccttccggagctattgccatcggtgtggcatatctgctgttccggaaaaagaatacacagaaaacgacagaagaataattaagaaaagaggagagatatgaaatacataggtttgatacttcttgcagtgttagctgtgatcgtattgttactgttgatcgcagtgctccgtaccttattgatgccgtcgaagacttcgacttatgtggcagacgaaccggaggaggaagcactggcactggcccagaagctgtcgaaaatgatccaatatgacaccacctcctatgccaacgtggcagaggtggagaaattcttaggcttccataaggtgttggaggaattgtttcctttggtacatgagaaactggaaaagacagagattgacggcaacctgttattttactggaaaggaaaaagctctgagaagccgatcctgctcatgagccatcaggatgtggtacctgcggagggcgagtggatccacgcacctttttccggagatatcgcagacggcaaagtatggggcagaggtgcatccgataccaaggcctctgtcatggcatttttccaggcggtagaggaactgctggcagaaggattcgtgccgcccaccgatgtctatctggccagctcctgtacggaagagtggggtggtgacggtgcaccgaagatcgtagcagagctgaaacgcagaggtatcgagctgttcttagtctgtgacgagggcggcggtatcatcacggagcctatcggcggtatccccggcaattttgccatggtaggtgtctttgaaaaaggaaaagcagacgtaaaattcaccgcaagaagcaacggcggacacgccagcgcaccgtccaaaggaacgccgattgccagattgtccgcatttgtaaatgaagtggagacacattctccgtttcagaagaaaatgtcagcggaagtatccgcaatgttcacaaagctggctccttatgcaggctttggcctgaaactggtattcggcaatctgtggctgttccgaccgctgttaaaggcagtgctgccgtccatcagcgcccaggcgggagctatgctgaagactaccattgcgtttacggtacagaaaggtgcggacgcctataatgtgctgccgcaggaggcttatgttggcgcaaacatgcgattcattcctcatcagggagaaaaggagagcctggagattatcaaaaaggtggctgataagtacggactggagactgaagtgctgcatgccaatgactttacaccgccggtagatatccacggcgaagcattccgcttagtggaaaatacgattgcagagacattccccggactgccttccagtccttatgtcatgacgggcgctaccgatgcacagttctatcagcccatctgtaagagctgtatccgtttcgcaccggtagtctacggaccggaacagatgaagggaatgcatggactgaatgaaaatatcgagtataactgcctgcccggtgcagtccgtttttacaagaatctgatccgtgcggagaagtaaggagcaaaagctatgaacaccatgacaacgtattccggcagaaaattcgatcccatgcagatgacaccgggagatgtctatatcgaagatatcgcccatgctttgagcttattatgccggggcggtggacagctgacctatttttattcggtgggacagcattcgctcaactgtgcggcggaagcgaaagccagagggtggtctaagaggcagcagctcgcctgtctgctccatgatgccagcgagggatatatatcggatatcattcgcccggtgaaaatctatctgaccaattatctggagattgaaagtaagattatgggaacgattcttacacacttcggactggatgatctgacggaagaggagaaccgccgctggaaacagatcgacgatgagatcctggaactggaactgaagacattgcttcatggcgaagagaacagagaagtgccgaaacttttttccgtaccggatctggcggagcatacgccgggagagatcaaagtcaggttcctgcaggaggcagagcgattgggggtgcacggaagtgatcgttgagaagaagccggagcgcagttattctacgacagtaatgtacattctggcatatttggatcgttatggctatccggtattgattctgatagcaggagcgctggcagacttctaccgggggagaattacaatgttgtttgtactggcagtgggaatattattggatggaatctataatctggtggggtatctgtgtcgttggagacatatttatctctgctatcagagcatgtgccatacgaagatgacaccttcgcggattgagtgggatcggatgacaaaaaaggatgcgtacggcattcctgctactttcattattggcggaatcataggaatattggtgagtatttttctcaggtaaagcgcttataattatgctacaatggtaactattcagagccatgcaaaactgcgttctgcgaatgcttgcattcaggcagataagcagttttataaggaaatagataaaaacaagaaaggtagggtattttatgggatttttaacaggaaagacagcaatcatcactggcggaggaagagcggtattgagtaacggagagtgcggatccatcggttacggtattgccaccgcttatgcaaaagaaggtgccaatctggtgctgaccggacgcaatgtacagaagctgacggatgcgaaggaagagcttgagaaaaagtacggtatcaaggtacttcccgtacaggcagatgtcagcgccggttcggacaatgaagcgatcgtgcagaatgtggtgaagcaggcgattgacactttcggaaggatcgatgtgctgatcaacaatgcgcaggcttccgcttccggtgtaaccatcgcagatcataccaccgagcagtttgacctggcggtatattccggtctgtatgcagcattctactatatgaaagcctgctatccttacttgaaggagaccaagggctccgttattaactttgcctccggtgcaggtctcttcggcaacttcgggcagtgcgcttatgcggcggccaaggaaggtatccgcggactgaccagagtcgcagctactgagtggggacccgatggcatcaatgtcaatgtcgtatgtcctctggcatggactgcacagctggagaaattcgagcaggcatatcccgatgctttcaaggcaaatgtcaagatgccgcccatgggacattacggtgacgtggagaaggagatcggccgcgtctgcgtacagctggcttctcccgatttcaagtatatgagcggtgagaccctgacactggaaggtgctatgggacagagaccgtaagtggttggaaaattttatataataaacctacctgtactggtcaagtgacaaggtaggtttattttttcgcaaaaaatcgggacattttcggcagctcttccgtctaatagtcataagacgtatacttatgaggaagaaaggacgaggcacatgggagagatagaacaattggtgcgcagggcaaaaaaacgggatccggatgcttttacagagctgatgcagcttcatgagaaggacatgtaccggacagccagtgccatccttgcgcaggatgcggatattgcggatgccatacaggagaccattctcacttgttgggaaaaaatcgatactttacagaaaaaccggtattttaagacatggatggtccgcatcctgataaacaaatgtaaagacattttacgttctgggaggcgtgtcgtatgtgtggaggaatttccggagcgggaagagaagaataccgtggagacagaagctaatctggaatggaaggaagccctaagaggactggacgaaaaatatcgtctgatcgtggtcctgttctatgcagaaggactgcggacagcagaaatcgggaagcttttgaagctgccggacagtacagtgcgcacgaggcttgccagagggcgggagcagatggcgagatattatgcggagacagaggaaggaggcggaagaaaatgagaccgatgaatgaaatagagatagaacttccacagatcgtactggatagggcggatgcagcctatgcacagatcagacaacaggcagcgcaggagagtcctgcgggcaggagagtcagaagctttccccgggcagcaggcatcctgttagctgtggtgatactttctgtcacagcagtatccgccaccgccgccggaatcatgggataccgccgctatctggcagagcgcatgactgacatcgggacggaagaattgggacacttggagatggtggcaggacaaggcagtgttcaggcggaatttaacagagaactgacggcaagagaacagagtgtatatgagcagctgacccgggaatatgaagaggatggcaaatatcccgcgggacagcttcatgaattagccgaagaagagaactattccggcacaggtgtagccgttcggagcacccccggggaagaatacggctgtctcatctatctgccgagtaccactgttaccgaagaggaatggctggaagtcatcgaatatgtgcataagctggattacagcatacaggagaaaatatggcagcagaaatattccgagatgtcctattttgatcgttatgaacagatgtcagatgcggaaatcgatgaactgtatgcaatgctttcttccgcacctgtggatgtctggggaggggacagccgtgacctgacaccggaggaacagacccgttatgaagagtggacggaaaagtacgaacaggaaaatgcctatacagagacaaccattgcagtgatcacattcccggaagaatatgacggacaggaacttgtttactgtattgcagacgcacagttttactacccggaacggtcgctgacggatgaggaactgttgcagctgatcgatctggaacacaaaaacctgtatatctacgagcggatccagagggagatcgagaggggaaaacgggcaggatggccacagacatatcatttgcaatagaaaagatacttgacaatagagaccacatgttgtagtctgtagttagaccacaacatgtggtctctctacttttgcaaaagtaaaataagaagatcaaaagaaatctatgtaatcaggaaaacagtaataggaggaaacaacatggcagaaattcagttgggtgtgatcgaggcacgatatgcggatatgatctgggagcatgaaccggtgtcttcttcggaactggtaaagctgacggaggaagcatttcactggaagcgcaccacggcgcataatgtactgcgcagactgtgtgacaagggtctgtttcgcaatgacaacgggacggtgacttccctgatctccagagaagagttctatgcgatgcagagcagacagtttgtggaggatacctttgaagggtctctgcctgcgtttcttgcggcctttacaaaagaccggtcgcttaccgcagaggaggcggcgaagatccgcaagatgatcgatgaagcggaagggggagcagtgtgaaaagaacttctaatcactcagagcaagggctctatcgtgaagaagttctaagtttcacacggaaaaacacgtttttcgttggtacttatattgacgattagtgttggaatggagaatagaatgattcgtatttttgtaatattacttacgatgagcatcggcgcggcatggctgatcctgatcgtattgtttctcagacttctgttaagacaggcaccgaagtgggtgaactgtgtgctgtggggatttgcagccttacgactggtgtgtccgtatgtgccggagagccggttcagcctgatgccgggagtcttccggatgcagaatcgctatggcagtgcggcggatctgacgcttgcacagacaccggtcatagtgggtaatcctacacaaaatgtgattgaaggcgccggggcagcagggctgacaggaatcccgacaggtgccgggacagtggcaacaggctttggaggcgaactgttccagcagattctgtctgtgggaagcattctatggttgatcggtgtgctcgtaatgcttgggtatgccgtatacagttatctgcgggtacgaagacaggtaagtgaggcgatatggctgcgggacaatctctggatttgcgatcaggtgaagtctccgtttattctggggctgttccgacctaagatctatctgtcctccggcatggaggaagcacagcttccctatgtcatcgctcatgaacaggcacatctgcgccggggcgaccagtggtggaaaccgctcggttttgtactccttatgatccactggtacaatccgtttgtctgggtggcatatattctgttctgccgggatctggaactggcatgtgatgaaagcgcggtgagagaccttacgctggaagaacgtaaaagctactcctatgcactgctttcctgtagtatgcaaaggcggctggtgacggtatgtccgcttgcctttggggaagtaggggtgaaaaagagagtgaaagaagtattgaattataagaaaccgtccttttggatcctgctggcggtagtcgtggtatgcgtgatcgtggcggtatgttttctgacgaatccgaaggacggaacgacagttgttttgaccaacgaagcggggaacagcgaagctgatgcggcaacgaatgcggcactggagcaggcggctgcaaaacaggaagaggtggaacaactgaaggaatcacttgcagcacaacaggagtcgcttgcggcgggactggacaccgcaaagcaggagaataccacttggatctatgtggagaacagttcctacagcggtttctttgccgcaaaagggtatgttgcttatgcacagatggaaatggacggtacatccattttcctggtatcggatggatcctatcaggacggagatcatacctatgcaatctcctgtgatgtctatcgtgtgggagcggatgcagcgccggagaagctgggtagcttagagagcggcggaacggcatatccgctaagcagtggtgcagatggaatctacgtgacctcagggcacagcattgaggtgtacaccatcgatgctgccaacggaaagttgggacttgcccgttccaatacggaagtctatgacgagaacggtaatgcgacttattaccggctggacgatcagggacagactgtggaaagcaccgaagaggagtatataaaagaatgggacatctacagcaaggtggcatctcctatagaatttactgtacagaaataggaaaaggaatactaacaataaataagttgacaagcagaacgaatgttctatataatgtatatgggcgttagccttaaggtgctacttcatgttgacgtgaatggcggttcactttttgcggagagttgatagctctgattacatagatcatcccatatgggaaatcttggaaaggaggactctgcttatgctaacaatcggtgacttgattgcagtgattagtctctgcttaacctgtttgggtcttggctattcgattggttctaatagtgataagaccacaaaaaaatgaccgcccctaacctgacaagttgagcagtcattttttctcatataaatcaggtgaaccgtcatcagtagcaccttttctaaaattatgataacatt

SEQ ID NO: 11274 - DNA, 13087 bp, Unknown
  gut microbiota DNA sequence
gtattccgggagttttcattatcttatctgtttcccccatcccttgtattttttgcttttccaaacacaaaatctgtgatatactatagacaataatgtattgagaaggagttccatttcatggcaaaagacaataattatgacgcctcaagtattaccgtcctggaaggactggaagcggtaagaaagagacccggaatgtatatcggcagtgtctccaccaagggtctgaaccacctgatctacgagatcgtagataactctgtggacgagcatctggccggatactgcgatacgataaaagtaacattagaagcggacggctccgccacggtagaagataacggacgtggtattcccgtgggtatgcacgaaaaagggatcagcgcggagcgtctggtatttacgactctgcatgccggcggtaaattcgacaattccgcatataagaccagcggcggtctgcacggcgtaggttcctctgtagtaaatgctctgtctacacgactgacagtaagagtcaagaccggtggctgtatttacgaagaccgctatgaacgggggaatcccgttctggatctggtagacggtctgcttcccatcgtaggtaagacaagggagaccggtaccaccattaactttctgccggacgatactatcttcgataaaacacgtttcaaggaagatgaagtaaagagtcgtctgcatgagaccgcttatctgaatccgaagcttacgatcatttttgaagataagagaaaagaagaacctgaaaaagtcacattccatgagcctgagggaatcatcggctttatcaaagacatgaaccgttccaaagagacggttcatgatgtgatctatttctccggtgagagtgacgggatctctgtggaagtggcatttcagtatgtaaatgaattccatgaaaatgtcctgggtttttgtaacaatatttacaactccgagggcggtacccacctgacgggtttcaagacccagttcaccaatgtgatcaatacctatgcccgtgagttgaacattttaaaagaaaaagatgccaactttaccggtgcggatgttcgtaacggtatgactgccgtcgtatccatcaaacatccggatccccggttcgaaggacagaccaagaccaagctggacaaccaggatgccgcaaaagttgtggcaaaagtaaccggagaagaaatcataagattttttgaccgtaatttagagaccctgaaaagcattatcggctgtgcggaaaaggcagccaagatccgtaagaccgaggaaaaggcaaagaccaatatgctgacaaagcagaagttctcctttgattccaacgggaaactggcaaactgtgagtccagagatccttccaaatgtgagatcttcatcgtagagggtgattctgcgggcggcagtgccaagacagcaagaaaccgtatgtatcaggcaatcctgcctatccgcggtaagatcctgaacgtggagaaagccagcatcgataaggttctggcaaatgcagagatcaagaccatgatcaacgcatttggctgcggattttccgagggttacggtaatgattttgatattaccaagctccgctatgacaagatcatcatcatggcggatgccgatgtggatggtgcccatatttccacattgttgcttaccttattttaccgtttcatgcctgacctgatcttcgaagggcatgtgtacatagcaatgcctcccttatacaaagcaatgccctccaagggagaagaaaaatatctatacgatgacaaggcactggaaaaataccgtaagacccataaagggccctttaccttacaacgatacaaaggtctgggtgagatggatgccgaacagttgtgggagaccacactggatccggaacgcagactgttgaaattggtggagatcgaggatgcacgcatggcttccgagatgacagagcttctcatgggtacggatgtaccacccagaaaagcctttatttatgatcacgctacagatgcggaattagacatctagtatcataagatcctgaaatgtaatgtcagaaagacgaggaccagaaatggacgacagcagaattataaaaacagaatactccgaggagatgcagaaatccttcatcgactatgccatgagcgttatcattgccagagccctgccggatgtcagagacggtctgaagccggtacagcgtagaactctctacgatatgcacgagctggggattcgctatgaccgtccctaccgtaaaagtgcccgtatcgtaggtgataccatgggtaaatatcatccccacggcgacagttccatctatgaggcactggtagtcatgagccaggatttcaaaaagggcatgcctctgatcgacggtcacggcaacttcggcaacatcgaaggagacggagccgctgccatgcgttataccgaggcaagactgcagaaagtcacccaggaagcatttttggctgacctggataaggatgtcgtagattttgtaccgaattttgacgaaacggaaaaggaaccttccgtactgcccgtaaaaattcccaaccttttagtcaatggctcggagggtattgccgtaggtatggcgaccagcattccacctcacaatctgggtgaagttattgatgctgtaaaagcgtatatgctgaataacgagatcacgacaaaagaactgatgcgttatctgaaaggaccggattttcccacaggtggtatcgttattaataaggatgaactggaagagatctacgagaccggaaccggtaagatcaagctgcgtggcaaggtagaattccagaaaggaaaagccggcaagaccaacgtggtgatcactgagattccctataccatgatcggagccaatattgcaaaatttttatccgatgtagcagctctgtccgagaccaaaaagacccaggatattgtagatatttccaaccagtcctccaaggagggcattcgtatcgtaattgaattacgtaaggatgcagatcccgagaactttgtaaatatgctttataaaaaaacccgcctggaagataccttcggtgtgaacatgctggctattgcaaacggcagaccggagaccatgggcttaaagcagatcatcaagtcgaatgtggatttccagtttgaagtagccaccagaaaatataccaatctgcttgccaaagaaatggagcgcaaggagattcaggaaggactgatcaaggcctgcaatgtgatcgatcttgtcatcgaaatcttacgtggttccaaagaccgagccatggcgaaggcctgcctcgtagaaggcaaggtggacgggatcaagtttaagtccaaagagtcaaagatcatggcagcccagctgatgttcaccgagaaacaggcgaacgctatcttagagatgcgtctgtataagctgatcggtctggaactggaagcattgatcaacgagcacgaagagaccatggcgaatatctatcgctacgaagacatactggatcgcagagattccatggcacaggtcatcatgaatgaactggatggattcaaaaaggaatacagccatcctcgtaagacggtcatcgagaacggccaagaagctgtttataaagaaaaagaactggaagagatggacgtggtcttcctgatggaccgttttggttacgcaaaaaccatcgacctgtctacttatgaacggaataaagaagccgcggatgcagagaataaatacgtcttcacctgtaaaaacaccggacgtatctgtctgtttaccaataccggtcagatgcataccgtcaaggtactggatctgccttacggcaaattccgtgacaaaggtgtgcctatcgataatgtaagtaacttcagtcaggccaaagaagagctaatctatatcaccagtcagaaggaactgaacttatgtcaggtaattttcgccactgctgaatccatgctaaaagtagtggacggcggagagtttgacgtaaccaagcgtacggttgcagccaccaaactggcggaaggagataccctcgtaagtgtaacagcactcacggaccagcggaacattgtgctgcagacaaagggcggatttttccttcgttttgctgtagatgagattcctgagaaaaagaaaggggccatcggtgtccgcggtatgaaattatccgacggcgatctggtggaaaatgtgtattacaccaaaaacgccgtggaaaccaccattgaatacaagggaaaagaacttgtcttaaacaatctgaagctcggcaagcgtgacagcaagggaaccaaggtcagagtatagagaaacggagaagaaaacatatgagagtaattgcaggaaccgcaagaagtctgccgttaaagaccccggagggcatggataccagacccaccaccgaccggatcaaagaaactctttttaatatgctgcagacttatattccggactgtgtgttcgtggatattttcagcggaagcggcggcattggtattgaggcattgagccgcggtgccagaaaagcatattttatcgaaaatgccccgaaggcattagcatgtatcgaggataatctggcatttacgaaaatgaaagatcgtgctatcgtattaaagcaggatgcctgtgccgggctgaccggcatctacgaaaaacatgtagatgtaatcttcatggatccaccctacgatcaggagcaggaacgcagagttctggaacagctgcgttatgcaaaatatgtatcagaggaaacactgatcctcgtggaggcctctctgcatacggatttttcttatgtagaggagcttgggtttgaagtaacccgtgaaaaaaaatacaaaaccaacaagcatgtatttcttcgcaggaaataattgcagaacggagattttatgaaaagggctgtttataccggaagctttgatcctattaccaacggacatatggatatcatccgccgggcctcggaaatatttgatgttttaattgtcagtgttttgaataataaagaaaagacaccgttgttttctgtagaggaacgtgttaagatactagaagaagccacaaaagatctgcctaatgtgcagattgacagtttcagcggcctattagtagattatgcacaggaaaaggatctgcatgtcattgtgcgggggttgcgtgccattacggattttgagtacgaactgcagatggcccagaccaaccggatgctttcccacggcaaaatcgataccgtttttttaacaaccagtctggaatacgcttatttaagttcctctgccatcaagcagattgcaagctttgacggagacatcacaccctgtgttccggattttgtagctgatctgatttacgaaaaatatcgtcagaaaaagctttcagacaatcgcaatgtgtaaataaggagagtttcatgagcagtcgaatcgaacaattaattgacgaaatagaagattatattgagagctgtaagcctaagttcatgtccagtaccgagatcattgttaataaggatgaaatcgatgaattgttgcgggaactgcgcatgaagacaccggatgagatcaaacgttatcagaagatcatcagcaacaaagaggcaattctgaacgatgccaaggccaaggcagaagctctgatcaatgaagcaaccgttcataccaacgaactgatcaatgaacatgaaattatgcagcaggcatatgcccaggccaacgaggtggtcaccatggccagtaaacaggcacaggagattttggacaatgccaccattgaagccaatgaattaaaatcccaggcaatgcagtatatggatgatatgctggctcatctggaaaatatcatatccgcttccacacagcaggccagttccaattatgataccctgatcggcaatctgaatcagtatcgggatattatccagtctaaccgtagtgaactccatccggtagatgaagacttagagggtatagacaacgctgacaaggccagtgatgatttaaatgtaatgtaatcataaaaccagttttctgccgaaagctggttttttaaaaataaaggaattgacataatgaaagttagtaaaaaacaaaaaaggctgtttgtcaggacaatgatctgtacggtcagtcttgtcacagcctgttttttttgcagttcgctggaagctgctgcggctccgagagcacaggagaccggagagagggttaccattgtcatcgatcccggacacggtggtgaaaatgaaggaaccctggaaggcattgtccaggagaaaaaaatgaccatggttaccgccatggcaatgtatgaagaattactgaaatatgataatgtggatgtctacctgacccatacggaagatgtcaatctttctctggcagaccgggcacagttcgctgaagagcggaatgcggattttttattcagtattcattacaatgcatccgtggatcatgacctgttcggttccgaagtatggatctcttccgtacagccatacaatgcctacggctatcaattcggctgggaacagatgcaacagatgaaagatatgggactgttcctccgcggcgtcaagacaaaattaaaaaataatggagacgattattacggaatcatccgggagtgcaccgcccgatcaattccttccgctatcattgagcactgtcatgtcgacgaaagtcgtgataccccttattgccagaccgaagaggattggaaacgtttcggcagagaggatgcattatccgttgccagatattttggattatccagcacaagtctgggggtagattacagcaatgaagcgaataatcttccggaagtatctctgcaatccattcttcccgctacgatccgtgatcagactgaaccggatgtctgtgtactgacattgcaaaatgcggattacgacaccggagaggtcacattggaagtgaccgcgacggactacgattgtcccatgatgtattatgattacagtaccgatggagggaagacttattccaaactgatcccctggccggatctggatatcatggccggcacttatccagatacttttaccttttccctgtccttcactaagggagaaaccccggtaatcacggtgcgtggatataaccaggcggatctgtttaccgaaagtgaaccgattacttttgccaagccttttattgatcaggagaaggctgcggaagaagcaagacaggaaagtctggctgcagaagaggcagcggcttcccgcatatcggaaacccaggtgaccgacgtttacggttcggtgatcaccatggctgatgcatccgggaatacgggagcatcctctgaaggcaaaaaggaagtaaatttcggagtgttcctggtcatatgtatcgttctggtggtattacttctgatggtctttctactgtatcagatccaacagagcaggcaccggaaacgtagacggaaggctcagcgcagaaatgtgtccgggcgcaacaggaaccatcccagataataaagtgctgtaagtccggtaagaaacattttatgaaaaaaatatccggtcagagataaaccggtatttcggatacagcttccggtctgggccaggcagcaaagtcctccggcaggtagcagcaataacgtataaagaggccatcgatcccccaatatgcttaaccctccgctgatctccaaaagcggagcacagacacgaccatccggaagaaagatccccggcagcagattcagcagattgaagaagatcatataacctcccagctgtaaaatatttctgccggcagcatacactgcttcatccaatgcttccaacaacggcataacaggtgttccaccggctgacactgtgaaaattgtctgtgacatcggaattttcctgcgatatactgtataacgcagaaggataccgtaccccagtggaataccatacattccgaataaatagggcaggattgattcccggtgcagcagaggcagaacaaatccaagaaaatataccggtccaagattgttacagaaggacagcagatattgtccttccgttacagaaagttcctgtctgtcgcgaaaatcagcaatggtacgggctcccatgggaaatccgcacagaaatcccatcaggatcacataggttccaggtctggacagacgaaatattttttcaaacaaaggttgtaccggtcggatcagactgtttaccagtcccatgcggatcaatgttcccgacaggatcataaacggaagaagcaccggcaccattttttcataccaaagttccagtcccaaggcagcatatgcaaggcttaaggaagaatgtgtcaggatgcagcaggtcattacaacaaaaaaacagattccggatatttttttcatagcagactgccttgcagagtttgtatactatatgccggaaaaagaattttaagtcttaagaaagagatcagtgtccatgcgattggataaatttttatgtgataataatataggcaccagaagccaggtaaaggaatacatcaaaaagggacaagtggcgataaacggtcagatagtcaaaaagccggagacaaaggtcaatgaagataccgacattgtcatttgtcaggggaaagaaatccattatcaaaaatatgtctattacatgttaaataaaccggagggtgtcgtatccgccaccaatgacaatactgcacccaccgtggtgagtctcctgacggtaccggaacagaaggagctgttcccggtaggacgtctggataaagatactaccgggttgttgctcttaaccaatgacggtgctctggcccatgatctgttgtcgccgaaaaagcatgtggataaaacatatcgtgtaaggccggaaaagccgctttccgcagaagatatccaccgtctggaatccggtcttgaaatcggagacgacaaaccgacgtctccggcgaaagccgtacttaccgaagacggagacctgttgctgaccattcacgaggggcgttttcatcaggtaaaacgcatgttgcaggccataggtaatcaggtacttactttagaacgtatccgtttcggcccgctgtccctggatcctgctctttcccgaggagattaccgggcgttgactgaagaagaaatcaaacacttacgaataaaggagtaaattttaatgcaattcaaaagaatgttttccacagatgcctacaaagggaccagcggatatctccgcacccagaaaaattatgaaattttacgaacggtgctttattttgccatttccctgtctctgtttattgccggatgggtcactaccggcagtcgggagaatcttctgaccatcgtagcggtactgggatgtcttccggcatgcaaaagtctggtggagatgtttatgttcttacgctataaggggtgtaacgaacaggatgctgcgcagattgccgcacataccgacggccttaccggactctatgatatggtgtttacctcctatgagaaaaattatgtgattcatcacatgaccatctgcggcaacactctctgcggatacacgtccgatccgaagttcgcagaacaggctttttataaacacattcaggatatcctgaaaaaggataattacagagaagtcactgtgaaaatttttcatgatcttgacaagtatctgaagagatgtgaacagttaaaagaccttcccacacagccggaactgacaggcggaatctgtcagacattaaaaagcgtatctctgtaaaatacttttgaaaagagggatttttatgcagcaactcaccattggtaaaaatcaggctggccaacgtctggacaaatttctgaaaaaagcatttccaaacgccggtaccggatttttatataagatgttacgcaaaaaaaatattacattgaatgggaaaaaagcagaaggaaaagaaattcttgtccagggagacgaaataaaatgctttttctcggaggaaacgtttgcctcgctgtccggcaccgagaatagagaaaccacttctgactaccgtaaagcttaccgttccctaaaggatatcagtgttctctatgaggatgaagatattctgttgctgaataaacccgctggggttctgacgcagaaggcgaaaccggaggatctatccctgaatgaatggctgatcggacatctgctggctacgaatgccatcactgaggccgatctcgccacttttcatccatccgtctgtaaccgcctggaccgcaataccagcggaatcgtattatgtggtaagacgttatccggttcccaggctctcagccgtatcatcaaggatcgtacgataaaaaaatattatcagacaatctgcaagggcaaaattgtacaggagagtaccctggagggttatctatataaagaggaaagtaccaataccgtaaaggtttatgctgatccgtcggaggctcccgctgaggcttcctatatccgtaccatttatatgccaaatgccgtggcaggagatttcacgttgttaaccgtagaactggtcaccggcaagacacaccagatccgtgcccacctggccggcaccgggcatccgttgttaggagataccaaatacggagacaacaaattaaacaggagaatgcagtcggaatactctctgcatcatcagcttctgcatgccggaaggatctgttttccgaaagaggcagaaggacctcttgccaaagtaagcggacagacttttaccgcaccacttccccataaatttgcagaaatcttacaggctctgaatctggctcctgacagtgcctgttagaaaggagccctaacaaatggcaacatggaatacgagaggactccggggatccacactggaagacatggtcaaccgtactaatgaaaaatacgcggaggccggactggcgttgatacagaagattcctactcccattacccccatcaaaatggataaaaacagccggcagatcacactggcttttttcgaacagaagagtaccgtagactacatcggtgccgtgcagggaatccctgtatgctttgatgccaaggaatgtgccgtggatactttttccctgcagaatattcatcctcaccaggtagaatttatgcggcagtttgaaaaacagggtggcattgcttttttcctgattttctacagtcataaggacctgttatactatcttccttatgaaatgctccggtttttctgggacagagcacaggaaggcggccggaaaagcttccggttcgaagaattaaatccggaatatatccttccgaagcatcagggaattctggttccctatctggatattttgaaaaaagatctggaagatcgggaagaataaatttcttgacatcagagaagccacctagtatactacaaatagtttcacgtactactatggtagcacgttagcttactaaagtatataaaagcatataaagcagaggatgttattatgaacaacagacttttacataccccggaaggtgtccgggatatttacggaaaagaatatgccaggaaactggctgtggagcagaagctgcagaatgctattcattgttttggatatgaagatattcagacaccctccattgaatttttcgatgtattttccaaggagatcggaaccacgcccagcaaggagctttataagttttttgacaaggaaggaaatacattggtgctgagaccggactttaccccgtccattgcccgttgtgcagccaaatatttcatggaagagaaggttcctcttcgcttcagttataacggcaataccttcaccaacacatccaatctacagggtaaattaaaagaagtgacccagatgggagccgaactcatcggtgatccttcggtggaggcagatgcggaagtcatcagtatggtgatcgaagcgctaaagagcacaggactgacaagatttcaggtaaccataggagaagtggactatttccgtggcctctgtgaagaagcaggtctggatgaagatacggaaaaagaactccgttcctgcatctccggcaagaattttttcgctgcgcaggaactgctggaacagaagcagattccggaaccttatcacagcattttattaaagctggcggatatgtttgaaaacatagaatctctggaggatgccaaatcactggtgaaaaatgaacgttccttacaggcgatcgcaagactcgagaaattaaaaaaacgcctggagcaatatggtgtagcggaatatattacctttgatctcggaatgctgagcaaatatcagtattataccggtgttgtttttaaggcttatacctatggtatcggtgatgccgtggtaaagggcggtcgttatgacaacctgcttagaaagttcggtaaagatacggcagctatcggttttgtcatcgttattgatgatctgctggaggctttatcccgtcagaaagtagtgattgatgttcccgcttccggccaatttttgtattacagggcaggagacgagacggattatcttgcaaagcttgctgaggctgcaaaattacgtaaaaaaggcattcccaccgtactttcccccgacatcactgagaacgaggaggcagaccagtaatgagtgaagaaagatatcttacgtttgctctgggaaagggcagacttgccaaaaagacactggaacttttcgagcagatcggtattacctgcgacgaaatgaaagataaagataccagaaagctgatatttgtcaatgaagaatacaaattgcgctttttcctggcaaaaggccccgatgttcccacttatgtcgaatacggtgctgcggatatcggtgtggtcggtaaagatacgattttggaagaaaaccgtaatgtctatgaagtcctggatcttggctttggcaaatgccgtatgtgtgtctgcggtcccgcttccgcaggagaacttttaaagcatcatgagaggatccgggtagccagcaaataccctaatatcgccagagaatatttttacaacaaaaagcatcagacagtagacattatcaagttaaatggctctgtag

SEQ ID NO: 11275 - DNA, 19689 bp, Unknown
  gut microbiota DNA sequence
ccaaaacacagaacgcccacagtggacggaatgtcatgccgcgatgtctgtcggagggcgttgatattttcttgaaaagtgctgaaaaacagggggaaagcggacacgatgtccgcgtcagccaagccatgcttgcatggcttttggacgccatggatggcgtctgtaggcggccccgtcatgatgagaaccgctgtatcacttttcaatagaaatttcacacctggagacgtgacatcaagccgtgatgttccgttcgccgtgggcgttcgtggggtctatggcagccctacgttacgagccatgcacccaattcataaatgtgtcgcaaagggcgctccacttacaaatatttttttaacagatctaccttgtccagtttctcccagggcagatccacatcggtgcgtccgaagtgaccataggaagaggtctgcttatagataggtctgcgcagatccagcatcttgatgatacctgcgggtcttaagtcaaaattctcacggatgatctctaccagcttgtcatcatgcagtctgccggtaccgaaggtatctaccatgatggaggtgggatgtgctacgccgatagcgtaagacagctgaatttcacacttctcagccagtcctgccgctacgatatttttagcaacgtaacgagcggcataagcggcacttctgtccaccttggtgcagtccttgccggagaaagctccgccgccgtgacgggcatatccgccgtaggtgtctacgatgatcttacgaccggtcagtccgctgtcaccgttgggtccgccgatcacgaaacgtccggtaggattaatgaaaaatttggtatctgcgtcgatcatgtctgtgggcaggatcggatcgaatacgtattttttaatatcctcatgaatctgctcctgagatacatgctcgtcatgctgggtagacagaacgacagcttccagacggacaggcttgccattctcatcatactctacagatacctggctcttaccatcgggtcttaaataagataatgttccgtccttacgtaccttggtcagctgtctggtcagcttgtgtgccagggagataggatacggcatatattccggagtctcatcggtagcgaaaccgaacatcatgccctggtctcctgcaccgatcgcatccagctgctcgtcagtcatatggctctctcttgcttccagtgccttgtctacgcccatagcgatatcggcagactgcttgtccagagacaccataacggcacaggtattgccatcgaagcctttctcggaagagtcataaccgatctcggtcacggtcttacgaacgatagcgggaatatcaatgttagccttggtggtgatctcacccattaccagtacgaaaccggtgttggtgcaggtctcacatgctacacggctgaacggatcctgctccatcagcgcatccagcaccgcatcagatacagcatcacagattttatcgggatgtccttcggttacggactccgatgtaaataaacgtttttccatttgtcctccattctgcttccctatgggaagagggtctagtggtgtataagttacttaaagtcctatcatccaacgccatattctcaaaattgcatcttcgatgccagtcgttctgaatgatacaaaaaagtccgctttgttaagcggactgatttaacgattgatcaaatcctcttattgttcgacaattgctcgctcaggtgggcaccttccgcatctcgtatgcggggttgccgtggcttcctcgatcctatgtatctccaccactctgaataagggaaagtctatatgaacttttctacgtaggctagcttactatgagatgccctatttgtcaacagacattttttctcagttgtagcacgcactcagttgtagcatcagtaatcccgacaggatcaaccgatctttaatttgaacttccgtaaatctctctcggtttcgatcaactcgatctgcgctcccaatccctgtaatttcagatggaagtcttcataacctctctcaatatagcggatgtcatccacggtggaaaagccttccgcagacattgctgccagtaccagtgcggcacctgcccgcagatccggtgcggaaatattcgctccggtatatctggatacaccgtcaatgatggcggtattgccctctactttgatattggctcccatacgggtcagttcatctacatatttgaaccggttctcgaaaatactctcggtcacgatgctggtccctttggacagtcccagtgccacggtgatctgcggctgcatatcggtagggaatccgggataaggcagagtcttcacctgcgtatgctgcagaggcttggatgccaccacgcggatacagtcatccgcttcctctacttcacagccgatctccagaagcttcgccgtaatagactccagatgcttggggatcacatttttcaccgttacatcgcccttggtcaccgctgccgcgaacataaatgtgcccgcctcgatctggtcggggatcacggcatactcggtaccatgcagatgagatacgcccttgatacggatcacatccgtaccggcacccttgatgttggctcccatactgttcaaaaagttcgccaggtctaccacatggggttccttcgctgaattctcgataatggtggtgccttctgccattacagcggccatcatgatattgatggtagcaccaacgctgaccacatccatataaatatgactgccacgaagatgctccgcatgggtcttgatcagtccatgctcgatcttcacctccgcacccaaggcacggaatcccttgatgtgctggtcaatggcacgacagccgatatcacagccgccgggaagtgccacctccgcatgcttatattttcccaaaagagcaccgatcagataataggaagctctgatcttcttgatattttcatcttctactaccagttcactgatattggatgcgttgagagtcaccttatggcgatcggtgcgctttacgatcacaccaatgttctccatagcgcacaaaagtacgttcgtgtctcttacatccggcatattttctatataaacagtctcatccgtcattacggaagcagcaagaataggaagtgccgcattcttagcacctcctatttctacttctccgactaatggattaccgcctttgattgcgtattgttccattgtttcttacctctgttattctcagatcagaaaaaccttcttatgcacttataccacattttggggaatttgtaaatacaacaccctaattcaggtacttgagcgggttcacctggctgccgttaatcagaatctcaaaatgaagatgaggtcccgtactgataccggtatttccgctgagtgcgatacgttctccctgttttaccgtctgccctgccttgaccagtaccttgcttaaatgaccgtatctggtctgtctgccgtcctcatggttaatgtagacacaataaccgtatccgcttccccatccggctttcgcaacggttccgccgcaggatgcaaataccgcagttccagtaggaaccgaccagtctactcccttatgatagctgctggcacccttggtcggtgactttctccgtccaaatccggacgactgacgtccgccggagatcggtttaatataggtgggaggaatcttggttccccgttctacgatcttcggaaccgcctccataacaacctcttccttcagaatatccctggtcacctctctgtcattcagataggatacgtctgccaccacgcggcggaagcccgcggaaggctgctgtaagatcttggtctgtgtcgtataccaggaatcgttgtccacatagattacatctgcatcgtagatttcttcgtagtaattctgttccatgcgctccacggacagctcgggctccggcacggtaatgatcagcttgtctcccacacggatcgtagaattttcatctgtcagtgtctcactgttcatggcaatgatctgatcaatgggaatgttgactttaatggagatctcggacagggtatctccactgaccacctcatattcaccgggagtctcctgatccttgatcacatcctcgatcgcctgatccaatggcgtcagcatattctccggaagataggtctccacgatctctaccttctccgcaaaatccatagtcatcagacccagctcgtagtcctcgaaatccttttcttcctgttgatctgcctgggcgccggcctgatccagggttgtctgtacaccacccgcatagatggcttcttccttctgctcttcctgtacggtcagttcctgacgattcaccacttctgtggtaagcacattgaattccttctgtgcatcatgcgtcagttccacactgaatttttcttccgaatcatatttgtccactgctgcctgcagcagagatttcacctcgtccacactggacaggttaaccatgtattcatttaccttcatagtataagatctgtgggatgtctcacggatactgctctccagctcacgctccatggctgccagcatggtatcttcccctgtcagtgtgccccacaaagcttcttcgcccacaagcttcagatctgcgtctataaaaatcatatcctcgctctgggaagcgatatttcttctggcttcctgtaaaagctgttccgctctgtccgcttcgcctacggttccgatctccgttccgttcaaaaatacatgaaagtaattttctccggtcttctcaaacactgtatatccttttaggaaaaaaagactcacaaaaatagttaccagcgtggttttcacatatgtatattttactctcttcgagtaagatgtcagtttcttcatggattccttctcaatctattgtatctatatcagtatgtccacataggacttttttatgccgatctgttgtaataactttgtaacatatagattctatcagcatttatatgccttgtaaagcaagaatatctgttcgatttatatgttttccgccgacgtattctatgctatactaactatattggaaaagttttgcagagaggagctgcctatgccggaccgcgatcaccttatttttcacattgatgttaattccgcctttttaagctggacggcactggagcgtctggcgcagggagattccgtggatctgcgcaccattcccgccattgtggggggcgatacttccaccagacatggcgtcgtactggccaaatccatccccaccaaggccttcggtatcactacgggggagcctgtggtcaacgccctgcggaaatgtcctcatctggtcatggcctctccggatcattccatgtaccgcgaaaaaagccggctgctcatggaacatctgtcaggtatctgcccggacattgaacaggtcagcattgatgaatgttatatggattattccccgatcgcggcgcagtattcttctccggaagctgccgctgcttacattcgtgattctgtgcgggaaaaatttcattttactgtaaatgttgggatttcggaccgaaaggtcctggccaagatggcctcggattttcaaaaaccggataagacacataccttatatcaggaagagatcccggaaaagatgtggccgcttcccgtctctaccctgttcacctgcggacattccagtgcggaaactcttcggaaactggggatcctcaccataggtgacctggcgaagacagaccctgtcattttggaatcgcatcttaaaagccacggccgtagtctgtggaaatatgccaatggcatagacgattccgttgtagcactcgttccttccaaagcaaaagggatcggcaattccaccacgttaagcagtgatgctctgacggaagaggacgcacgtaaggtattactgtccctctgtgaatccgtagggcagcgcctgcgctcctcccatcagctggcaggccaggtatgcaccgagatccgctacagcgattttcgcaatgtttctcaccagatgcccctgaccgtccctaccgcctctccggatctgttgttggaaagcgctgtttccctattcggcgaactgtgggacggaactcccatccggctgttgggtgtacgcacctccaagctggtacccgaggatgaaccggtccagctcagtctgtttgattacaccgcaccacgctctgagaaacagcagaagctggatgctgctctggatgatatccgtgcaaaatacggaaaggatgctgtaaaacgtggaagttttgtttaatgctgtgtggtgatgatcatattgcataccgctttctcttcaccggcattgcggtatacatgttttctgtcacatgcaaaataaagtgagcttcccctttccacatgaaaactctgatcgtccagtataagttcgatctcaccggatactaccgtcagatactcccatgtctgttctccgtaggattcactttccatctgtgcttttccgtccagttctccctgatagatttcaaaattcctgctggcatcaaacggaagcatcacatagattcggtactggccttccttttccttgaagaccggtgcctcctccggagagggcatgaccatgatctcttttctgtcatagatcagctgttcgaaaggcaccttcaaaccctccacgatttttcctatagtggacaccgtgggattggattctccccgttcaatctgtcccagcgtgcttttactcactccggtgcgttctgccagcatatccagactcatatttttggacttacgaattcttttgagattcaatgctatgtttttatccaactgtgtcatacactcacccagactttccgcataaaaaaagcaccagacgcctgtctgatgctacttcttcgtagtaaataaatatttatgtatatgatatccgacttggtgccaaacgtcaagttctttttttccggacactgtacccgaaggtgcccaataattctccacagccaaagtaggatccatgggaatacatgatcggttccgcctgttccagatggaacttgtggttctcgtccatatatttttcgtcagcatgaacagctaccacatccgccagaaacatatcgtgagatcccaacggcatgatctggcgtaccttgcattcgatgttcacgggactctcgccgatcatcggcgccttcaccacggatgcagggactgctgtaagcttcatctctttaaatttatccacatcccgtccacttctgacaccgcagtagtccgtggcgtagaccagttccttcgtagtcagattgatcacaaactctccggtctccttcagaatcggataggaatatcgctccggtcgcacggagatcgataccatgggcggattggtacatactgttcccacccaggccagggtgataatgttgggatgcccctcctgatccgccagacttaccatgaccgccggcagcggatataacatattgcccggcttccaaagttctttacccatagttaacctcgttttccgtatttcctagaagatatgaagaatattcaatacatgcagtacaatatctgccgcagctaccaacagtgcagcgatcgatactcccagcactccgtttaatttaccgttcaggctttctttgatcttgcctgcgatcgcttcggtctgcttctcattttcctccaccacagccgcctgcacattgcggtatacctttacgcattccttatggacgttctcatcacttccgtccagtttctcatccaaatgtttgcgcaattcctccagttcttccgtgttctgtcggatctcctccagctttgtggtatattcctgctgcagctcctgcagcttttccgtattctcctgctgcatcttgcgaatggcagctacgctttcctcggaaagctttgtcacctccggagcaatcgtctcggacatcagtgtctccatcgcatgattgactgctctcagttccttattgacctgctgcatctgcgccaggcattcgtcatattcccgcagctgattcttcagctgattcatttcctctgcatccgctgcggagttggccttgatcatctcctgggcattcagcttttgcgcaagtttatccataaaagtatccatccattttcctccaaacatattcgtccctcatgtgaacctttttccgtttcaactgctcctattttaccatgtttctcccacggttacaaccagaaccccaggaatactgcgttttcaaagcatgttcgtttttatgcaatttgtacaatttgtttttctgtttctgtgctttttcgtaaaattcaccaagttttcacatcatgttcataatttgttcataatcgattggtatactttaattacagtcaaggaagagataagacttccggataacaaagcatataagataaattttttcataatagcccaggcgccgaaaggtgtctgggcactcctcattttatgggggttttgcatgtcaccagcagaagcttttgcattatttggatgttccgctatttaattgtttttcctcttctctctttttgctgatcgccaggatctcttcgttcagagacagcatccttgcatccagatccgataccatgcgcgcacattctaccagttcgtttttgatattctccggtgcatccccttcgaatttgtaatgaatcttatgctccaggctggcccagaaatccatggctaccgtacggatctgtacttctaccttcgtatccactgtacgatccgacaaatatacaggtatgcttacgatcatgtgatagcttttgtaaccgctggccttgggataagtaatgtaatctttcacagcgatcaccttaatatctctctgatcccggatcatgtccgcgatccggtagatatcggacgtaaaagaacaaataatgcggattcccgcaatgtcatttatgtactttaccatattatctatcgtagattcctgtccgtaacgtttcaatttcttgacaatactttcaggtgtcttgatccgtgccttaatatgttcgatcggattgtactgatgtacatgctggaattcatcattcagtatctgcatcttcgtctccatctgacgcagcgccgcactgtataccagcgtaacctccttccagctatcgattccatccccattttcaaccttaaactccatattccctctcaatctcttctgtcacagaaggctctgcgaccattttgtcatatttcttacttccatagacgctttttcgtcacgaaaattccgtattcgtaaatgtacttatgataattatagcatacctccttttaaaaatgtataattttaacaaaacctttatcattttttaagattgattgggcagttttattgctttttacttgcaggtaattcttcttgcgattataatctataagcaaagaatcctttgtaccaccatttcttaatgataagtttataaggagattttccatgtttcgtctgtgggctaaaatatttcaaaataatcatatgctgaaggatatttgtatcgaggacggcagcaatgatacccgtacccataaagtttttcactctctggacgaagtctgccatcagttggatcttggtacgcccatctggctggatctgaacatttctgatttcaaacggcataacaagacccgttttacccaggacagttttgtggaatctattgatttcgactatctggaaatacaggtaatcgaagaagactgataattgctattgacttttccttttttctgcggtagtatttgctttgttagatgtagtattgaatactacgtgtagaggtttgtaaaagcatgtgttgttattctaatgaataatacatctgttttgcggatagaatgttctaaaaaggaggagtatattatgcagatcacaatcagagaacccggaagtgccattacacattttattgccatgatgatggctgttttcgcaactgttccgctgttagtcaaagccggaatccaatccggatgggagaatttcctggcaatggcaatctttatgggaagtatgatcctgttgtacggcgccagtgccacctatcattccgtagacctcactggaagaagtctgcgtgtctttcgtaagctggaccacatgatgatcttcgtactgatcgccggatcctatactccggtatgtctgatcgtgcttggtggaaaattaggttataccctgcttgccctagtgtggggtatcgccgctgtcggcatgctggtaaaagcctgctggatcacctgtcccaaatggttttcttccgtgatctatattgccatgggctgggtatgtgttctggtattcggacctttgcttaagaccctgtcagtgcctgcgttcctgtggctgctggcgggcggcatcatctacaccgttggcggtgtcatctatgccctgaagctgccgatcttcaatgcaaagcataagttcttcggctcccacgaagtattccatttatttgtcatgggcggaagtatctgccactttatcttcatgtatctgtatgtcgcatgatctcagtaatgtgaccgctatacaaaaagaagaccgtgtggtattttaccatacggtcttctgagttttatttattcttcgtatccgttgggattgttcttctgccatctccaggaatcttcacacatttccttgatgccgttctccgctttccaaccaagctccttctctgccagagaagcatcggaatagcaggtagcgatatcgcctgcacgacggggtttgatcacatagggaatcttcacaccggtagctgcttcaaagttcttcacaatatccagaacgctgtagcctacgccggttcccaggttgtagatcttcagtcctgcattctcctcgatcttcttcagagccttcacatgaccctttgccaggtctactacgtgaatgtaatcacgcacgccggttccgtcgggggtatcataatcatcaccgaagacacccagctctttcagcttgccaactgccacctgtgtgatgtaaggcatcaggttgttgggaataccattggggttctcaccgatggtgccgctcttgtgtgctccgatcgggttgaagtaacgaagcaggatcacgttccattcgggatctgccttctggatatcggtcaggatctgctccagcatggatttagtccagccgtaagggttggtgcactgtcccttggggcattcctctgtgatggggacaaatgcgggattaccatatacggtagcgctggaagagaagatgatgctcttcacaccgtgttttctcataacatctaccagagtcaatgtacctgcaatattgttctcgtaatattcccagggcttctgtacggactcgccgactgccttcagtcctgcaaaatggatgactgcatcgatctgctccttgctaaagatctcctccagcgcttcacgatccagaatgtctgccttataaaaaggaacctttttgccggtgatagcttctactctggggatcaccttctcacttgcattgcagagattatccaatacaacaacatcatagcctgcctgctgtaattccaccacggtatgactgccgatgaatccggcaccacctgttaccaaaattctcatactctctcctatccgccgcataccgaacaataccatttgttcactgctgcgaccgcactatctctcatctgtcagatccggatgagattatttcttcgtttcttacagtatcagattactgtaattctgttgtttcctcaataaccttatgttgtgaaaagctgtcgaaatgtttacagcgcaacgccattctcaacgagcagttctcttgcactctccaccgaatccacaccggttttattcttgatgggggcaaattcttttcttctgactacctcgaagggcaggcagctgtccatctggtggatcatatccagtaccaggctctcgaatttgtagccgttgggagtctccggcttcaccggttctccgttctcatccagatacgggatttttttctctacgatgtgcaggggcattttttcttccatgatcttctccagatcctgtactttgaagagataattcaggataactccgtagttatacgcgggttcgcccttctcatccttcgcagtcatcagttcatcggtcagctcatagtactccacgatggaaggtctgccgtcctctaagcacataacgcctactttttcatccggcgcattcttgcggaccaccttggagcctacgacacagcctctctggatcgtagcaccgataaagcagggatccgcgatacgctgcaggacgttgtccacggcaaatacattcagccattcaattccctcgttatgtacgatatccagcatgccgttatttttcatggaaatgaaccagccgccgttgccgttgggagaggtggacaacttgcccttctcctccagataaatcttaccctcgtaatcggtagccgccgccatctcctgcttgaaaaagtgcacatactccgccttgtatccgaaatagtcatgctcctgtaaaaaagcgatagtggcatcgttatttttatcactggtcatcacaaacagatggatccatgcatctgcctgatgtacgacttccagcagattattgatcagacactcaaaaatatacagctcatgggtcagtcccacattgtacattcccttgggattgtcagagcctaatctggtacccatgccgcctgctaacagaaccgctgctaccttcccctgacggatcgcctcgataccggtcgccgtaaaattctctctgtttgcctcgatctcgtctaactgcattgcagcaagtggggtgatcactcctttttttgccagatcctccttgtgcttacaagcttccaaaatgctcatatctgtagcctcgatctgatccagaatcccccgcttctcttcttcggtaagttccccgtaatacttcagaacatgttcctgaccatactttgcaagcttctccttagcctgttccagtgtcatactcatattctacctcccattttcttaaactgtcattgtcagcaacagtcaatttttttctattatacttgatattccctactattgcaaacctaactcccgggatcgtttccacccgttaagattctgtaaatgtgttgcaaagattctgtaaataacccgacaaaatagtgttaagggtctggcaaaactattcacccggggagatctgtttactataatacggtatgtgaggttttttaaaagcttcatcgaatgctttgcagaatgacagaaagttgaggaattcattatgaatattggaattttaatcattgcaatcgtaggcggtgctaccggacttttatccacagcatatctggcaatcagtttccctgctgtgctcctgtggaaactctatcgcagggtggtccacagaattcccctcacccaataagctaactacaaacactttccctctaaaaaggacccggaagctttcgcccgggtcccttgtcgtattcacgtattctgttttactcctgcaccggatcccaattttcatccaccaaggtcgcagttactgtaattccctccggtgcattttctgcacagatcaccagataaaacatctcctcttcttcatccacggcatattctgaaggatcctcgatcttatatacagcaaatccttccggatactgctgtagctcgataaatccactctctaaaagggcttcgtaataagcttcttttactgcctcgctgtctccgcaggcataggtcttcgcggaagcaaatatgccttcctcactgtccgtctccgcaaggccttccaacacgtcatccggatatacaatatcctgtttcacggcttccaggtattccgatgacctgccgatgctctgccagatctccagggtttcttttccgtcctcggaacagatcatgagcaccaggctgaaagccaggataattccgtagatgcccagagctgctgccagtattttggcataggggttctccggctgtcccagattcgtataggatgtgatgatccagccgaaattacgataatccactgctgcattacagtagtcacatactccgccgcctaagatatccacactgccaccgcagttcgggcatttatattcccgaagtgccttgccatgttgtgtcacgatctcctgtctgccttccagttccagccgcagtttctcatagcggttgcgaattttactacccgtatcctgcgtcaggcgcattttcacttccacgctcagcctgtaccggtcctccaccgcttccgctttcaaaaaacgtacgccgcagatacagcaatccaccacattctgataccgctccacagtacctgtcagatcgcagaccgcgaaaaagcgcacctgctctgcggtatctgccatgtggatcatccgtagctggtactccagattctgtaggaaattacctgtggaaaattgggggatcagagcctttacttttgactcgtcctgaattttcggttttctatgtttctccattacaacaatcattactacgaatatgatcgccatgaaaaacagagatcggaaaaacaccggggcaaatccgataccaagcatcattgccgctgccgctttgaccgcgttataaccatttctccccaaagccagcagtaaaaacataatgccgcccgcacagattgccagcagtgcaagggcaaccgctacgattcctaccgtcactccggctttgataaagttggatatgcttttctgccttgcgtcctcttccagtgagaatccggataccttagtctcgaaatcactgactagaaactttgctccgcaggcatcacagccatcgatatagctggataattttccttcatgaccgcagtttgggcagatcgccatatccccctgcacatccgctttcaaaaaattggcttccacgatctccggtgtcttcagggtcgcgatttttttccctttacggtaataggtacgtctcatcttcacagctttggtccgatggcaggtgtaatcatagccgtcctttttcgggccatcgtaatccgccggccgcaccggttcctgcatctccatatccaccgtcaggtcccgctgctgtaatcttttcccacttaagcaaaggctctgccagaagggctgtgtcgtctgttccatcaggttctgctctgcttttgcatttccctgatagaaggctttcagttccccgtaaaagtcttctgtccgtccttcgatctctctccgtgcatcattcaaaaaatctgttgccatcgtattctcccctcacaaatgtaatacgtgatatgcattcattatataaggtgtcatcatccatttcaagataatttcccgtacagaagctattgcctgcccgaacatctagtgctgatggagatatttttctctggtagccagtccgccccggatatgtcgttcagacttgttgatatccagaacctttcttgcctgtttcgccaacgacggattcacctgcaccagccgctccgtcacgtccttatgtactgtgcttttcgagatgccgaacgccttcgctgtctgccgcactgtggcgttgtggtcgatgatatagttggctatcccaatagctcgttcttcaatatagtctttcaaaagaaaacccctcaggatacttttttacagtgtatgaaagtatctgaggggttatgatagggattggcactacttcagaagtttttgcatccccatatcatccgcttattcacaattattttttcatcgttcttgacagataaacagcttcttgctgctataccggatgagaaatggattttcagcatgatattattgccttcatagctcagagataagtaatagccgtcttcattataagccctataataattttctcccttatcataatcaacatcaaagccatagtaaagttatctttattcatagcttctttcgacagtctggcaatcatctgatttgccctttcaatcagttcagccatttccgtcttctcttcctttagtttctgcacccggtattccaatgccttttttatttcagtatcaggagcatcaataatcattgtaatttctttgattgaaaatcccaattgctgataaaatttgatttgtgcaattctcatttcagcatccttgtcatacagtaaatgtccatacttatttcgacctgacgctgttacaagtcctgccttttcatacccttgcagtgcccttctggataccccaagggtttcacagatttcccgtaatgtcatgccattttttaccttccctttctagcctaaagctgcacataatgtgcagtcaaaggctttatttggaagaaccggatatatttcctttcttccctttaagggaatgtttttttcgcgaattttacgctcctgcctggctgacacgcatgccaaagaatctcttgcattctctgtttaaaatacgtataatattagcaaaatagtacgcttgtcggtcaaatgactgtataagaaaaggaggaacatttcatgaaattgacaaaaatcgaacaggtaaatgagtttctttctattgtcgacagttgtaagggggacgtaactttaagatccttagacggtgatatttttaatctaaagagtaagctttcccagtacattgccattgctgcattgctcggacagcatggggatgagcttgaattgttctgttctgacagggaagatgaaggcaagttcatgcaatttttaatggaaaatcccagtatataataaatctttatagcaaaaactgcccggatacttcgttctcagaaatatccgggcagtttttagttgatagcatggaatttttattttctatcacaggtcaattttacagcagctgcagcagtctccggttcctgcgatagcagaatactctgtccgacaacatctcttcttctccataaatggcattgatgtgttgcacagatgttctgatttcctctgcatcgacgcaggctaccggatgaatcattgcctcatgcagacttgggaatactacataataatcgccacgcattttttccgcaagaatatctttaaccccaggataaaaaaaagctgctgctccgttgatccgtcctgttgtggtcaggaggtatccagtccttccctccataggattccatggagcaatctttgtcggccgccccttctcatccgggaggaacacaccctcataataagggaacccggggcgtctgtcactacccaggtacagtctcggcggcattttacggctactattcataaaagcttccatgatcagttgatcctctgtccgttcccacgtcattatcctgttgcgggataattgcattgtcagattgtctgggttcccttcgcagataatcagctgaagtaccagtgcaatatctccaatcttacgatggattgcattttcaagcgtgtgcctgtgtctttcaaaatttactggttgtatcctcatatgacctctgcagacagcataactcagactttcctctgtaaacgacacatcttttttcttatctgattcttcaagacctgctgagatctccggcagaatactttgccacccttcctgtctgtatctttcgtataacggtcgtaccggccagtactgtatctgctcttccctttttaaactccacatggcacataacatatcttcccggatgagaatattctctcttccatacatatggcgattcataacactcatgatatgcactgccatgggatccgagcaaatcatttgccgctccaaaaggcgtattgttttattctgcgccgtctccatattctgcacgttccggcacaatgcttttttaaattcttcgtatgtcatttatcccccatattcaaaattagtctgttctgcaaattctcctgaatttgcgtacaaaaataaaaagaatcgttcaaaaaaattggaaattccgaccgaatggtctgttaagaatgctcatttttctgaaatgaaaacatatggctctgaataactacagactatcatagcgttcccgctttgtctatatgcgtttttaccaatgatatcttttgtttattttcactaacgggtgggctcagaaacgtgcgccgcaaggcgcacatagaaaaaagccttgctttccatgaaaacaaggctttttaatgtcaaatattcaaatatatccgactgtctgctacacaacccgtctcactgcaagaatgggacgataatttgcattgctgaccttaatgccggtacgctgggtgctggcatgtacgatcaatcctccgccgatatacattgccacatgtccatcataacagatcagatctcccggctgtgcactgctataatccacaccggtaccgcagcttctctgctcataggaagtacggggaatactgtaaccgaagtcactgtatatccggaaggtaaatccggagcagtctgcaccattggtcaggctggtgcctcccgccacgtaaggattgcctatgtactgacaggcatattttgccagccgcttacccatatcgctgccggatgcattgtcgatcacagaagtataattcgtggtcgtgtagcttccggtagccgctgcggtgttgcctcgctgtgcctgtgcctgcagctgttttaactgtttctgttcctgctgcagcagtgcctttgccacggaagcctcctgctttgcctttttaatctccgcatcgaagttagcagattccttcttcttcttcgccagcatgacatccaactcagacttctggctttccagatctgccttatcagcctccagctggtctttatccgcctggagctgcgtcttctcttcctcgagctgattccacagtgccagcacctgttccttggtctcctcatattcctgcagcttctggcggtcatattcgtagacactctccacgaaatccatgcggttcagcatgccgcttaagccgccgccctgcaacagaagattcacgtaattctccgaagaatcgttctcatacatcatccgcatccgggtgatcatatcattgtgctgcttttcttccttttctttggcaatattgtattcttcctgagtctgatcgatctgtacctgcttgtcggcaagttccgtctccttttcggcaatctcatcttccttcataccgatactggtcatggtgttgatgatctctgcattcaggtcatcgatcttctcctgcaccagatcctgctcatcctgtaaggaattgatctggctgttgatgttattcagctggttctgatgattgttgattctgttctgcagttcacccatggaaggtgccgcctgtaccgtctccgcaggagattcccagacggagccggtggcagtcagcgttaccgctgccagaagaagagcactcacaagtcttctcttcacgttattcacttttctgtcagcggttgtttttttcataaatatctaatactccattttccctatatccggagtaccccattcgcaaaatcgcatctgcgatgcttgccttttgctcatgtggttacttcgtaacatacattttgtcagatatgcttatgtatgcaagcatccaacgcatatctttca

SEQ ID NO: 11276 - DNA, 2757 bp, Unknown
  gut microbiota DNA sequence
attccggtgatatacattacgcaacgctcgaagcccagtccaaagcctgcatggcgtgcagagccgtaacggcgcagatccagatagaactgataatcttccttgttcagtcccagctcttccatacgcttctccaggatctccaggttgtcctcacgctggctgccgccgatgatctcgccgataccgggtacgaggcagtccatagctgctacggtcttgccgtcttcattcaacttcatatagaacgccttgatctccttcggataatcggttacgaataccggtctcttgaattctttctccgtcaggtatctctcatgctcggtctgcagatcacatccccagaataccttgtaatcgaattcatcgttgtgcttctccaggatcttgatcgcctcagtgtaggttacatgaccgaaatcagaatttaccacatgctgtaatctctcaatcagtcccttatctacaaactggttgaaaaatgccatctcttcgggagcattttccaatacgtaacgaatgacatactttaacatgctctctgccagaatcatatcatccttcagatctgcaaaacagatctccggctcgatcatccagaactcagccgcatgacgggtggtgttggaattctccgcacggaaggtgggaccgaaagtatatacgttcttgaatgcaaaagcataagtctctacatccagctgtccgcttacggtaagatttaccggtttgccgaagaaatcctgtgtgtaatctacttttccgtcctcggtcttaggcacattgttcatgtccagagtcgttacctggaacatctcaccggcaccctcacagtcactgctggtgatcagaggggtatgcacatagacaaagcctctctccatgaagaaggtatggatcgcataagcgatcaaggatctgacacggaacactgcctggaaagtattggtacgtgctcttaagtgagaaatggtacgcagatactcgaaggagtgtctctttttctgtaaaggataatctgcagtagaaggtccttccacgatcacttctgctgcctgcatctcaaatgcctgctttgcctcgggggtagccacgatggtaccgcggatcacaacagctgcaccgacattgatcttgcagatctcctggaaattttccagtccgtcgccgtatactacctgtaacggctcaaaaaaagttccgtcgttgatcaccaggaaaccgaagttcttggagtcacgattgttccttacccagccgcctacggtgatctccttgccgatatagacgtctttttcccgatgaagttctctgatgtctgttaattccataatctttcctatccgcacgctgcgacgtgctctatctgaaccggcccgcatcctattcgccggtcgcatactgttcgtatcaataaaatttagttattggtgatctgtgcattttctaccagataatccaacaccttgtcgtagaggaagtactctctgtagtcttccttggaggtctctcctatatactcctcgatagtgtcataaccggctgctgttgcgcggtcctgaagcatctgatccagttcttcgtcactgatgttcagattctctttgttcgccactgcctgcagggcaatatcctgctttgcggtctgctcagcataggtagacaggaaggttgccagatcctgcccataataatactgggtaaatgtgtctgcgtccacgccgtaagcggatgccatggaggtaatgctgctctctgcggcatcggaatatttctgtaccagcgcttccggtacagaggtaattgtgttgtttgccataaatgcatccatcactgcctgctgtacattggtctcataattctgctgtgcattgtcattcagatagtcatacgcatactggcggagttcttcctcattggtcacaccatcgataccgaaattgctgatgatttcatcactgaattccccatcctgtgcaggctgaatataatttaccgtcaccgtaaataccacagcctgtcctgcaaggtctgcatttccatagttctccgggaatgtaagatccagatccaccgtctcgccgggcatcacgccgatcagtccatcctcaaatccggcaataaactgtccggaaccgatggtcagatcatacccctggtcagtgccaccgtcaaatgccacaccgtcttttttgccttcataatcaatgtttacagtgtctccggtctctacagcccgatccatgattccgccgttctccgcggtaatgtttccataatatacattattgaccagagtatcccactcgtcctcatctacttccacagtatctacggatacttccagccccttgtactcgcccagagtcacatacttgtccacatccagatccttcaatgcggtactttccgttccggcgccggttgctgtaccagtgccgtttcctgtatcctttgctccgcagcccgccagcatagctacgcttaacactgctgccagaagtcctaatgtctttttcttcattgtgttacttcctatacctttctattactgccatttgtgcataaatgcattgtagcaccgcccattatagcacatcctccgggctataacaagggtgacaataaccggcagatctgctctttgatacggattttcagttttctggccacataataatcccgggtgatctggcggcagacttccagatcgttccggaaaatatccaccatttccttcgcctttttctcatc

SEQ ID NO: 11277 - DNA, 30828 bp, Unknown
  gut microbiota DNA sequence
ctccgattagaacttctcagcgaagctcttgtagtattcatcaaaaaattcagaaactctttccataatcttcttcataatattcacccttaacctttccaaaacaaatgaactgttgactttgttgttacgtttaaggggtcaggcctgacttccttttgatgattataatttaccatattgcgcttataatgtgaaatacatataatagaagtataataatacccaaaaggtatagcaaaagaaaatacagcatgttacacaaatagaatgattaagctgatttttggaaaaagcatggaaggaggatgctgggaagatggaattgcggcatatccggtatttcaaggcagtggcggaggagaaaagcttcacgaaagccgcggagcagctggcgatcgcgcagccgcccttaagtcgtcagatccaggatctggaggcggaactggggacgacattgttccttcggacgccccataaagtgtccctgacagaagagggagagcttttcctgcaatatgcgaatcagatcctggatctggtgaaccggtcggaggaggatgtcagagagcgcaaggaaggactgcaggggacattatatattgcgtcggtagagggctgcggtcccagactttttgcggaatggatcgcgggattcgggcaaaaacatccccatgtgcagtataatctgtggaatggtaacacggatgatgtgaataatcgtgtgacaaagggattgtgcgagatcgccatgatcacggcaccttataatacagaagaatatgaggtgctgccggtctatgaggaaccctgggtggcggtgatacctaagggacatccgttgtacgcggaggaaaatgacccggtgaagccttcggaactgttaccctacgacctgttgatcccttcccgagagtcccgtaagggagagatcgacaaatggttcgagggaacggggcatgcaccggtgatccgggggcgcatcgctcatatgatgaatgcctatgagctgagcctgcacggagtcgggatctctatttatccggcatccatttcttccctgatccgggacaaggatgtctgtgtgcgggaagtggagcatcccgatgcccatgcgtcctatgcactgatctggaataaaaatcataccctgtcccatgtggctgaagaatttattgcttacgtaaaagcagaatccgaacagcagatgtactatgcctgaattaacgcaaccgatacgtcattcacattcgtgccggtagctcctaccttgtcaaaagaaaggaaagaccttatacttggaagcaggagggtaataagatgaatattacggtatatctgggagcaaatgaaggaaatgatccttctctgaggaaagctgtgcgtgagttgggaacctggatcggtgaaagcggtaaccgtctggtatacggtggatcgaaatccggtctcatgggagagatcgcggagagcgtattacaggcaggcggcgaggtgaccggcgtggagccgcagtttttcattgatatggaataccagtatgatgccattacggagctgatcgtcacgaaggacatgacagaacgcaagacgaaaatgatcgaactgggagatgtatttattgcttttcccggcggaaccggaacgctggaagagatcgctgaagtgatgtccaaagtgtcattaaagcacttggaggcaccctgcattctctataaccttaacggctattatgacagcctgaaagcactgttatcacatatgacggagaagggattgtcctccccggagagacaggaaggcatttattttgccagggatctgtcggaaatccgcaagatcatagaaaatcagcggagcaatgcaacgaccactccgccggaaaatacacaaggtataggaaatcagctaggctaacaggttaaaacacataactgcaatgcccagcaccaccaggatcacaccggtgacacggttcagggtcttgggggtcgccttgttggcgaacagtgcagcgatccgcgcccagatcagggtaaatacaacgcacaggatccatacggtccagtcaggcatgccgccgatggcaaaatgggaggcagcaccggtaaatgcggtaaatgccatgatgaagacgctggttcccacagcggtcttcagttcataacccaggacagaggtcaggatcaacagcatcatcataccgccgccggcgccgatgaaaccgcagatgaagccgatcagcataccgcataccagagactggatggctcttttcttcgcggagacgccctgcatggcttccttggtggtcattacgggacggacgatgaatttgatacctaacaggaaagtcatgaacacggagaaattccccatggtagcggaaggcaccaggctggatgcgtagctgcctacgacagtgaataccagcacgcttcccatcatgatcagaccgtttttgatatcaatatttttgttctttgcataagtataggcagatattgcgctggcgaggacatccgaagacagggcgatacccacagccatatagggatccatgccgaggaaagtgatcaacatgggactgatgacggcagcagcgctcattccggcgaaaccggtgcccaggccggctcccatgccggcgaaaaaagtgacaagaattgtgattaaaatctgcatttatttagctcctttcaggatattgtccatattttcttccatgacatgaagcatgtgtaaaaagatctttttgcttgcctcatcggtgccgtcgagcagagtatctttgaaaatgctctgtatcatgcggcctttttcgatgacatcctgagctttctccgtgcagaacaacagagtcttccggcgatcgtccggagcttctctgcgttccagatatccctcacgcaccagcttgtccacattgacggacaccaggttcgccttgatccggcggatctccacgacatcactggcggtccggtattccggattgttgccgaagaacatgagaatatcaaaagctgtctgcggcagctttaactgttggcacagaggcttgcacatggcgttgtaagccagattaaatttttgtacgaattcgatatcagtattcattcgaggctccttttacaaaaatgaatatttcaaatttgaaataaatgctatattgcatagtattacagatagttttcgaagtcaatcagaagatgttttatttcataaaaaatttatattaataatcctatcgtaaacatcatttcgatatgttataatttgtatgatgcaggggtgcatatagagactgtgggcatacagtagaaagtgccgggaggagatatgagtatcaatacatatgatgaacagaaattctgggaagaagtggatatcctgttcccggatattgtaaaagccattacttctctggcgaaaaagtcctacatatccataaccaatctgcggaacggcgtgacatggtggtccgagaaggcgatggaatattttggtatgcaggagaactataccattcgtggacaggaaaaatcaaaaagatcgattcatccggatgatctggaggatttccggaggggattcctggagagagttgccgggaaaaatatggacgagccctgggaataccgggtgcgtgacggaagcacctatatccggatcagtgccagggcgaaaatgctgaatgataaggatggaaagccttttgtgatcgtaatacgatataacaactacggtatttccgacgaggtggatgcgaccaccggattgcatacggaaccggcgctggaccgggagatcatggaattcctggaggaaagcggacagggggcactgctgaagatcggactagatcagttcagccatattaatgttatgtacggtgctgctttttcggataagattctgaattgtgcggcacaggagctgttgcgcctgttaaagggaaaaggatatgtataccggctctccggtgcgaagtttgtgatcagttttaaaaaggtatccaaagcggaactgcagcagatatacaatgagattgtagaagcttttgaaaatacagaggtagaggggaaaaagatccctctgaaggtatctgccggcgcaatatttatggaaccttatatgaaggagacaaatgcggtccgcagccgtctgacctacgcgttgagccattcccggcttgagcatcatggagagctggtgatttttaatgatgaggtctgcggcagtgacgagaaccagtttgaactgatcggtgtgatccatcagtgtgctacgcataactttgaaggcttccggatgttctatcagccgattgccgatacgaagaccggcaagatccggggaatggaagcgttgctccgctgggaactggagccttacgggatggtgtcccccggtgtgttcatggaatggctggaacaggacccctgtatttttgatctgggaaactggatccttcggacagcacttacggatgtacagaagcttcgcaaggagacggaaggctttttcgtcaatgtcaatgtggcggcggcacagctggagcgcagagagttccgaagtgctgtcatgaatattttaaaagagaccggtgcgaggccggaggagctttgcctcgaattgacagaacgatgcagagatctggatattcatttcctgcgcggagaggtagaatttttccattcccaggggatcaagatcgcactggatgactttggaacaggcaacagttccttaagtctggcgctggagcttccctttgacgaattgaaggtagatatgagcttcatccgtgatattaagcaaaaacctcagaatcaggccatggtgcagtctatcgtggattatgcaaagaggactaataccgagatctgcattgagggtattgaaaataaagaagtcagcgactatattgagcagttcgggtctacctggcagcagggatactactattccaagccggtacctatcgatcggtttgaagaagtgttgcgcgagaaatcaaccgaaaaagaataagtagctattctcgaagggcattgggcgctacaccgtactttttcttgaatgcgcggcggaagctggtcagattattatagcctacagctacatataaatctgctattttaatattcgttgtttccaacaggtgttttgcctgcgtcatgcggacttgttccagatacgtagagaagtttacaccaactgtttttttgaacaggaaggagaagtaactctcggagatgtggaacaggtccgatattctgcttaaacataaggatggatccccataattctcatcaatataggcctgaatgcgcacgatcagctggttgtcgttttccggctgcttgtttttttcacataattccagagcaatctgctcgtaattttccagggtagaatcttcggacagaccggctaagcttgtatcatcgtaagggatatcattatcccgcactactttcaacaatgtgatttcaatgttttctaaaagccagtttacttgtttggaattcagctttcgtttcttgaaattttcatctttaataaaatttaaaattgcctttgtctgtttgaagttaccggattttacaaaattatacagctgttccgcaacctcattaggataaaagaaggaatcctgacattccagaatctcacgatacatacacaggtaacccgggctggagacacgttttacagcctctttggattggcgatacgatttccagacggaggagatggtgtcggttgtacagcctaatccaccataaatccagatattgtattcctgcaatagcgtagtatgaacatgagaaaataaatcttcgaccttgtccagttcttccctatcatataataaaatagtataaacactattccgggaaccctgcatgatataggaatgtataaaataactggaaaggatatcggaaataacatccgcataatcaggggagaggatgttgatcattccctgagggtcattatttagctccaaagtatccaggtagacattacagtataatatagcaaaggaattggcattagcggaaatggaaagataattttgggcatacgcagcttcttcttcactcagaatcgtaccatgaatcaattgatcaaaataataattgcgtagggtgatcttttgggactcatttaaccgcatgagctcttcgtggttgagattcacttcctgcaggcgatattccattgcttcatagggtttataattggccttggacaacagcacaataatcaaaaagcttcctacgacaccgagaaagataatgaacagagacaatagctgcagtccgtttcccggtgctttcagggaggaagtgggaacaatcagataatagttcagattcggtgtctgtgcggaggtatggagcactgtgacgggaacaccctgaaatacggtgctgaaatatccccgttcagaataatccagcgaggaaagcagagaagcatctgttttttccaacagtgtttcattgttgctgaaagtaagcatagtttcgccactgctgtcctgaatgatgaggcagccattcttcattagatcgacggaatctgccatctgctgcatagaatctgcattcagctcaaatatgatgtcagcattgatgtttttgaaggtataattctgcagagagacagcataacaatagttttttctgtgtggggtatattcggtcgcaaaacggtcaagaggcagaaaatggttataattgtcggacgattccagagtctccttccagtcctcatattttgagggatccagcatttgattgtttttataaaaggaatagagattctcaaaatcgttgtagctgattatgtagtctgtatgacgcagatggatataataggtctggattggctggagggaatagtcagaatacatatctaccagagcctgtttggtaatataggcattataataaaacgcccgttcgccctgatcagcttctgccaggcgggaaagactggtattatttgccatacgcttggaaatcagatagatattggcatagcagttgctgtattgttcggttacatttttcagagaaagcatattttcattcaatagttcctgctttacattatgcgcgaggataaaatggaaaataactcccagaatgagcacaatgaccagaaccagactgtaggatgttatcaattttgttaagtatttattttttttggaattcataacaaaatcctcctgaaagatattattatagtatcataattaacaaaaaaggcaatgaaatggggtgcggtaaagtaaaatgtgtactgttgacataaaaaatgaaccccggataacgaaaaaatgtacaccaaattttgaaatatgcgactttaaattgtgaaaaatgacagatataataaaggcacattgatacttctggcgccgaagtgacaataatcaacaaatcgaacagaaaagaaacacaacaagaaacaacagtgaagataacagaatatggacggaggttatttatggtaaagaaaaagttattatcagttacactggttgcggttaccgtatgttccatgatatttacagggtgtgggaactctgcggaaaatacgggaaatgatacaggaaagacagataccgatgtacaggcaggaaatactgccggggatgttgcagatgttgcagatgatgtagagaaaccggaaaagattactattatggtagacggaactttccaggcgacattggcagacggtcaggaagaatgggttaataaatgggaagaactgaccggaatcgaactggaggtcatccagccggatcataatgcttattatgatgtgctgggacagacatttgccagcggaccggagaactggccggatgtagttatccttggatcttcctattattccggatatgctggagagggagctctctgggatatgacggatgcctggaacaattcagaactgaagaaaaatcccaatacggatgtggccgtcgtagaaggcaatatgctggacggacatctgtacggactggcacttggcggaggtggcggatgtatgactttcctcaggaaacagtggctggataactgtggactggacattccgacgacgtatgaagagtatctggaaatgttggatgctttcagcaacggtgatccggatggagacggtatcaatggaaataccatcggtgtatccgcagccggatttgtaggaaatgaagctccttataccaattatctgccggaattttatcaggatgcatatccttctttctatcagggagaggatggcgtatggagagatggatttaccgaggattccatgaaggaagcgatcaagagattacaggatgcttacaacaagggttatatcgacaaggaatctctgacgaatgcgaccagcaactgccgtaccaaattcatggaaggtgagttcggagcatttacttactgggcaggcggatggtctgatcagctctcggctggactggctgcgaatggacaggacagcgaactggtatttatgccgcctattgcagaggttggaaaatactggcagagatgtgcaccggtgtatgcgattacttcttcctgtaagaatccggaaggtgtattcaaatatttcctggaaagcatttttgatgatggagacatggaaaccttgtggatctatggagtagaaggcgttcattggtccagacaggcagaaacagtatgtggtaatacgtatcaggatggagagttccatatgctggagatgcgttctcagcccggagtacagtatacgaccatcattatgggagataccaatatctgtccgttgaccgagagactggttcccgtaaagaaatatacagaggaatcgatggaaatctttaatgccaataacaagacggcacctttgccggtaacaacagatatgatgagccagtataacggcgatctgaccagcttgaagaactctattattgcggactgtgtggtacagggtatttctgtggaagagggatacaagcgatttgaacaggaaggcggagccgaatggtctcaggcaatcgtagattccctgaataataaataaaaaggcgacagcatgggaggttatggtatggcagctaaaatgagagaactgacggaacagaatatgcaggaatttgtaaaagaagtggaaaaaagaaaaattcctttacacagtgtgctgatcgcacagcatgggaacctgctgtatgaaaaatattatgcaccctattgccgtaataagctgcagagaatgttttctgtgaccaaaagctttacttcactggcaatcggattattagagcaggaagggaaaatttccctgcaggattctatctgtggttattttccggaatatctgcccgggagagtgcatccctggctggcagagatgacgattgaaaatatgttgaaaatgcagacttgttacaacatgacaacttataacaagaccagcacaactgagaactgggtgaggagctttttccagacagaacccacccacagacccggaactctctttatgtatgatacctcatcctcccatgtgctctgtgcactggtagaaaaactgaccggtgaaaagatgctggattatctgaaagaaaagctgctgcgccagattggcttcagcgaggagtcttatatcatagaggatccctttggaacctctatgggagggagtggcctgatggctactcccgaggacctgctgcgtaccggctgtatgctgttaaaacaggaaaaggattcctatgcagcgagagcgacagagccgagaacagcaacacagctcgacggcgacgaccgctggtatggatatcagttctggatcccgatggaggggacttttgcaatgctggggctgggcggtcagataatgctggcagttccggaaatggatctcgtcgttgtaacgacagcagatacgcaggggatgggcggagccgagcagatgattctagctgcagtgagagaagtcctgctgaaggattgtttcccggaaaacgatgtggagaaaacaacgttgcctgtgctgcgtacggtatttgaaggaaaaccttgtgcagatttcgggaaaaaatatcctctgctccgaaacaggtatggatttacatggtgtggcgtgactttttccgaggcgaatcaaaaaggagtactctcgtatgaaatagagggaagagaatgtcagcttccctttggaatcggacatctggaagagggagagttccccatatacaaggagaaatgtgcttcttccggagcctggatagatcaacacacgctgtttatcttctgctggctgatcggagaaagtgttgcatccatccgcttccgcctctatttctcagaggatggactgaccatacatatgaataaaacagaagagacaaagtataacgaatatatgggatttttgaatagctgatatagagtagccggaacggagggtaaacgttgtgaaagagaaaggaaaaactttgtctaagaggacacctgggggaaccgcgttcaagcacgcccgtgcatatcggggagtctatctgatggcaacaccggtattggtggcagcattgatattttattatcttcctatgtttggtatccgttatgccttttttacatataaaggaatcaatgatccgatcttcgtgggaatgaagcattttgtaaaaatgttcagtatgccggggttctggaaggcgttcagcaatacgctggtgctgagtattacaaagctgattttaaataccggtgctgcagttattatttcggtattattgaatgaattgatttttttaaagttgaaaaaggtatttcagacgattgtatacattccgcatttcatgtcctgggtagtggcagcatccatcttttccatgatcatgtctccgacatccgcgggattggtcaacgatgtcatgatgaaattacacttgatcacggataatatctatttcctcggagaccagaaatggtggagactttcgtattacataatcaatgtctggaaagataccggctggggaacgattattttcatggcgacgctggcggggatcagcccggaattgtatgaagcagcgtcgatggatggggcaaaccgtttccagaagatgatctatattaccctgcctgcgttaaataatacgatcgtgacggtactggtattgaatctggcgaaggttatgaatctgtttgagtcagtttttgtattacagaatgatgccgttatcaaggtatcggatgtattgcagacttatatctatacgcagacatttaactccggtgcaattccggattatgggtatacgacagcagtcggtatgttttcctctattataagctgcattctggtactggtatgtaacagggtaagccataagacgagaggaagaggtattgtatgatgaaaaagaaagtgaaaatttttgatatcgtattgatcgtgatatttacgttattttctctgctgatgatcataccggtatataaagtgctggtggactctttcgatctgaagacggcttatggtatgaaattgtttccggagcagttcggcttcgcgggatataaatcaatttttaccaatccgacgatgctcagaccatttctgatttcctgttacacgacggttatgggaacgatcatgggattgctgatctctgtactcggagcgtatgtgctgatccagtggaagatgccggggcgggcatttatcgccaatgtgctgttgtttaccatgatatttaacggaggtatgatcccgacctatctggtaatgaaggatttccatctgacaaataatctgtggggtgtgatcctgctgcctgcgatcaatgtatacaatctggtgctgatgaagaatttctttgaagggatcccgatcagcttgatggagtctgcggagattgacggatgttcacatttccggatcctgtacaaaatcgtattgccattgtcaaaggcggcactggcatccatcggactgatgtacgcggtgggctattggaacgattacacgaactataagctgtatatcacaaattcaaacctgtataacttccagatgaagctgcgggcactgatcatgggaagcgatttgccgtctgcggtagaaggagctacggaaaatacagtaaaaaatgcagcagtcatcgtagcaattctgccgtttatgatcatttatccattctgccagaaatattttgtacagggagtaaatatcggagctgtaaaggaataataagtaataattatagaaagcaaaaatgacatcagcatacaactgcctgatgtcatttttggtgaaataaaatctcaagaaaatcttaagaattttcggtggacaaacataaggctttcgcgatacaatatattttagagtgtcggtcggatgaccggttagaacaaacagatgaaaggaagcattcatgaaaaagaaagtacttgcagcaattttgattgcagtaggtgttctgacaggatgtggaaacacagaacctatttcttcccctatccagactgtggaagcagagcctattgctactgatatccaggaggttgaacagcctggtgcaacagaggaagccaatgagaatcatgacggtatgtaccgcagtgagcttaccaatgaatggatcgatgagagcctgaaggatcagcgccctatcgccgtaatggtagataacgagaagaccgcacttcctcatttcggtgtggcagatgcagatgtagtatatgagatcatgaacagtaccctgaacgacagaattacccgtttcatggtagtggtaaaggattgggataagatcgagcagctgggcagtattcgtagtgcccgccctaccaacttcatgctggcagcagaatggaacgcagttctgtgtcatgatggtggccccttcttcatcaatgactgggtggcaaaggattattccgcgaacttcagcggcggctttgcccgttacagcaacggtaaggcagcagagttcaccgagtatatcacttacgataagtacaccaatacccagaagggcaagacctatgatggtctgaagcagcgttttgagagctccagatataccacgacttacaatgactattatcagggacctcacttcaagttcgcagatgcagaggttacctttgctgacagaaatgatgcgatcagtgcaaccactattgagcttccctttaagcataatggttctactctgaagtacaacgaagagaccggaacctatgattattatgagtatggttctgcgcacaaggatgcagcaagcggcgagcagctgacttttgagaacgttatcctgcagaataccacttttgcagatctgggtgaaggttacctgatctacaatgcgatcgattccggacgctccggttactatattaccgagggtaaggcgatcgaagtgaactggaccaagtcttccgagaatgcgattacacattattatgatgcgaagaccggcgaggagatcgaggttaataccggtaagacatacatctctctggttccttccgatggctggaacaatgttgtgatcaaataaatacagtcattatgataaaagtaataagatcccttccgtggtgctatcaccgcgggagggattttttgtgcgatcatgcaacttgataagctcttccatgtttgatttgatgaatatctatgacaaaaaataagcgttttattcgcaataaccctaaaaacctcatggatatcactgaaaacttgccttataataaagcatagtaaaaatgtttaggagtgaaggcaatgaagactgcgaaaaaatataatccggatctgatactgcatgggaatctgatccatgcaatattatctctggcgatccctgtggtgatcaacagctttttacagaccatgtataatctgacagatacttactggctggggaagattggcacggagcagttggcggcgatcaatctggtaaccccgatgcagaatatcatcacgaatttcggcagtgggatcacggtggcaggagcagttctcattgcacagtatatcggtgcaggggaaaaagaggatgccagatccatggcaaatcagatatttatctgtgccatggggtttgcggtagtctgtgcagcgttatgctttctggggacaccggcgatcgtgaactggctgggtgctgacggaggcacggcatactatgcgagagtttacctgcgggtagtcatctgggatatgccatttttgtatatggtgaacatattctccgcggtgcaccaggcacagggagatacggtgagacctatgctattgaatctgggaggcattacgctgaatctgttcctggatccgttttttatgatcattctggatatgggaacagcgggagcagcgctggcgacacttttggcaaaagcagtgcctgctacggtggcatttatacttttgtgcagaccggaaaatgatatctgcctgaatcgcagatatatgcagctgcagagagaaaaactgggtatgatcctgaaggtcggactgcctaccgctattggaggcagcaccatgcagctcggattcctgctcatgagtaaaaatgtgtttgtctatggcacagaggcgatggcagcttacggtatcggcaacaaggtcaatggcctgatcactctgccctccaatgccatcggctcagcgactgcgacgatcgtgggacagaatatgggagcaaaacagccggagcgtgcagagcagggatatcgcttttcgatgtggatatcagttgtatttttgttcattggtggtatgatcttatcaagagatatgatctccacggcgatcgtcagtattttctccaaagatgcagaggtcgtgggaatggcagcagactttttaagcgtgatggcattgtggtgctttaccaacggagtatataatacgacctccgggctgttccagggaaccggacatacggaagtgaccatggcgatcgatgtgacgaggctgtgggtgttccgttttgtgacgctgtggttctgcgagaacattctgcatatgggcgtgcgcagtgtctggtattccgtggtgatcagtaacggtatctcttccctgatcctgtatgttctgtaccgctgtggtatctggaagaagacgcggatcaaagtgggaaaagaagctgcttaaggagcaccatggagagtaagaaaaaagttaagaagagtcgtctgatatatataagcatcgttgtagtacttttgctgcttcaggtcattgcctggaacagcagaagcttcagcgatgcttatattgcttatattttccccatctgggtcaatacctgtggcaggatcacgggaagcttcccgttttctgtgggagaatggatgatcgtggcggggatcgctgttgtaatatcagcggctttgctggggatcagtatgatctttccgggacgcaggcattcggcaaagtattgtcgcggtgttaagagatattttcggttttttgcttgggtgctgctattcgtgtttgcgatcatgactttgaattgtacgatgatctatcatggttctaccttttcggaaaagtatttcggagaggaagaggggcagcaggatgtgacgctgcaggagcggacagaggagctgcttaggatttataacgatatcgcgtctcattgcaatgcactgtgtatggagatggagcgggatgacagcggcgccgtggtatattccggaggtgtggacagcaaggggaatgcggtggatatggcaggaaaagccattgatgcgatgcagaaccttgggaaaagctatgcccagctggatggttattatccgagaccgaaggctatgtttttctcggattttatgtgtcagatgtatatgtgcgggtactacttcccgttttccatggaagcaaattataatgatgttatgtctatcatgaagaagccggcgactatgtgccatgaactggcacatatccggggatatatctacgaggatgaggcaaattttattgcatttctcgcctgtgtggagtcggatgatgctgcatttcagtactcgggatatttaagtgtcctgaattatgtggcgaatgatctgtacaagacgagactggcggatcctgagagctatgcggcagccagggaggcagtgcgtccactgcaggtattgcagcaggtgcgggaggacaatatattcgtcacagaggcggaatgggagaggatcaacgggaaagcggtagtggacacggagaccgtggacagtgtctcagatactctgacggatgcttcactgaagctgaatggagtgtcggacggcatgatcagctacaaccgggtagtggagctgttgttacaatggtacggccaacaaggggagtactaaccgaaacatttgtaggagatagaggaataattgcaaaaatttaattttttttctattaaccacttgacatttgatcggaatttatgtaaactacgattgttgtgacgcagagcagtcatgaaatacagattgcaagaaggattaagtcgcgggcccagatagctcagttggtagagcagaggactgaaaatcctcgtgtcactggttcgattccggttctgggcatttcgcaggacaccatttcttaaaatggccgccctgcttcatatataaacatgcgggtgtagttcaatggtagaacaccagccttccaagctggatacgtgggttcgattcccatcacccgctctcttttttttagcgggaagcctgataaatcaaggcttcccgctgtttttgtattacctggtctgataccaggtgataccaaaatttttgaatgcacgatccggtttttatttgtatttttttatagcggcgtcaaaatcagaaacataagattcatcctgctttacacggaaaatctcgtactctttgattgccagcttttttgcaacttcgctggaaataaaaccggcattatgaagaagctcatattcattaaatttcagaaaagaatcaagtttgtctatccagtcctgcatggacataagcttgtttcgttttgcctgattttcagcatagtctaaatacatagttacgatatcatttaacgaagatatttcttctttggaaagatagtttttcgaaacagtaacatcggatttatgtattttaccatcgggtgagtctttccaggtggtcagtcccatatgttccttttgactattggcgcgggaatgaataatttccggagctgttttctgtgtcacggcaaagagaagtttattctgtacagtcttaaagaatttctgagtgatctcgctgtccttgtcgtaatcataactacactgggaataaatatcggtgatcttctgataaaatcttcgttcactggcccggatctctttgatacgttccagcaattcgtcgaagtaatcttgtccgaaaggcgttccgttctttaacatatcatcgttaatgacaaaacccttaatcatatattcctttagtgtcttggttgcccactgacggaacttagtggcttttttagaatttacacggtatcccacagatataatcgcatcgagagaataatgcttcacggaacgcttaacccgcctgtttccttctgtttgaactaccgagaaaaattcggtagttgaaatttcgtcaagttcttgctcaaaataaatattcttaagatgcacggaaatattatcggaggaacattcgaataattccgccattgcttttacattcatccagaatgtttcattgtaaaaatatactgaaacagaaatattttgatcatctgactgatatagtaaaacgtctccctgcataggctctggaagaggggtgctttgttgcggcacttctgcatgtcttcgccgcattgcttctaattgcttatcaaaatccataaattctcctttcaattaaattagtagagctgctctacaataattgtagaaaacatatgttcccatgtcaagataaaaagagcagcattttttgacctggaacaatttcataaaaccaaagttaggtttgacgttcaagagatattttctaagcagaatgatgcaatgttgatgagtatgtgaacgagatgcgtgcggaggaccgattataacaaggtgttctaggagactgaataaaatagtgaatacctccgatatacatgatagaacaggtagacccgggaataggaacggaggtttatatgcagattggcggagtaggaagcggacatgacacatattctcatcaggtgacaggatgtattcacgaacatggggaaaataaggacgtaggcaatgctggagccaaattaggaagcgtacagactatacagaccgccgaggaagtattgcaggagaattcttcgatgaatcttatgtcctgggtgcagaatatcagtagtaaaggcaaacagcttttacagaaaatctggggagagagcaaggaaactaatgatgcgatcacttcacaaaatggcaacggaaatcatattgcagggcaggagacgctggtcaccgggaattctgtaggagtaaagactacaatgaacagggcggtagtggagacagcagctacccatacgtatttccggcctgtggaagcaaaggataccatgccggcaaatccttttcagaaggtgcgttatcaggtacagaaggtagcgagaaagttgatggaccggttgccgggtcgatttctgggatcccatacaggcgattttttgcagacgaagcaggagcaaacgaaagaagatctgcggaagagaagtcagtataaacaggatgatcaggagatcgagtgcattctcacggatgaaagctatctgacagattcctataaccgcaagggtgagtacagccatctgactacggataaataattatattacgaattttacgaaaaatttcaataatttgcttgacagtttggcattcatcatgtaatatagtctttgctgtgagacacagcagacattcataagattgcggatgaatgccgatacaattaatttcataccttcaagatacaggttttgacctgtacaatatgcgcgagtggctcagcggtggagcacctccttgccaaggagggggtcgcgggttcgatccccgtctcgcgcttgaaaaaagaacgataccaaatcggtatcgttctttttttcgagccctgccagggctcgaaggttcgatgtctacgctccgctccggtccgcgcaggccgaggtccaccggacctcgtgcgccgtctcgcgcttgtctgcacagaaaatttcagaagcaaaaggaaatacgtatttgattcggttcgtataggagctttattttgcatgcacatgaccgcgggaccagactttactgggctgggctttgtaggtggggcggcggaacaggaggcttcggagagccggaccgttaaaaggaaagaggggccagaagtagctgaagcccgcgaaggtcggggtagtcaaaatagagagtgacacaagcgtcaggccgataataaagccgggcagaccccataatccggtggtgaccaccaggagaattcgatagatgcgcagtgcatcggcgaattctatactggagagagacagattcgccaacatggtgacagcagcatagaagaggacttccgtggaggcccagttaaggctgacagcaatgtcaccaatcaacaatccccctacgatagacagtgcaccggagacacggctggaactaagtgcggcagagtatttgaagaggtctaagaggaactccaccgccagtacatagaaaaaaaggcggaagggtgacagatcgctgacgggtgtgagctgcagcgaggcggtgatctcgggataataggcggagagaagtaaaaataccggcagaagcagaagactcaccggaatgcacaggaagcgtatcatgcggaagtaggttccggtcagaggattgttgtaatagtcctccggactctgggtaaactggaagatcgtaccgggaagcaataaaacggcgggagaattgtccacaatgagcagaatgtgcccttcgcacaggtagctgcatgccacatcgggacgctctgtcagctggatgctgggcaggggattccaccatcttttatgaatcagaagttcttctaagcttttgctgcccatagtcagcgaagtgatctgtaaccgggagagtttttgcttcagagcttctaataactcctcgttaacctggtctgccagataggcgatcgctacatcggtgcggctctctgttcccagggtgcagatggagaaggtcagtttcgaagaacgcacccggcggcggataagatttgtattgaataaaagtgtctccacgaagccgtcccgggcaccccgggtgctccgttcggtatcgggctcggagatactgcggacgggataggtacggacgtcaatgatcaccgcctgatcgaagccatccaccaggaggatggaaggtccacttaagagattttgcaggatatcatccacagaggaggtcagtgacacctgggcatagccgagcctgctctgcacatagagcgggagatcgcggatctcggaatccagtgtatagtgaggatcctgcaggtcggagaagatctgctggaggatttcggtattgcagaaaccattgatccccagccagaatgccggagtctcccccaaccggagatcgcgtgtgatcaggtcaaaacttttacccaaaggaagcaatctgtggagaagatcaatattttgggaaagttctgtggataatgaattgttttgtgccataaaaagggaatcctttctgaataatgatataatgattgcatagactgcccggtgggtatattgtattattcagatagattccccattattttggtaactattcagttcatcagtgatataattgccacaggcctaacaggatcaataagaccccggagatgggatcggcatattctccgacccgctgcaggaggacggaacgccccaggcggctccccagtgtcaggaatccgaaggaacagaaaaaggtggatatcgaggcaggcagaaaaggaagtccggtaatgctggcggagaatccgataccgatattattcatggagagggcacagcccagagccagcgtctgcgggagagtcagattccgatgttcggcaaattttttcttctcccggcatagactgctgttatctgaagaactgcagcgccatctggagaccagccattttccggcatagtagagcccgaacaggatcaggatactgcttccggtccgggttgcgatctcaccggggatcagaggcagtaaaaggttaccgaggcttatagagatcacagtaccgatgagagtgactgcgctgatcagcagattgtgttttgcaggaagagggaccttctgcagtccgagtgcgcagcctaccagaagtgcatccagactggcggagataccgaagagcaatgagggaagaacagacatagcatgctccgtagaaaatattcttaattttactatattcctgtaaaaattttttgtgagatacagcgcgggggatgcctgagggacaaaacgatgaaaataaagaacaaaatcatagaatttgtaaaaaaagagacggtgctgactgcggcgatggtgttggcagtattgtcggcggtaatgatcccgccggacaaagaatatatcggatatattgattttcggacgctggcgattttattctgcctgatgactgtgatggcgggattgcagaagctgggcatatttcgcagggttgccaggatattattgcagcatacccacaatgtgattgcgctggcagaaattctggtattgctgtgcttctttttcagcatgttgatcacgaatgatgtggcattgatcacttttgtgccttttacatttacggtactctgtctgtccggagaggaggctgtccggaaactggcagttccggtggtggtattacagacgatcgcagcgaatttaggaagtatgctgacacccattggtaatccacagaatctgtatttatatgggaaaatacagatgtccccgattgcatttataaagctgatgctgccgtattctgcggtgtcactgctctttttgcttatctgtacggcggttgcggcgaaacacagtggcattgcggtcagagatgtggcaggggcgttgcaggcagaagatgccgggcaggaaacggcaggatggcggagatatctgcctgtgttttatctgatattatttttgttgtgtctgttaacggtggcgcatatgattccctatccggtaacgcttggaattgtggtgcttggtgttggaatcatggaccgcgcgaccataggaaaagtggattattcgctgctgctgaccttcgtgggattttttattttcataggaaatataggaagaatgcctgctttttgcagctttttacaaaaaattattgaaggaagggaagtcatgacggcagtggctgccagccaggtgatcagcaatgtaccggcagcactgttgctgtccggttttacagaaaatgtgaaagcattgatcgttggaacgaatctgggcggtctgggcacattgatcgcttctatggcaagcctgatctcttataagcaggtggcaagtcagatccccggggaaaagaaacggtattttggatggtttacagtggccaatgtgggctttttgcttccattattatttataaacggtctgttatagtgtgtttattgttatagagttatttattttattatgtaaggaggcagcatcatgacagaagatatgacaattattgcagaagaggcatattccgcagccagggagatcctggagaaagctaagccggaggcgggagaactgtttgtagtagggtgctccaccagcgaggtgggcggtgcatccatcggtacttattccagcccggagctggcagaggtggtcttcggtggaatttatcaggcaacgcaggaagcaggcgtctatctggcagcccagtgctgtgaacacctgaaccgcgcactgattctggaaaaagaggcagccgtaaaatacggttatcctatggtcaatgtggtcccccagcccaaggcaggtgggtcttttgcaacggcagcatacaaagccttcgagcatccggtggctgtggagcatattcaggcggcagcaggaatggatattggggatacgctgatcggaatgcatttgagagatgtggcagtaccggtgcgtctccggaccggacagatcggagacgcccatgtggtatgcgcccgcaccagaccgaaatttatcggcggtggcagagcagtctatgacgaagaattaatgtagtgcaatcatacgaatttgtaagcagtgagttcggagggcgggatcgggaactaattccggggcatactgcggaagtagtcacggatccaccgtccggattcattgaaatcctcatcggtccagtcagagagagccgtgctggcagccttgaagacactgctgctttcgtccttgttcgccagattccagcagcagaagctgatctgatatttgttcagcagatccagccatttggtggtggaatcaaaatcattggcaccattgccggaagcgtcgcacatgccgaattcgctgacgaagaccggaagattgttctgtgcgcaggtctctaagcggttacgcaggtcatctttgtgggtgcctgcgtaaaaatgcagggtatacattatattatcaaaggtaagcggggaagctgcggctttgtcgatctcctggctccaggtaggagttcctacgaggatgacggcatccggcttctgttcccggatcaccgggatgacttcctcggcataggacttgatgctgtcccaggaggtaccgctgttgggctcattacagatctcatagagcacattgtcattgtcggcaaaagcttccgacatttcccggaaaaaggcgatcgcctcatctttgttctgattcgggtcacaatcacttaaaatatgccagtctacgatcacgtacattccaagctctgtggcgtaggatacaccgtctcttaccagctgcttcagctgttccttatcaccgccggcacaataaccgccgtactccgctgtatacatggcgaggcggatacaattggtattccagtcgtcccgcagggtacggaaggaatcataattgatatactgggggaaccaggcaattccgtgggtggacataccatagagctggacaatgttcccgtctgcatcggtcagcttcccgttctctacatggagagcgccatgctgtccgaagggggtggaagtcacatccgtaggtttggtggattgtattccgggagcatcgggggccggtgtctgttcggatgcagcgatgctttcactgacggtttccgtgatggcagcagatgcttcgggggaagcagatgttgcagcttcattcggcgtgtcgtgtctgccgcagccggcgagagcacaggtgcctaaggctgccagtacggcacagctgagcgtttttttaaaaatagacataataacctcttttcttattcgagttcgagaatcaacgaatgaaaatacaaataatgggttaccttttaaaactaaaaaacaagcacttacaacaaatattataattgtgtctgtgaagcttggcaagaaatgattgcccgcggataggagctgtgatacagttaatgggaacagagttcggaatagaggacagagatggaggaaatctatgcttccgcagtcatttacagagagaatgcagggacttttgggatcggaatatgaagagttcctggcaagctttgagcatgagaaatatcaggcattgcgtctgaatccgttaaaaagggatgacatgtctgtcataacagaaaaagtaaagcagacttttcagctgcagccggttccctgggcggagaacggatattactataccaaagaggaccagccgggaaagcatccctggcatgaagcaggactttattatatccaggagcccagtgccatggcacctgtgacactactgtcaccacagcccggggagcggatcctcgatctatgtgctgctcccggagggaaaagtacccagatcgcatccgcgatggagggagagggactgcttgtcacgaatgagatccatccggcgagggcgaaaatactgtcagagaatgtggagcgcatgggcatccgcaatgcctgtgtattgaatgagacaccggagcacctggcggatattttcgaggaatattttgaccggatcctggtggatgcaccctgctccggagagggaatgttccggaagaatgaagtggcctgtgaggaatggagcccggaaaatgtgcagttatgtgcagacagacaggacgggatcctggagtgcgcggcacggatgttagtcccgggaggcagactggtatattctacctgcacctttgcgcctgcggaaaatgagggaagcatcagccgtttcctggcaaagcatgaggaattcgagattgtccccatcgataaaaaggaactggggatcccggaaggctgcgacggtattcccgcttgtgtagagaacccggcacccggcattacgggaactttacgcctgtggccccataagttacgtggcgaggggcattatgccgcagtattacagaaaaagggagagcttccggaaggatatcagccggtgagcgccaccggatcagagaagggaattccggcgaagaatctgacaaaagactgggcagagtattttaacttcgcaaaagagacctttttggaggagcagacgatcaaagcaggactatgcactgccggagaaggctttctggcatttggcgataacctgtaccgcatgccggagagaatgcccggggtgaaaggactgaaggtattgcgcccgggacttcatctgggcacattgaaaaagaaccgttttgaaccggcgcacgcgttagcattggcactgcgcccagaggatgtgaagcatgtgtggaagctgtctgtggaggaagccgcggcttatctgaagggacagactttttccgcggaaggcgagaagggctggtatctgatctgcgtggatgactgtagccttggctgggggaagctggccggaggcgtcatgaagaatcattatcctaaaggactgagaaagtgattaggcgatagagatgcaacggtatagattaacatccggaacaacggttagggggatgacagaggaataggttatgaaaacggaaatattatatgaagataacagcatactggtcatccgcaaaccggcgggactggcggtgcagtctgccggaatcggacaaccggatgtggtcagcgagttgaaatcctatcttgcaaagcttcccggcgcggggagaccgggaaaaggagagccgtatctgggaatagtccacagactggatcagccggtggaaggactgctggtatttgccaaagacaaaaaggcagccgcggcattgtcgaagcaattagcagaaggtgctctgaataaacattattatgcagtactctgtggatatcctgactgcccggagggggatcttgtggattaccttcgcaaggaaggtaatgtggcggtggcagtgaccggcagggagcaggaatttgcagatgcgaagattgccgcgctgcactatcgcattttggaagagatcaacgatccttctccgcttgcgcttgcagatgtaacgatcgggaccggacggtttcatcagatccgggtgcagttcgcacatgcgggatttccactgttgggagatacgaagtatggaacggcagcgcgaaaagaggcgatgcctgcgcagaaatatcgcggcgtggcattatgcgcgtattctctggagcttgtccatcccatttccgggaaaaagatgggattccgggtagtgccgaagaatccggcatttgcaggttttgcgatggaggaattgaaaaaactcacagaaaatgaaaccggaatctccaaaaggggataaaaaaagtctctcagagcacactaatcccaaaaagggagtgtgcggaatggactggggagaattcggtaaaaacattataggaaaaaagatgatagtactgcttgcggtgacgggagcagtctatttttttctgcaatatctgacccccctgctggcaccggtgctgctggcgatgctgttcgtcacgatattcggaccgatgatgaaacggatgaaccgcaaactgcattttccaagacccttaagtgccatagtgcttctgattctggcgacactgctgttggctgtactgttatgggtactgagttcctgggtgttgggaagtctgccggtgtggatccggagtatggatgcgatggagcaggagtggctggaggcggtccggaacctatgccgcagcgtgggagagatcattggtgtggacgcttcctatttggaaaatacggtcagcggcagactgcaggagggactggattcgctggaggaaaatattctgccggggatgctgtcgcaatccatgcagtatgtgcggtggtttgcggagctgggaggattcctggtgacgtttctcattgcatcggtactgttggcgaaggactatgacggcatcatgaaccatctgctggatcaggagtcctgccatgtgctgctggaggtaatctgtgggattgtccgctatatcgctacctttgtaaaagcacaggggatcattatgtcggcgatcgcactgacggcagcggttacgttagggatcgcggggatacagcatggagtgctgtgggggatcctggcgggaattctggatgcactgccttttatcgggacgggggtggtgctggtgccgctgggaatctggcagctattggagggaagcttcggtagagcgcttatctgcggtgtgctgtatgtggtatgtattttcctgcgggagatactggagccccgtctcatcggcaggaaaataggagtgtctcccattgctgtattagtgtcgctatatgccgggatccagctgttcggcgtctgggggatcatcaagggaccgttgggatttgtgctgatctacgagacgtatcatagcctgtctaagatgtctgacaggcagaaaaacggagaggatcgcttctgagaaaagattgacgaaagaagtccggaaagctatcatgaaagggaataaatttctggtggtcggagaaggttcggagagatgaagcctatggcaaaaaatacaaaacacaagaaagcagaatccgtagcagagacactttgcagctttagcggatttttatgtgatatcgtgatcagcgtgtatatgatcgtgattctgatggtactccctctttacaataaaggatatgccaggataggaacagagaaggagaccttttttctcaagactatgacctatggtgcgaaaactttgctgccggtatttttactgtggctgcttttccggctggttacagcagttcagaaaaaggagttgccgaagttcacggaatggccggcgggattatggaagaatctgagtgtgacggacagatttgccgtattttatggaattgcggttttagtatcctatctgtttacgaattaccgggaagaagcattgtgggggacagcgtcctggcggatgggaatgtggacgcagctgggagcggtaatcgtgtattttatgatctcccgtatgtggcagtggaagagctggatcccggcgctggtactgccggtgtctgcggttgttttttctctgggatatgtgaataagtttggtctgctaccggtggatccggagtacgtgaccccttcctttatctcgacgatcggaaatatcaactggtattgcgggtatctggtgacgatattattcgggggagtctatctgctgtggtggatggaggagatgacatggaaaaagctgttgctgatggcatatgtgacgatcggatttgcctcgttggcgactcagggaagtagcagcggcattgtaaccttcgcggtggtcatgttcgtattattcgggatgtctgtgaaggacagtgtccggatggaagtgttctggcaggagatgacgatgttttccgcaacgtgtctgattacctgtgttctccgccggttgaatatattttcccgggaactgatcctggaaggaattacagatctgctgacgttttcgattgcaggcatatttatgacgattctgtcgggaattattttgtattggatacacagaacccgggtaagacgaagttatccggagaaaatgttacatagaatctattgtgggatcgctattgcggtaccggttatgatattgcttgttttgttactgacgctgatcaataccttagccggtggtgcgttgactcccaacatcacagacccgaatgtgacaaaatggctgacgtttaatgtcagttgggggagtgcccggggcggtacctgggcagcaggtgccagatgcttctgggaggcggattttctgcataaaatattcggcgtgggaccggattgcctgtatgcatttttatccaacgagggaagtgtgggactgcagacgatggtgaatgaccgttttggcgggaaccggcttacgaatgcacacaatgaatggctgacggttctggtagatataggagtattgggactgatcagttatgcagggatgatgatcacggcgatcagagattttcttcgtgccggggagagcaagatgctggtgggagcctgcgggatatgtgtgctggcgtatacagtgaataatatgtttagttttcaacaggtgatgaatatttcgacggtgtttgtagtaatgggaattggggagaatgtgtggcgctcagccagcgattgaatcagcgaaagttgaacttgcggtctccgctccgctccggtcggtccaggccgaggtcccccggacctcgtgggtctccgctccgcttcggtcggtccgaaccagttagaggtcgtaagtttgaatagttgcaagaacaaaaatactccctcacacatgtgtgagggagtatttttagtcgtcgcgacaagattcgaacttgcgacctctgcgtcccgaacgcagcgctctaccaaactgagccacgcgacgattttgttaacgcgaatcgcgtcaacattaaaataataaataaaaacccattgattgtcaagcaaaaaacgaatatgatagaagaaaaagttgcaaaaacgataaaaccacgaaattaagagaggaaattctatgtacaatacaacggtaacgctgaaaaaaggagaaggaagaacgctgaaagccgggggaatgtgggtatttgataatgagatcgcatccatcctggggacgtttgagaatggcgacattgtaaacattcatgattttgacggctatttcatgggatacggttatatcaataccaattccaagatcacactccgtctgctggcgcgcaggaaggatacggtgatcgatgaggcattttttgaacagagggtacgggatgcctggaattaccgcaaggagaccatcgatacctccagctgtcgtctgatcttcggagaggcggatttcctgccgggtattgtcattgataaattctcggatgtactggtagtggaatctctggcattgggaatcgataagtggaagcttgtgatcattgatgctttgaagaaagtactggcagaggatggcattgtcagccgcggtgtctacgagcggagtgatgccaaggtacgcttacaggaggggatggagcgttac

SEQ ID NO: 11278 - DNA, 3951 bp, Unknown
  gut microbiota DNA sequence
cttccattatcaagaggatattatagattttttctcaataattattttaataattttgtatcaaaaaaggattccgatgcattctgttcaccggaatccttttgttcatgaatcactcactgatcattattcactgaataccttacggggagctacactcttaagtaccttcaccagttcctcgttggggcttaaaatgatcttctcgccaccttcataatacatagcataacgaccgtccggctgaagtacctcgccgatgctgtaatccttctccttcacctgacggttcttgaagttgtccagatgatacgaatagaccggtgcaaatacttccatgcggtccaggctgtaagtagctacacgctttctcttactctttgccatgatcttgtccacagacagttccttatccagatagagatattcatactccagatccgtgaacatattcagaaaataagctcccacacccgcaacaagagcgaccggcaggaaaatgataaacacaaacattaccaggcagcttaacactgtcagggtgacaagtaatacttttaagattttagcccacatgggctgctttgcttttaccagacattctacgtaagaatcactcatttttcgtttccttttctctcatatattttgcagcagagattttgtgcaccgttcttccgttccttcggaaaatctctgtttacgtctgtccggattctgcttctcctgacaatcgtcttctattatgatatatcatccgtgaaaaacatgcaagatatgcccggatttttggggcgatttaattctttttttagaatcccctcacacttccttcattgactttcggatatggaacctttatcataaatttatattgcacatagaaaggcggtttttccatggcggtaatggacgaattcaaagaagaacgggaagcactgaaaaacggcactcccaaacagaagctggcgtatttctggtattattataaatggcacgtgatcatttctgtgatcgtcatcggcatgatcgtaagctttatttaccagtatacgaaccggaaggataccgcttttaacgctgttttattaaatgcaagcctcttagaccagatgtcttccgagcagccggatttccttacggatttcgccgaaaaagagggcatcgatctgaataccagcgatatcacctttgatacttctattcgtatcgtggaagacagcatggacgagacctccgtcacttctacccagaagctgatggtatatgtggcagcaaatgagcttgacagcatgatcacggatttcgattctttccaaaaatatgccaacagcagcctgttctatgatctgcgggatatcctcacagaagaacagctccaggcactggaaccttatttctattacgtggacagagaagtagtgttggcgatcgaggcagcaaacgatgatctgaataccgattatactccggaatatcccgatcctctccacccggaagagatgcaggatcccgtcccggtaggcatctgcctgaccggctgtacggatctgaccgacaactattacttccgcggagacggtatcgtcatgggcatctacgccaatgcggaacatgcggataccgcagtggatctggcggaatatttattgagcaaatagaaatttgcaacactgaacttaaaaggcatgccccgttgcgatgggacatgccttaattttttaaaaatccagatcgcggaagcggtttggtttcttgggcttacgccgctttttcgcctgtctgatagcttctctccgcctgctttgcaggtcctggttcaccgagcggtaccgggatctggagcgctttctcctgcggccaaaccgccacgtcaacctggtactgcgatgtgcgaattgatagttcttaataaacgcccggagcaaaagtatcaggaagatcactacagcgatccccagtatccagaaaaataccttgatcacattgataaatatcactgctggaccgccggaggccgtatcttcttccccggaagctgccggctgtgtggcagtgggaatacctccgccctcgtcggccggctcatcagccgccgctccttctgtcggctgcgtagccccggtgctgtccggctcctgcgtcgctgctgtagcttctgccccatccgttgttcctgtggtctcgtccccaaacacactgcttcctttttccgaagccgtgaaatctatggatgccgttcccagtaccacatcattgtaggtataggtgatcacggcagcctgccccggcgcggtattgtcgtaggagattgcggacacagcatcctggaacgtaatcgtgttgggcagggtaatactgtcgttttggttcaattgcagaatcggtttggaatttccgaagatatcgttgccgctgtaaaaagctcccgcattgtcgatattatatttcgtctccgtctgagagatgtttgctctctggaaattactgaatccatagtcgaacagagcaatcgtatcttcatagtaattagggttctcatccttcatcaccacgcagatcaacttcatgccgtccttctccgcacaggagaccagggtgcttctcgccacatcggtataaccggtcttacatcctaccaggtagggatatgcgtattttccacccgggatcagttccatcttattgacttccatgatgtcatccggttgtctctccgacggcagaatgtgtagcatgtgcgtcatggtcatcttgcataatgcttcattggcaaaaaaagctctgccgatcatcgccagatcataggcgctggtgtaatgctcctcattgggaagaccgttgggattgacaaaatgagaatccacacatcccagttccttcgcacgctcgttcatgatatcaccgaaatcctgccaggtcgtccccgagatatgttccgccaccgcaaaagagacttcattcgctgaacggatcagaatcgcattcagacattcctccatggtcagctgctctcccggctcgatggcgatatggttgcttccggggtcgatatcatgtaccgcatcataggagaaatccacgatctcatccatgctgcagcgttctgaagcaatcagggtcgttaatattttcgtggtactggcgggatattccttttgatgaatatttttcgcatataagattgcgccggtatccgcatccatcaaaattgcggattccgcactgatcaccggtcccgtaggccagttcgccactgcattggactgcactgccagtgactgattgtaggcaatgttctcctctttgatggtggtagccgaaactgtaagtccatcagacgcaaaaaggcagataacgctgattcccatgactgccttcgtaaaaagtgttctatatgataaatgcttaaaaaaacgcatgtataaatccttcctgatatatctttataaacctttataaaaatggtgtatgataatgcacattctctatcatacaccattttatttaaaaaccaaagtgctaacttaatttttttcgcatatgttcctgtccgtcaaaatctttccagacaaactcgctgccttcccagatcatgtatccatgccagctgtcttccttgggcagtgacaccgatccgggattcatataaatgtaagattcctcttcgtgtacagcgcacttcggcacatgagtgtgtccgtgcagcaatatgtccccgggatgcagcggcggaagcttctgttcgttatagatatgtccatgtgtggcatagactgccgtctccccttccgcaatcacacagtaatccgctaacacagggaattccaacaccatctggtccacctcagtatcacaattgccccggacgcaatagatgtcatttttatgggcattcaaaagttcaatgacttccttcggcgcatatccttccgggaggtcattgcgggg

SEQ ID NO: 11279 - DNA, 14977 bp, Unknown
  gut microbiota DNA sequence
gaaggagctttgtctacagtctgaccgctgcccttacgggcaacggtttttgtattcagagattatccctcaatggcgatgtatttattggtctctaccgcaggttttgcttccttcttaggcacattcagggtcagaataccatgtttgaactcacccttaatatcctcctgggtcagattgtcaccaacatagaagctacgctggcaggaacctgcataacgttccttgcggatgtacttgccggatttcttctcctgctcatcctcatccagacccttggcagcctcgatggtcagataaccatcctccagagataccttgatctcatctttcttgaagccgggcagatcaacaatcagctcatagccatcatcggtctccttaatatcggtcttcattacgttgtgtgcatgtctgccatacagtttcttctctatctgattctctgctctgttgtcaaagaaaggtacatcatcaaaaaagtcatcaaataagttctctccaaaaatgctaggtaataacataagtcatctctccttttctattaaacatatgtcggtgtcttccgatacctcttaccttttccatcctccggtaaccaccatcggacttccgaaccagtcccggatttctgacctcgatcttctttccatctcttgatctttcttcctttcctttgttctagttgtactataacacgcatgtataagtatgtcaattaaggaaaaattatataattataaattaaaaataaacagcaaaaaagaccggagcactgtgatccacagtacttcggtccttacgctcataaataatatgattgatcttacttatcctttgcagtgaaatatacgaagaatacatctccctcggtctcattggagaactgctccagataagaaatagagtaatccttggaatcctcaggtacttcaaataccagcagaccggttctctcttcgttgacactcagatcgtactcttccggcagctgatcgtcgcttacggcatcactataataggtaatcggtgcatcaaaggcatcatcgtcgtcatcatcgccccactggatctggaaatcggtatcatacatagtaacggtagaacgatctgtgttcttaaccgttaattctgccaccagaagcttatttccctctgcaggtgtatatccttcaaattccttgcaggtatacgcgctgtttactgtgtagtcgaagaaataagttctcattacatctccgatacgtccctctgcatatccgtcgtcatctgcggttaccacaccactgcccttgttggatgctgctcctgccaggttctgaacagcgctgtccacaggaccacatgctaccaggctgaaagccagtacagttgctaccataattcctgcaaatttcttcatttttcttttctccctctcataaatcctaattgcatgcggctattcacatgcgaaatcagtataacacataaatcgacagaatgcaacgctttattgcactaccttgtgaatgtaagcacttactcacgggtcagccgcaggatcacttcccggtgttccggatatttttccagcagttctttccgatcaaacagttcaaactcttcatatttaaaacagggtgacaccatacatcccaccaggctgaacccctcctcttccatggcggaaccgaagatcatccccttcggtaccagtacctggggtacttctcccttctccagatccagtcccagcttcgcagcggtcagttttccttcctcatcgatcatatagattgtcagtgcattgccatcatggtaataccacacctcgtccgatttcaggcggtgaaaattcgacacttcaccctttgccagcataaaatagatgctgctccacagatctctgtcttccttttccaacaggcattccttaaaatatccaccctccacatggggttccatttccagatgttcaatataatactccgctgaatgtttcataaatgctttcctctttccgactatttctttttccatgaaattagtgtatactatgcagagaaaaagcgcaattgcaaaagtactgcatggcgcggaatggagaatattatggaaaaaatagccagcttcaccattgaccatatcaaactgcagcccggtgtctatgtatcccgtaaggatcacatcggagcagaagtcatcaccaccttcgatctgcgcatgaccagtcccaacgaggagccggtgatgaataccgcagaagttcacaccatcgagcatctgggtgcgaccttcctgcgtaatcatccggaatataaggacaagactgtctactttggacccatgggatgtcgtaccggtttctacctgctgttagccggtgacctttcctctaaggatatcgttcccctgatggtggaaatgttcgagttcatccgcgattacaagggcgaggtacccggtgcttctcccaaggactgcggcaactacctggatatgaatctgggcatggcaaattacctggcaaaacgctatctggataatgtgctgtacaacattgatgacagccgcctggtatatccggagtgattacaattatttaagaaagaacaggaaaacactcatgaaaaaaatcggaatcatcggtgccatggagctggaggtagagaccctcaaagctcacatgaccaccaccaagatcactactaaagcccacatggaatttcacgaaggcacattaaacggtactcccgttgtcatcgtccgcagcggtgtcggcaaagtcaatgccgctctctgtgtacagatcctggcagacctcttcgaagtgactgccatcatcaataccggcgtggcaggttccctgaatgctgtcctggacatcggagatatcctgatctccagggatgcgctgcatcatgatgtagatgccacgattttcggttacagacccggtgaggttcctcagttaggctgccgggaatttattgcagatgagcatctcgcccaagtcgctgtctccacctgtaaagaagtcaatccggacattcacgttcataccgggcgcgtggtcagcggtgaccagttcatttccagcaaagaagtcaagactcgtctgattcaggaatttcagggagattgtgctgagatggagggagcttccattgcccacggtgcatacttaaacgacattccttttgtcatcatccgtgctatctccgacaaggcagatgacagtgccgagatggattatcctacctttgaaaaagccgcagcactccactccgctaagctggtagaagccatgatgccccggatctgagacaaatggcagagcattgcggcatcaccactgccgccagtacagattcaccgcagaacgcagtagtctgtaaatcaagattataatgaaagacaggatcctttccatgaaaaaagaaaagaaatatatcgaatatatcttaaaacaggcagaagcccttcttgccatcgacagtccttccggatttaccgagaaggtaaccgactatctctgtgaagaatataaacgcctcggctacaaaccggttaagaccaaaaagggcggtgtcctcgtagagatcggcggtaaaggcaatgctgtcctgaccatggctcacgtagacaccctcggcggcatggtagctgagatcaagagcaacggtcgtctccgcctgactagggtcggcggcctgaatgcgaacaacatcgagactgaaaactgccgtatctacacgctggacggcaaagtatacgacggtaccgtacagctgaccgacgcttccatccatgtcaacgacgattatcagaagtccgagagaacttttgactccgtggaagtcctgctggatgaaaaggtatcttccaaagaggaagtaaaagctcttggaatcgaaaacggttccttcgtctgcatggatccccgtacccgcatcaccgagtccggctacatcaagagccgtttcctggatgacaagctcagtaccgctattttgctgggatttgctaaatatgtaaaggacgaggatctgaagctgtcccgcaaagtctaccagcatatcaccgtcttcgaggaggtcggccacggtgcctgcgcttccgcaccggaagatgtggaagaattgttgtccgtagatatgggttgtgtcggtgaaggcctggaatgcacagaccgccaggtgtccatctgcgtgaaggacggccatggaccgtatcattatgatgtcgtaaaaggcctcattcaggcagcgaaggacaatcatatcgactatgcagcggatgtatatccttattacggttccgatgccgatgcggctttaagcgccggcatcgacgccagacacggactcattggtcccggtgtctacgcatctcacggttatgaacggtcacataaagatgccgttgccgcaacactggaattattaaaggcttatctggcataactccaaatataaattgcacataaaaagcagtccgaagatcgacagattttctatcttctgccggttccggactgcttttataatactcttgcaagtaatatacctattttgcctcttccgcttcgccgtcttttttcttgttgaatacgaacagcttactgaacacataatttccaatgatgaccagaaccgcagagatcacggttgcaaccagcaggtttacaccaactgcggtcagcacctgcatcactaccatatccaggatcagggtagatactctggaaaggacgaatttcggagcctccgaaagcatcggtgcgttgctcttgaatacgaacttacggttcgtgaaatatgcaaaaataacaccggcggtccagttaataatactcaatacaacattctggaacggtgtgggatacatcgtattatcaaataacaggaagtttgctaagaactttgctgcccaggatacgaccgtggttagtccacctacgatcagatatgcgatgatctcttcatatttgatccacagtgcttttatcttttctatcatgttatcctcatttcctgtagtatccacgcttacgcgataatgtcctacattaatctcatttttcattgttgaaagccgtaattacaaatatacacaaatatctctatgaatgcaagtattttacagattcactacattcctgttttccccgcgcataaatgccttgatgttctcatagacaccctgtacgcagcgggttctcgcttccacgcttgcccatgccagatgaggggtaatgatcagcttgttgctgtccttcagtctgcttaacgggttggacaactccaggggctccttctccaatacatccaggcctgctgcctggatctctcctgccaccagtgcctcatagagatcggaattgttcactaccggacctctcgccacattaatgaggaccgccgtttttttcatcttacggaaagcttccttgtcgatgaagttgcgggacagatcacttaacggacaatgcagggacagaaaatcactctctcttaataaagtatccttgtccacctggggataatccgtgcaggtgctcttaccggtgatggaataaaagatcaccttacagccgaacgccgttgcgattgccgctgctctcttaccgatatttcccattcctacgatgccccaggtcttgccttccaattcataaaaaggtctgtcaaaattagaaaaacgatcctgcgcactgtaagcgccggattttacatattcatcataataggggagcttctggctcagtgtcagcgccagggtaaaagtatgctgtgctaccatagccgtggaataatccaccacgtttgcgaccttaatgcctctggatttgcaatattccaggtcgcagttgtcatatccggtagcgagttcacagatcaacttcacgttcggacaatttttcagggattcttctctcatcggagccttgttgcagacgataacatccgcatctcctacacgctctgccacttcttctaccgtaaccgtattgggataggatgttacttctcccagttcctgaaaacaatctaccggcacatccgtacccgcactgtttctctccagcaatacaatcttcatttttaccgttctctcctgttcttttgtagtatttgaatcatcattctatgtcacataaacatcttcgtatcatgttcatcaataatacaggcatcttgattctcttacactcattattccataaaatataagcttataatacaacaacagcgtaatgaaatcaattcattacgctgtcttttatactttgcagatatatgattgcttgtaacaattacagtctcttcagcagttcttctctctgtgcctcataaccgggcttgccaagcagagcgaacatgttcttcttgtagctctctacaccgggctggttgaaaggatttacgcccaacaggtatccgctgacaccacatgcgaactcgaagaagtagaacagctcacccagatagaactcatttacttcaggaacggtcaccatgaagttaggaacctgaccatcggtatgtgccagaatggttccgttcatagcgctcttattaacgaaatcaacggtcttgcctgccagatagttcaggccatccagatctacaggctcctcgccgatcgtaagctcttctctcggagtatcgatgttgatcacggtctcgaacatgatacgggagccgtcctgaatgaactgacccatggaatgcagatcggtggtcagatccacgcttgcggggaacagacccttgttgtccttaccttcgctctcaccgaacagctgcttccaccactcacttacatagtgaacagcgggctcgtagttcgccagaatctcaacactcttgcccttgcgcagtaatatgttacgcagagccgcatactgcagcgcatcgttctcttcgaaatcattctccagtgcacgctttcttccgctggctgcaccttccatcagcttgtcgatatcagcaccgctgacagcgataggtaacagacctactgcggtcagtacggagaaacgtcctcctacatcatcgggtactacgaaggtctcgtagccttcctcatcggacagatgctttaagcttcccttcgccttatcggtggtagcatagattctctctgccgcacccttcttgccgtatttagcttccagcttctccttgaatacacggaaagcaatagcgggctctgtggtggtaccggacttggagatcatgttgatggagaaatctctgtcgcctacgacatccatcaggtgcttcagataggttgagctgatggagttaccacagaagtagatctccggagtcttacgtacactcttatccagtacattgtagaagctgtggcttaagaactcgatagctgctctggctcccagataagaaccaccgataccgataaccaacagaacgtcggaatcgctctgaatcttcttcgctgctgccttgatgcgggcgaactcttccttatcgtaatctacgggaaggtcgatccatcccaggaaatcattgcctgcaccggtcttggataccagggtctccttcgcatccagggtaagcttcttcatgtaaccgatctcttcttcagaaataaaagagccggccttggaataatcaaatgtaacttgtctgctcataatgctcctccttatatctttcagatatatcacatacttaacaaaactattctgatccatatttgcataactttttgtgaagctttctttattgcaaatatgcctcagatagtttttattttaacaaagttacattccattttcaagatgtatatcgaaatcgtttccatttattatactgtaagcaattcctgtaaaagcgcctgtaattcttcctccgtgacctttgaagattcctcctgttgagacatgcctctgtcttccgttttcccggacatctcatgttccgtggaaaacacctctcttcctgcctcccgaaccatctcctgcggctgcgctgccctgccccggatcggcatcagctctacagtccgcctgccgggaagcttcggtgctccatacagtctcacgtagtcctgctccgtcaccggaatcctgccggacaggtgattttccagataatcgatcagattcgtcttcagtacccgccgcttccccttgatatctatcatcgccgacagagaaaaatagagatacagccccagaaaactcgcaatataatatggcagaatctctccaagcattcttccgtccagaatccccttacagatccccactcccgcaaatactaccgagaacagcatgcactgcccggacagatgataccatgcatcaaaggataaatgtccgaaggacaatcggtttaagaacttgtccacaaacaccggaatattggacacgcctccgtttaactggtaacaattcgcgaatttgaccttgcactgtttcaaaagccggttcccggtggtcgccatattgtctgtctcccggatcattgtatgatacatccacgccagcatcagacgcaccagaacgctgagacataaaaataccaggatccccgccgtgatcactttttcttctttaaatatcgtaaacatcctcaaaactcctttccgtcgtttcctcaagtataacgtatatatgtcctgttttgtacgatttttcatcgtcattcttctactgcgtcagacaaaaattatgagctttctacattttttataacaagaaaagcattctgacattattgtataaaccataaaaatctgctataatcaatctttagtgattctgttagaaaagaggttgatttacttatgatatacaagacaaagggtacttgctctactatgatcgacgtagaattaaaggacggtgtcatcgattccgttaaatttaccggcggctgcaacggcaacctgcagggcatcagtgctctggtaaaaggtatgaagcccgaagaggccatcagccgtctgaaaggaatccgctgcggcttcaaacctacctcctgtcctgaccagctggctcacgccttggaggaaatgatcgcaaaataataaacaggttaccgaaaggcattgagattttatgaaaaaaatagtactgaccggcggcggaactgccggacacgttacaccgaatattgcattgttaccggcgctgcaggcagccggctatgagattgcctacgtaggctcctatgaaggtattgagaaaaagctcatcgcggactttaacattccgtataccggaatctctaccggaaaattccgcagatatctggatcccaagaacttctcggatcctttccgtgtcatgaagggattcgtggaggcacgcaattatctgaaaaattatcagccggatgtagtattttccaagggaggcttcgtaagcgtccccgtggtccgcgccgcagcttccttacatattccctgtatcattcacgaatcggatatgactccggggctggccaataagctgtgcattcccgttgcggaaaaggtatgctgcaatttcccggagactatgaagaacatccccgcagacaaagccgtcctcaccggttctcccatccgtgcggagctggcccagggcagtaagcttgcgggacttaacatgtgcggatttaccgcgaataagcctgtgatcatggtcatcggcggaagcctgggtgctgccaatgtcaataaggcagtccgtgatgccctgccgaagctgttggaggatttccaggttgtacacctctgcggcaaagacaagatcgacaatctgttattaaatacccccgggtataaacagtttgaatatatcaaagcggaattaaaagacatctttgccatggcggatgtggtgatctcccgtgcaggagccaacgccatctgtgaactgctggcactgaaaaagcccaatatcctgatccccctgcctgctgccagcagccgcggagaccagttattgaacgccgcttccttcgaagcccaggggtattccattgtcctgaatgaggatgatattacgacgaatcttctggtagctaaagtacatgaactgtactttaaccgccagaattatgtagacgccatgagcaaaagccatcagatggacgcagtgaagaccattatggagctgatcaacgctgcggcagagaaaaagaagaattagcatcttaacagtctaaataagatcactcagctgtgcaaattgttccagcgtcagtgcctctccgcgaacggtaggtgacaatcccatctgttcgagagctgctgacgctgattcttttgtaattccgggaagtcccgcattgccaagaccgttcaccagagtcttccggcgctggttaaaagaagcacggatcagtgagaacatcttcttctcgtcctttaccttcacaggcggctcttcataacgggtcagacggatcaccgcactacccacgttaggtctcggaataaaacagttcggaggaacgttagccacgatctccggcttcgcataatactgcaccgctagggataatgcaccgtaatccttcgtgccgggtcctacctgcatacgatccgccacttccttctgtaccatgatcgtaatgcttttcagcggtacacggctctcgaacagtcccataatgatcggtgtcgtgatgtaataaggaagatttgccaccactttaatggggcgtccaccgtttttctcctccaccagtcggttaatatccactttcagaatatcatcattgatcactgttacattatcgtaatcctgcaaagtctcctccaggatcggaagtaatgccttgtcaatctccaccgccacaacactgcccgcgcgctccgccagatactgtgtcatggtgccaatgcccggaccgatctccagcacacaatcctccttcgtgatctccgcggaagatatgatccggtctaagaccgtcgtatctatcagaaaattctgtccgaattttttctgaaaattaaaatggtatttctgaagtaccgcgatggtattctggggaattcccaaataagccatggtaaacctccttaattacttatgttaatcatgtgaatccttaatagaatttaaaatcctctaaaaagtgaatgcaatcatacagtaccagtacatccatgccctgctcgggctcgtactgctccatgagctggaacagtttcccgttaaaataccgaagatccaccacatagatcgtctcatagtgcgccacgagcagcgggatcatgctgttcgcataggaatccttgatcacaaaaagcgtcttgccagggttatagccggtatgaatctctataaaggcatgattatcattcaggaaaaatccgtactgattcttggtctccagatattccggcgcatacagagagtccgccgtgtctgcgaaatcataggtgaccgataccggctttttctccgtctcgggaaaatactgtatcctgtccttcgtccaggccacattgatccgggactgcagtgtcccctgaaaatcctccgacactgtcttcatgcctgccgtattatacggataggggaattttcccatgttgtctgcccatgccaggaatccgtaataggctccgaggctggtccagtgatgatccgtgcggtaatagatcggttcccccgcatgctcctgcaatgcggagtacacatcgatatagtgctcctcatcgacagactccttcaccttcgcaagcagtctcatctcatcataatgcggtgcaaaagcgggcagcttatctgtcagaatgttatctgcggtaggtaccagcatgacttttgcatcccaccggtttaccagctttttcagggacgcaatccgggaatcttccatctgttccgtgtattttttcggatcatttaccccgatcagataacggtctgcccccagatagactccattgatctcctttttctgaaacagaatatccgcgcgggtctttattcccacccatttatcccgtcctacaaactggtcagacatatattcttcgtaatcgtcgccatactctcccgacagcaggctctcccaggaaaacgtcggtctggaagccagcaccctgttctctgtctcagaataaactctgtcactgttacacagatcggcgattcccagaacgaaaagaaccgcacatagcagtccgacagtcagcagagcatttctcttatcatccacacacggttcctccttccctgtcagaatcggaaatacaaaaacgggttataagatgcatccacaatatatgctacagacaaaatcagcaatgccgcgggaatgactttttcacctacgcggtataatgccatggctggccctgtcttgctgcttttgagtctgtgtatcagcagactgccgacgggcagacatgccaccagtgcaatgatcagaagcaccagatactcatttcccaaaaacattgcctgtgtgttcataagtccaacaccatttaatccaaacatcgcctgcagatatgccagaatctctcccggcttctccagtgcgaaaaatacccagctgatcaataccactgtcagcgtataggctctgccaaacaccaccggggcatttttcaggagttctcccaaaaacagtttttccagaattaaaaacagggcaaaccaaagtccccacagcaggaaattccaccctgcgccatgccagattcccgtcagcgtccatacgatcaggatattgaggatctgtctgggcagccccttacggttaccgcccaggggaatatatacatattccttgaaccaggtgctgagggaaatatgccatctgtgccagaaatccgtaacagaggtggcaatataaggataattaaaattctccgggaaatgaaatcccaaaattgctcccagtccgatcgccatatccgaatatccggaaaaatcaaaatagatctgaaaagcgtatgccgcaattcctatccacgccatcagcacactcatctgatcatttttcagggaagatatctgtgtccacaaaagtccgagattgttggccagaagaacttttttcgcaagtcccgtcacaaagcgtttcgctccgtagctgatggcatccagatcggaacgcctttcctgaagatatttttcgatctgatgatactttaggatcggtcccgcgatcaactgtggaaacatggtcacgtagacaccgaactgtaaaatattgcgctgcgctttggcatctcctctgtatacatcgatcacgtaagacatcgtctggaaggtgtaaaaagagataccgatgggtaacggaagacccagcaacggaatcgatgttccgaacactgtattcaccgtctgcagcaggaaatcggcatatttaaaaaatcccaggataaacaggttgataacaacagaacataacaaaaagatcctggagcggtcctcccctctatagtcctctatcagccttccccatacgaagtccgaaatcgtggaaaaaagcatcagaaaaatatagaccggctctccccaggcataaaagaccaggctccccagaaacagaaccagattcttcatgttccggggaaccaggaaatagcagatcataaaaatcggtaaaaaccgaaaaagaaacaacacactgctgaataccattcactctactccgcatttactccagagtctgtctgatagcctccagggcaagttcattctgctcctgacagtaagtgatcacggcctcatccccctgctcttccacagaggaagtgtccgcgcccaactgtacaaagcatacataatcacctatccgttccacccgggatgcctgtatcttgccaagattcatgggatactgcatcgtgtcattcaccagactgtcacgataggcgttcaatgcattttctacatcctctaccttaccatcttttgcgtgaataatcaataaagtatctacattgacactgatcatgggacattcgcccagataagcatcatacagatccgcactgacaccgtaagtctcattcagcatttcctccggaatttcggaatccggccagtaatcatcacccagcgcatctgtcactgcctttttggcgctctgtaatgccgatgccacatctccactttcctgctgtgtgccggcattttccgtctcagtgctctctacactcgtcccggtggattccgcggtgccttctgtactttccacaccggtctctgtagtagcaccggtattcttgtcctgcccgtttccgcaggcagccatagccagtgccaaagtacccataagtaacatacatgctaatttcttcttcatatagtctctcctcatttctatggggcatgcccatatttattgttgtagtgtccctcagacggggcttcctatactatcagacgacagctgctgatgaaaagtttcaaaaaaatcaatttttgctttctttctttacaaagctgcgggtcgtaggctatacttgcaggagaatacggaaatgagtccgctgcatacgcagcagaatgtgaggaattatgagtatattaaacgtagaacacctgacccacggcttcggcgaccgtgctatttttaacgatgtatcgtttcggctgctaaagggcgagcatatcggtctcatcggtgccaacggcgagggcaaatctacttttatgaatattatcaccggcaagctcatgccggatgagggaaaagtggaatgggcgaaaaatgtccgtgtcggctatctggaccagcataccgtgctgactcccggcatgaccatccgccaggtgctggcttccgcctttgactttttatatgatatggaagcacagatgaacgagatctgcgacaaaatgggagatgccactcccgaagagctggaacagtatatggaagatctggggacgatccaggatctcttaaccatgcatgatttttatatgatcgatgccaaggtggaagaagtggcaagagccttaggattgatggagatcggtctcgat

SEQ ID NO: 11280 - DNA, 318 bp, Unknown
  gut microbiota DNA sequence
tattctcaaatgctctgtctaaataattgggatgtctttcataacccagcagaaaaggactgctcccccggacatagatgcggcggagactgtgagattttcttggaaagtggtcgagccgcaggggcaacgcgaacacgatgttcgcgttagccggtaggcgacatggatggcagcgtaaaggcggccccgtcatgatgagaagcacttcgccactttcctttagaaaatccacagttgtagctagcatctgagtccagggcgggcagtcctttctgcgtggattttagaacaattatttcactaactctcaagtta

SEQ ID NO: 11281 - DNA, 12304 bp, Unknown
  gut microbiota DNA sequence
aggctcctgacggcgaaaaaaccactggagaagtccccagcggagaagccccggacggtcagaaacccgagaaagatatgttagatgagatgaccttaaccctcagcggtgacactatgactattacggtcaatgatgatacgatcatcacgattgacggagcggatgccacgccggatgacctccaggtaggtgataccgtatctttcttcctggatggcgaggtcgtgacttctttaagtgtaggtatgccggagctgacacagtctaagcagtctatgcaggctccggaacaaaagtaagctgccgcataagcatggtgcccagaatccctgccatttcttccggagactggggagtgacttctttcagccaggtctctacgacaccgacacaaccggtaatgatgaaggaacagagatattcataattagcatcggattgcgcactttccagaaagcggagagtgcgctttttgatctggtccttcaggcggttaacgaaggtgaggtctccatggggaccgatcatgactctggcgagatctctgtggcggtctaagaagcggaagaactctaacaggagaccgtcagaggacaatgtggaagtacctaccggttcctgttccatgatctcgttgaactcccggaacatttcatcttccactttatggagcatatcgtagatatcatcataatgcagataaaaggttccgcgattgatatctaccagttctgtgagttctttgacggaaatatcctgaatatcgtgggtttccatcattttgactaaactctgcagcaacagggcacgggtcttgcgcacgcggcgatccattttttccatacgccaatcctccattctttccggaaaatgatcagaaatcactttttatatataatatctaatacgtatctaatgcaaatctgaattttttctaaaacaatgaacacaaatcaatacaatgttcaaaaacagacatatcaacacaatttgtggcttgctttttcttccctattattatattttgcttgtgttagaaaatcaacacaagttcattagatgacagtaatacaattttttatttttgtagtaaggctttacagaagcgggaaaaactcttaaactaagaatagaaaaatcagatacataagggtacaaaaagagacacagcaggaggaaactatggcagcagacaacacagaaaaagacaaaaaagataactcctttatgatgaaacttgccacgcttatcgtagataaacgaaaaggattctatctgatctttattgttttatgcatattttgcgtattatccatgaataaggtcaaagtaaataatgacctgaccacatatctgccggatacgacagagaccagaaggggactggatctgatggattcggagtttacgacctacggttccgcccggatcctgatctgtaatgtgacttttgatgaggcacagaagctggcggatcaggtggaaaaaatggatggtgtcagtatgctggatttcgatgacactgaggatcattatcatgacatggaggctttattgtctgtcacttttgatgaggaagcggatacggaagccacacagcagcatctgaccgaggtactggatgccctgtctgattatgatgtttattattcttcggatatcggtcaggaagagcgtgatgcggatgacctgaataatgatatgatcgtcattctgcttctggcagctgtggttatcgtagccgtgctgctatttacttccacaacttacgcggagatcccggtatatctgaccacatttatcgtggcagctattttaaataaaggaacgaactattggttcggtactatcagctttgtgacgaactctatcgcagtggtgctgcagttaggtctggcagtagattatgccatcattttggcacaccgttttatggaggagcatgaggacaaggatgccagagaggctgtaatagtggctttgagtaaggcaatcccggagatttcttccagctccctgaccacgatctcaggtatggtagccatgatgtttatgcagttcagaattggttacgatatgggtattatcctggcgaaatccattattttcagtatggtagcagtatttttcctgatgccgggactgctgcttaccttttccaaggcaatcgacaatacgcatcataagagttttgtaccgaagatcacggcagtgggaaaattctgtgtggctacccgctacattgtaccgccgattttgatcgtgggtgttattgcagcatttttcctgtccaacagggcgaattatgtatatgatgtaaatacactggaatccagcagtatgagtgagaataaattctcagtcagcatggtcaataaggaatttggcatggtgaatcagctggcggtcattgtgcccaacggtgattatgaaaaggaggcacagaccctgaaggcactggaaaagttggatgtggtaaaatccgttcagggacttggcaatattgaagctatggatggttacatgctgactgacaaactgaatcccagacaatttgcagagctgatcgatctggatgtggaagtggcggatatgctgtattcggcatatgccctggatcagagtgattacggtgctctggtcagcggtgtcaacgattatgaagtaccttttatcgatatgttcctgttcatttatgatcagaaagaaagcggaaacattacgctggatgatgatctggaggagactttatcggacgcacattccaagatcatgattgcaaaggatcagttgttgggagaagataattcccgtttcgttctggaactgaatgtaccttatgaaggagaagagaccatcgcagcgctggatcagatacgtaataccgtggcgaagttctataatatagatgatatcctgctagtcggaaatgccaccagtgataaggatctgggagattctttcgcaacagataacacgatcatcactgtactgacggcattgttcgttatgatcatcctgttgttcactttccagtctgccggcttgccggtattgctggtagtaacgattcagggtagtatctggatgaacttctcactgccgtatctgctgagtgaaaatgtatacttcctgggatatctggtagtgtccgccatccagatgggtgcgacgatcgactacgctatcgttatcaccagccgttatatggatctgaagacgtacatgccgatcaaagaagctgccatcgaggcgctgaaccaggcgttccccacgattgttaccagtggttccatgctggtggctgctggattcattatcagttatgtatcttctaatgcagcggtagcagcgatcggactggcgctgggacgtggtaccctgacctctattttattggtgctgctggcattgccccagacactgctgatcggagatatcattattcagaagacggcatttaccttaaagcgtgatctggcgaagccgctgccttctgccggtaggatccgaatgaacggtcatatcaagggttatgtcaacggtgtgctggaaggtgatttcatcggtgtcatcgacggtgagatggaagcggtggtgcgtcccaaggataccgtgaccatggagcgggaggatgcagcggagaatgcgtaccccaggttggaagcacaggagctttcgaataatacagcagaaagcgagggaacagaagatgaacagtaagagattattatgtttcctgctgggagcggcattactgctgcagacaccggcaaccgcttatgcggaagagacgttaacctatgaacaatataagggcggcagcggttatagcagcaccacgcaggagcaggattatgcaattgtagagatcagcacggaggaggatctgcgcaggcttgcggagaactgtgtgctggacagctggtccagaggtatcaaagtagtgctgcgcaacgacatcgttctgagcatggaaagtgaattcagtatcccaacatttgcgggaattttcgatggtaatagttttacgatctccaatgtaaagcttacggggaatggttctgcggcaggttttttccgttatgtgcaggaaggtgccaaagtacgtaatctcacggtgagcggagaaatatctccctccggaagccagaatcaggtcggcggtatcgtcggggtgaattacggcagcattgagaattgtaagttttccggtaatgtgatcggcgataatgaagtcggtggcattgcgggtgtgaatgaagagaccggcgagatccgcagatgtgaatccaacgcaaatgtcattggcaatcattccgcaggtggtattgtcgggaacaatcacggtatcttaaataactgcagcaacagtggcagcatcaatacctatagcacggaagtgacctatgatctggatgatattaccatggacaatctggagcagatcaacagtacttccaatgtgactgcgcatacggataccggcggtatcgcaggcatctctgatggtaagatctattactgctccaattccggagccattggctatcagcatgtgggttacaataccggaggcatcgtaggcagactgcatcagggctatctgcagaattgcacaaacaccggttatgtgcagggcagaaaagatgtgggcggcatcgtaggacagatggagccttttctggagatccagtatctcagtgacaaattaaaggagctggataccgagaccgataaatttctggatatgctggatgcgacccagaaggatgtcagcagctacagcagacaggcatccgcgttgaccaaaagtatcagtacgaatctgaaggatgccaatagcgcgggaaattcccttaccggaacaacgaatgatctgtggtatatttacaatcaggagctgaacggtgtcagcagtgatctgaaagttttgaataatgacctgaacaaacaggcagaggacgataaaaataacggcaacagacacgatatcacgctgagcggtaatgatctgagcggcggtgatattacgctctctgtaccggatgacacagagagttataaagcggcgctgaaaaagtttggtgaaaatgccacgaagcatctgaataatatgaccaatgcatccacggaccgcagtggtggcattaagaataatctggatacactgaatcagagcctggataaagcatttgaccagctgggccagctaggagatgtgctccaggcagggtcagacagtaccagcgcacatatggatgaactgatggatcaggcgagggtattgcggaaactggtcagcgagatccgcgatgatctcttccgttacgaggggatttctgtggaggatacttcggatgaatccgccagcaagggggaagtgaaccccggagatcccgatgctgaggctggtgaggcagaacctgagagaaccgaagaagcattatatgacacctccagcttccaaaaaggtaaagtaacactgtgtgtaaatcgtggtacggtagaggcggataccaatgtcggcggtatcgtcggacaggtggcaacggaatatgattttgacccggaggatgacatcaccttgaccggaacggagagcttcgatgtggagcagaccatcaaggcagtcgtaagagacagtcgcaatttcggtgatatcaccggtaaaaaagataacgtgggaggtatcgtcggcaaggcggaatacggagcaattatttcctgtgaatcctatgcccccattgaaagtaccggaggcagtgatgtgggtggtattgccggatctgccaattatgcgatccgcagctgctatagcatgggcaggatcaccggtaaaaataatatcggcggtatcgccggagaaggctgcgatattttttacagttatgcatacaatgatctggatatgtccggagaaaatcagggcagcattgcaggtaaagtcagtgatgacggcagcctgtacggcaattattatgtagaaggcggtgtcggcggtgtagacggcatcggttaccagggcggagcaacaccgttgtcctatcaggaactttgcgcaaaggatggagttccggaagctttttcgcagtttacgatcactttcctggcagatggcgaggaagtggcttcctataaatgtaattacggagactatctgtctgcagatcagattccggaagtgccggagaaggaaggctattacggtgtatggccggattatgatttcagttatattaccggtaatcgtgtactggaagcggagtatgaggagtggaccgcatccattgcttccgcagagaaaaatgatgccaacaaacctctggtcatggcagagggtaacttctatccgaatgctgcattgcatctgcagatagagggggacacatataaggtctccatgaccaactccatgaaagaggacgcaccggactataccggagaagcaaccttacgtgtctactgtgaggatgctgacaatactgtagtctgggtagaacaggacggcgaatacagagaagtggaatccacggtgatcggcagctacagacagttcaccatggaggtacccggtagcttccgtatcgcggaggcagaaggcagccatacccggatgatcgtaatgtgcatcatcggagtagcagtagggatactgttgatcgtattacttgtgaaaaaggtggcaaaacgcaggaaaaagcgtagacaggaaaaagcggagcacgccgggcaggcggatgatacagagggacagttatgatccgggcagtaatttttgacatggacggtacgttgatcgataccgaaaaatattaccgtattttctggccgaaggcattggaggcttacggctacacgatgacggatgagcaggcactgacgatgcgcagtcttggaaggccttttgcccccagacagctcaaggactggtacggtgaagattttgactattatgtggtgcgtgacaaacgaaaagagatgatggaagaaacactggaccgggatggcatcaaatgcaagcccggtgccgtggagcttctggaagatctgaaaaaaaggcatatcaccgcagcggttgccacagcaacggatctggagcggaccgaaaaatatctgacgcttacagggatcagaccttactttgaaaaattgatctccgctaccatggtagcggaaggtaagccgtctccggacatttatctctacgcctgcgggcagctgggactcgccccggaggagtgcatggcggtggaggattctcctaacggtgtcttaagtgcataccgtgcaggctgcaaggttgttatggtaccggatcagacgcagccggatgcagaactcaaaaagtgtttatatgcctgtgtcccgactctggcagagatcagccacctcgtttagaggtggctttttgcatgtatccgcgtatgcacttgatttttatatattgctgtgttattattttaacgattagagtcaccggcacagatatgaacaaaaatagctgcaaagcagcggagagtgcgatcgatcgcacgattttgcgaatggctgtggctgctggaagccttgagaaggggcagaaaggatatggaagaaatgaattttgatgacatcgtagcaaaagtaaaagaatgtgggaagaagacggttgcagtctccgtagcacaggacagtgcggtactggaagctgtacatgaagccaagagactgggtattgcagatgcaatcctggtaggtgatgaggcaaagatccgtgagatcgcagcaggactgaatatggatctctccgattatgagatcatcaatgagccggatatgatcgaagcctccctgaaagctgtaaagcttgcacatgacggccgtgcagatatgtatatgaagggtctgatcgactctaagaatttcttaaagagtgtactgaacaaagaagtaggtcttcgtaccggtggaaccctgtctcatgtatgtgtgtttgagattcccggcattgacagacttctgttcctgaccgatgttgcattcatgacatatcctacactggaggagaaggttcagatcatcaagaacaccattccggtatgtaatgcctgcggcgttgcagagcctaaggtagcacctttagcagcagttgaggttgtaaatcccaagatgcccgttaccgtagatgcggcagaactgactaagatgtgcgaagaaggacagattcccggctgtatcgtagacggaccgctgtctcttgacctggcgatcgatcccgaggcagccaagcataagggcgcaaccgaccgtaagattcagggggatgcagatgtattgctgttcccggatatccatgccggcaacctggtatacaaagcaatcgtacatatggtaaaagtaaagaacggatgcatcctgaccggtaccaaggtgcctgttgtcctgaccagccgttccgatacctttgagaccaaggtatactccctggcactggctgcagttgtagcagaagagatgaaaaagaatcagaaataagctatggatatcgtgatcgaagccgctgcggaagctgcgggagaactgctgtcggcaggtatagatgctgtagtggacaaagcggcaaagcataagagcaaatataagagtgaatataggaggaaacacacaatggcaatcaagagtctgatcatcaaccccggttccacatccaccaagatcggtgtatttgaggatgagaacttattatttgaagaaactctgagacattctaccgaggagatctccaaatacgatactattttcgaacagaaggatttccgtaagaagatcattaccgatctgctggcggagaaaaactgcgatctgaagagcttcaacgtgatcgtaggacgtggcggtctgttaaagcccatccccagtggtacctatgcggtaaccgatgatctgctggaggatttaaaagtaggtgtacagggtcagcatgcttctaatttaggcggtattctggcaagagagatcggtgatgagatcggcgttccttcttacatcgtagaccctgttgtagtagatgagctgatgcccatcgcaagatattccggtctggaagagatccccagaggaagtatcttccatgccctgaaccagaaggcagttgccaagagatatgcaaaagaggccggcaagtcttatgagtccctgcgtctgatagtagtgcacatgggcggcggcgtatccgtaggcgcacatgaggacggcaaggttgtagatgtattcagtgcatttgacggtgacggtgcattctctccggaacgtgcaggcggtgtgccttgtgcagcactggtaaaaatgtgcttctccggaaaatataccgagaaggagatcagtgcaaagctgatcggcaagggcggcctgaattcttacctgggtaccaatgatatgcgtgaagttaccaagcgtgccaatgaaggcgatgccaaggcagcggaggtgaagcaggcattcctgttacaggtagccaaagacattggtgctatggcctgtgtgctgaacggcaaggtagaccagatcgttatcaccggaggcattgcatatggtgaggatgtagtggctaagctgaaagagagatgcggctggatcgctcctgtgaccgtatatcccggtgaggacgagctgttagctctggctcagggtgctctccgtgtcatgaacggcgaagaacaggtgaagcagtactaatttagagtaaaaatatagaactcccggtggaatgattccatcgggagtttttgctttagggaatagaactaaaaatcagctttgacagaattcccagtaccagcatgtgtaccggataaaaggcatagcaggcaagctggatcttgcggttatgcgcgccctggcgtccatggtagcaccacagaagcggcagacacaacagcgccagcccctgttctgaaatctcgaaggcatgaccgaaaagctgtaatggaatctgcattcctgccaacagcatgacattgatccagtagagtccggcaaactgtccggcaagctgccaccatttttttccatggaagagatagaatacgataacagtcagaacgccttccccgtaatagtcgaacatgaggagggttgccagcacgtagccgactacagatagcagtaggatcgccgggatccacagccagaccggacattttttccgtagcgtatccattgcccagatacacaggaagcctgtgagcagtgtccagatcacgttctgatgaaacgggtagaataacagtccgctgtacatcagattgatgggaagctcagacagaatggccagaagaagcaggcgcatgcaatattttttcttatcatgggtatggaagaagccttccaccaggaaaaaggcgaacatgggaaatgccagtctgccgatgccggtcagccaccaggcatctccggcgagggtagcccacaggtgatcacagaacatgaacgccatagcgaggatatgcagcgtcagagcactgagatccggtgggaaaatagaacaatgggatcctttgttttgcaaaataaaactcctttcaaaattccttacggaaggatatagttgcattatatcttgtttatgcgctatagtaaagatgattataattcgtcatataaatccataaacaggaaaggacaggaatgaaacaatgtatacagacggacagatctatatgggtctggcagatggccagcgtgtgaatatgcagctgaatatgagtaaccgtcatggactgatcgcgggagccagcggcaccggcaagaccattacgatgaaagctatggcggaatcattttccgacgcgggagttccggtatttttatgtgatgtcaagggagatgtctccggcattgccacagcgggtgttgcttcggagtccatggacaagaggatcgataaattcggtatccgcggcagcttttcctataaggcttatccggtctgcttctgggatatctatcaggagggcggacatcctgtgagagccaccatctccgatatgggaccggagctgttatcccgcattctggggctcaccgccgcgcaggaaggtgtattgaatattgtcttccggatcgcggatgacaagggacttttattgatcgacttaaaggatctgcgtattctgctgaattatgtggcagaacacaaggatgactatctgaccacctacggaagtatctccaagcagtccgtgggcggtattctgcgggcgttactgcctttggagaatcagggcggagacctctttttcggagaaccggatctggatatttatgactggatgcgtacggatgtgtacggcaagggtatcgtcaatgtgctgaattgtgtaaagctggtgcagaatcctacgttatatgccagcttcctgttatggatgatgtcggaactgttcgaaaagcttcccgaggcgggagatctggaaaagccgaagctggtatttttcttcgatgaggcacatctgctgttcgccgatgcaccgaaagtactggtacagaagatcgagcaggtggtaaagctgatccgttccaagggtgtgggcatctatttcgtgacccagagtcccagtgatatcccagattccgtactggcacagttaagcaaccgggtacagcatgctctccgggcgtatactccggcggagcagaaggctgtccgggcggcagcacagtctctgcgggccaatccggcgtttaaggcagaggaagtgatcatggagttaggtgtgggagaagcactgacatccttcctggacgagaacggcgtgcccggcattgcccagcgtacctccatcatctgccctcagagttttatgggaccggtggacgagacggagcgccggaacctgatggcgcgggacggcatgggacgctatgatgaagcagtggacaatatttctgcctacgaagtgctgacagacactatagaacacgaagcaaaggcacaacagcttgccgcagagcgagcccagctggagaaggacaaggaagctttggcgaagcagcaggcaaagcttcaggaatctgctgtgaagcagaaacagaaggaatgggaagccgctcagaaaaagaaggaaaaagcagcggaacgcagacaggcccagatcgagcgtcagctcatcaacaccggtgcccaggtcatcaagagaggcattctgagcacgctgtttggaaaataatagattgctaacttgagagttagtgaaataattgttctaaaatccacgcagaaaggactgcccgccctggactcagatgctagctacaactg

SEQ ID NO: 11282 - DNA, 42710 bp, Unknown
  gut microbiota DNA sequence
aacgctttgtgtctctggaaataccgttgcaccttacggtctttctttttctccgtttcatcggcctctgccagaattctttcctcttcttcacgttctgcacaatatttccaaaaattatccaccacttcatccgatgacagtctgtctttctcctcctcaggagtcagaccgtccaacagttttaataaattctgaacttcatctgcatcaaattcttcatcggaagcttccattgtataccaatctaatcgtttctgaatctcctgaatcagactttcattgtcctgtttcttcatttctgctctgttcccttctgtatctcatcgtcgggcttcgacacctgacctttatccctctctattatatgtgtctcttttttgtcatttcttacagacattttttgttttttgtcgaataccttaccgtcatatatgatttttgccacttttccacggagcctgttgattcgtacgctcatgttgttctcggacgtattctccagctttgccatttctggtattttataccctcgtacgaaataccgtgaaaaacgtttcttatcttctttgtccagatcattctccaataggatatccaattctactttaccatattggtccttcgcctcaatatgctcatgaccttctatagggatttcacgttgtagatttctggtctttttattaaattcctggattttgtatctcgccgtttcaatcagaaaaccggtctgattgggatgtaccttcagctgatcccattttttataagcaatataaagcgtctcctgtaatacatcctgtgccagagacttgtccagtatccgacatttgataaagtcatataagatcgcctgattctcacgaatcaatctgttaaactcctgatggtcggcttccatctcttctgtctttttcttatgcatttgtcatcgctccattatgagattttatcttctcaagatttttcttatataatttaccatttgttcctatactaaatatagatgtttttacgattcgtttaaaatttctattttgtatctatatatttatcttttcataaaattgctgtcaattatttgtcgccgacaaaatccgctaatatttgtgccgattaagtgttgacaaacaaggtcgcttttgttagaatagaccacggtgattgcataacaatcacgtgatgctgctgtggctcagtcggtagagcgtcgcattggtagtgcggaggtcacgggtccgattcccgtcagcagctcttctttaaaaagtatgatcttaaaagttatagacttttaagatcattttttatttctctatttaacatcttccaataactgatgaacggaaatatccagcacttccgatatatccaaaatcacttccagtgaaaaaggctggtcacaattaggtgcttcgattttggtaaggtaactaatgctgatacaaaccatatccgccaattgttcctgcgtaagtcctctgagcttacggtattttttaattgtctgtcctatgctcttatactcttttgaatgtttctgattcattttcacatctcctgtatctacccttacaattctaatagataatgtgaaaacggaatttcagttataatgaaagtttcaatacataaaaatatcgactcctttctccgaatcaccggatgaaaagagtcgatatgaatactgttttatattaattacgacgtaatatgaatttttccaccagatcattcaatgagaatgcctgtgcggataattcttcactggtagccgaagattcttccgccgatgccgaattcgactgtactacctcggatatctgattcactccgacttctgcctgttccatagcctgcgcctgtgccttggattcctcgctgagacgtttcgcatctgcagcaatctccttaactcctgtaacgatctgttccaatgagtcggctgccgcttccgctgccatattgccgttctcaatctcctgcaacgatccctcgatcaggcttctggtatctaccgccgactgtgcactctgctcggccagtttacggatctgttctgccactactgcaaatcctctgcctgcatctccggctctggctgcctcaatcgctgcattcagagacaacaggttcgtctgactcgcaatatcttcaatgtcagcaataatattctgtatctttttagatgtttcattgatccgatccatttcttccatcaatgacttcatctgtgtatgaccttcgtctgcctgctttgcatagttctcagccttttgtgtagtcttctgaagctcaccggcagtacgtgtgaccgaatctgtaatattggtgatcgttgctgtcagttcttccacggaacccgcctgatccgtagccccctctgcaagtgactgtgcagactgtgccagattctccgctccggcagatacctgcttggcagcctcctctacctgttccagcgtactgttcatctgtcggttcatcttgcgcattgcatttttcagcgctccaaactgaccaacatatttttcctcaatcttagttcctattgcataattgccatctgccatctggcccagcagttctcctgcatccgtaatgatcagattcagattgtctgccatttctttcgccacccggatcatgtatgcaatttcatcctctgtattgcattccgggaattcacttaccaggtctccctgcgcgaacgactgaagccggtctgccagtgccaccatcggtttctcaatatcacccgccatttttttgcccagtatgacagaactccaaaaagaggatatcacaatcacaaggatcacgatcaacatgataaattccatatgacgcagattcttttctgcacgatcccctttttcaacacacacattcatcagattcacaaattgtgcgtagacattctcgtactgtgttgtcaagtctccggtatccagttcctgtgcttccagataaccatctgcatcatctgatatagccagcagcagaacctgctcatccagttcccaataaccatccagtgctcggagcacttcgtcatatgccgttctgccttcatcaaaccggagcgttctgtcaagctcctccatgtatgtattgaacgcttcctttttctcagtgtgtagctctgtctgctttttaattaccgcttcctcatcatagccgactaccgcgcgcaatgcacttctgctttcagagaaagccgtcatagcttttccgatgtctccctgtgtaaagccatatctgttcaatgccttttcatactgtgacgctgctatcaataatgccacaacaccaatcattgccgcaatcgccccgattacagctaccttaacaaatcccttcgtcaggcgttttttaattccctgttgcttttgttttttcattcaatcctccccttgtgctgtaaaaacaaataatgccacaagccacttttatatgcgtattataacactttataatcagctcttcaatggtacgatggtaaccaaatccaactctctcctaagggaaaaaaggattccgaaaaatccccttactatgctttacatatatgctgattttacaatactgaaacttgtctttgcagtttttctgttttattatactcgtaagttagtaacttgtgagtataatcttgttcaggagggtaagtaaatgagtcagttttattgccgcgagaatgatcttattctattccatacttcttcatcattgcttccaatacttccggatcagtcaactgcgttactttatctgcatcttctccggcactcatttgtgatattaaagtcagcagatgtgttcttcctgaacgtaaagtgtaccccttgtcaaggacaaattaagaagaaggaatttgttctttctaaccagtagatggctatatcagtttgttttattaccttcttcatcatacatatccatagaagggatttttcccttaatcggatatatgcctgttgttatatatttatagtattcattgggagaaagcttcgctaattcccactgatatctatcattgttataataatccatccaatcgtcaataatggcacgaacctcgctatatgttccacattcttttagcctgtctcctatatgatccttcatacgtccaaagaaactttcctgaggtgcattgtcccaacaatttcctcttctggacatagactgtcttaagcctttatctttgacaagttgtataaaactgcaactcgtataatggcacccttgatcactatgtaagattgttttagttgtaagggaaactccatgcttttctatcatcaggttgactgtttccaaaacaaaatccacttctaaagattcgcttaacacatacgataaaatttgttttgtaaaggcatctataattgttgatagatagcagaatcgaccatcaaatggaacataggttatatccgtaagcaatatccttctcggaccatatttttcaaactcccgtttcacaagattatcagcaacactattcgtctttatcgcctttgccatccttctgtaagggtttgcctttcttatgttacatataagaccatatttcttcatcaaccgtcttattttcttgacattcataacgattggcggattcatatgtaacaatctcatatagattccttgagcccctttatcataacctctgaagctatatgcagctaataccaattcaaaatcggctctatcctgtgcttctttttctgctcttttatccgctgaatgtacccagttgtaataaccggatcttgatactcctgctatttcacagagcatcttaactgacaatgtattatttgctttatttatcgtctcatggatgatttcaaatttgctttctgaagtctccatgactaatctctcttcctcgaattgtccgcaataataattttttttaaaaactctacttcttgtcttagatacaaaagctcgttctgcatacgttctatggattgcggtgatgacaaatcctcttcatttgttgctttcataggaattcttttttgtctgttttcgccctcggtaaagccattgcccgatagagcctgacgctttattctttgcacaatgtcatctatctgtttttgtccaaagtactctagattatatccaaaatccagaagaatttttcttggagcgttaccagcctgatagctgatccaaaaatcttctttaaatttagctgtaaaataaagcttgttctttgtcacattaagtgtgtacgggttagctttgagttccctaatttgtttcggtgtgtattctttcatatttcctccgatagatacttttattatacatcatctaccagaagaaatcccttcttttattgtccactaaccaggattttatcctttcttcttgtgtccatttttaaggagcccttcttcttatcgtgtccattctatggggtttattttattttacacaaacgaacaatttcctctgcttttccttcttcttttccatctactcgaccgtctttgtaaatgaccctcttttccgcctcagcgtcatactcgaataacaccatatcaataacctccttcttattctcaagcaaaaattccttcaaaatatctttcttaatacacacatccactgcttgaacgatggcctgtcgatttggatataactttgcctgcttgcggacttctgcaacgaactgggcatactcctttaaaatctggcaggcatccatcagctcggcgttgaacccgagattgatattgattacctgtacctgtaattcaagctgaggagcctcttccttattccggtaggcactggacagcttcagggtgctgtattctgggagaggatccgtcccattataaaatactacaaaatgtggagtatccagcatctgcaacttgttggaataaagcaggtcatctgtgttcatctttgaatattcacttgccagatacagcaaaaagcgatacggcatattgggattcagggtggactggtgctcaaaaaaccatagatcaaaatccaccacaaacgacaggtcgttctgcaagcttaggtaaaccgcattttccaaagttgtaatatgcagtagctccggatcttcataatgcgagtgattcagcgcattgtacagcgagagcagcttctccttgtcatgaaatattttccggaacaccagatccttataattccgctttccggaagccggtattgccacagacacatcccccggcgcagccgataccgcattcccatatgaaaattcttccgcaacaaaatttttccagaatctcgacacagtattcatcagatactcctccgaaaaatagttgttggtcatattattttgctttaactccataaatctcctttctgttgcaaaataaatgtaaaaataaaataaaacgacacaaaaaaacaaatattttccatataaaataaataataagggaaaactttgaccactgacggatctataagaatttatgaaaaaagaaaaattactttcaataccaccatatcataaggtccttataatgacaagcagaaaaatgttacaattatgctgttaaaacgaaagaaaaatgttacagaacgcttctaaagttttactttcccggcattttggggtaagataagcagtataggttcctaaggacacagaaagagagggttacattaatatgagatttcaggacatgccttacgagagaatagattttgccaaagtgcaggaagagatgggagagctgatccgggagctgggtgcggcgaagagcggagaggagcagttcgaggtgcataagaagtactatgcgctgacggaccgtgtcatgacgctgatgacgatcgcgaatatccgcttcgacatcgatacctccgataaattctacgaggaagagcataaatactatgatgagcagggcccggtattcagtaatctggtgctggcttatcagaagaaattatatgaatccccctacagagcttatctggaggagaagatcggtccggtagcgttcaagaatatggagctggcacagaagtccatgagcgaggcactgatcccgctgatgcaggaggagaattccctgaccatggagtatgacaagctcattgccggtgcgaagatcgacttcgacggcaaggaactgaacctgtccctgttacggccctatctggtgaattccgaccgcaatgtccgcagacaggcatgggagaagatgagtgcctttttcctggaaaatgaaaaacagctggactccatttatgacaaactggtgaaaaaccgtactgcgcaggcaagagcaatgggctatgaaaattacctggaattgggatattaccggatgaaccgcaactgctacggcaaggacgaggtagaggctttccgcaggcagatcaaggagtatttcgtacccttcgcagagaaactgcatgaccgcagaagacagcgtctgggtctggagaagctcagctatatcgacgagcaggtatattttaaggacggcaacccggtacccaccggaacccccgaagagatcatggctgccggacagaagatgtaccgtgagctgtctccggagactgcggaattttttgatttcatgatggagaaccagttatttgatgtcctgggacgcaagacgaagaaggcaggcggttacatgacctatctgcccctctatcatgcaccgtttatcttcgccaactttaacggtaccagcggtgatgtggacgtcatcacgcatgagtgtggccatgcgttccaggggtatctcgctgcacaggatcccatcagagagcatgcggatatcggcatggagaccgcggagatccattccatgtccatggaatttttcacggagaagtggatgaacctgttcttcggtgacagagcgcaggattacgtggaaatgcatttggaggatgcggcggcatttatcccttacggttgtatggtggatgagttccagcatatcgtctatgaacacccggagctgaccccggccgagagaaagcaggcatggagccgtctggagcgggagtacaagcctcatctggactacgagggagatcctttcttcggacagggaggattttggcagaagcagctgcacatttacgactacccgctgtattatatcgattactgcctggcacagacctgtgcactacagtacaaggtgaagatggatgccgattttacagaggcgtggaagagctatctgaagctgtgcagattgtccgccagcgatttttacaccaatatgattaaaaaagtcggactggacagtccttttgaacccggttgtgtgaaaaatatcgtggaaaaacttgaaaaatatgtgaaatagctttctttttccgctaaaatacggtaaaataaggagtcattggacttaagacgctaggaaggagacatgtaagcgatgtctaagaatgaaaaagttacagaaaataaggaacaaaaagaacaaacagaacagaaggtcatgacaaaatatgaccgtaaggtacagaagcgtaaagaggagaaggaaaaggagaaaaaggaagagcgcatcagcacggcagtcgggatcgtattcctcgttgctctggtatgtctggtggcatctttcccgatccggacctatctggcaacccatgagacttatgtagtgatcaatggtgaagaggtgaataaggtagaatttgattatgtctacaacacctccaagaacaactacattacacagtacggaagttatttaagctatttcggactggataccagcaaggatctgtccacccagatgtattccgatactctgacctggcaggactattttgagcagaatgctgtagagagcctgaagcagaataaggcgctgatggcagaagccaaagcagccggcttcacctacgataccacggatgagtataacactttcaaggagaccatcaaaacctccgctgcagccgcaggcgtatctgataaggaatatgtacgttccatctacggaagctatgcaaccatgggtcgtatcgaagaatatgtgaagaatgacatggtaatgaacgcttattatcagaagctgcaggaggacaatgctcccagtgatgatgagatccagagctattatgaggaaaataaggcaacctacgattccgtagactaccgcctgaccacgatcgaagctgatctgcccaccgagcctaccgaactggcagatcccgtagaggagactgctgccgacaccacaggtaccaccgatggaaccgcagctactgacagcacacaggataccgcttaccagccttccgatgctgagatcgccaaggccatggaagatgccaaggtactggctgacgatgcggagcagaccgtggcaaaagacggcgaagcacacgagaatgagaagaagtcttccgtgaactacctgatctccgactggctgttcgatgatgccagaaaggcaggagacaccaccgtcattaccaacgacaacagccattgctactatgtcgtggcatttgagaagagatatctggacgagactccttccgcagatgtacgtgtgatcattcccaccgaggataagaccggtgaagagatcctggaggagtggaagaatggtgcagctaccgaggacagcttcgcagaattgtgcaagaagtatacacaggatacttccgcagtagagaacggcggtctgttcgagcaggtaaccaagaccggtatgacagaggagctgagcaactggatcttcgacagcagccgtcaggcaggagataccgtagccatcactgtcagtgacaccacttatgtactttactacatcggacaggatcagcccgagtggaagatcaacatcaagaatacgctggtatccgatacaatgagtcagcatatgcaggatattaccgcagatataacggtagaggatcccaagggtaagctgaattatctgaaggtgcaggcagaagaatctgcagctgctgagactgagactgcaacagcagagacccaggagatcaccgaggagcagaccgctgctaccgaagagaccgcaacacaggcacagtaaggcttgccggggaacagaacatagacaacagacaagtacctgtttcactgcgcaagcagaagagacaggtactgttagattagaggagaaaagaaatgcaggaaaaggttctggtattagatattgacggaacactgaccaattccaaaaaagagatcacagaagctaccaaacagggaatctggaatattttacagcatggacacaaggtgatcctggcttccggacgtcccacgcccggtatgcggaaatgtgaagaggaattggagttgaaaaaatacggcggatatcttctgtcctttaatggagcccgtatcgtggaatgtaaaacgggagaagtggtctatcagagaacactgcccctgtccattgtgcccggattgtatgaattcgccaaagtgaatggctgcagactgatcacctatcagggagagggagttatctccgcatttgagccggataaatatgtgcagttagaagcgaggattaacgggatccctataaaggtcgttgacaatttcgttgaatacgtgaaattcgatattaataaatgcctgatgacagcaccggaagagatcgcaccggagctggaaaagcagttacaggaaaagtacagtgatgtggcaagcatctaccgttcggagccgtttttcattgagatcatgccgaaagatgtgaacaaagccacttctctggatcatatgctggaaggcatgggacttacgcgtgaaaacgcgatctgctgcggtgacggctacaacgacatctccatgatcgaatatgcgggaactggcgtggccatggggaatgcccagccggcggtcaaggaagctgcagattacattaccggtactaacgatgaggacgggctggtagaggtcatcgataaatttatcatgaaaccggagcaggcatagcctttcttagaaacaaacaatagacacaaagcattcacaagcaaaatcacagggcaatgagcgtgtgtgatttttgcaaaagaggatatatatgattcagatacaaatacctgaaaaagcgaaatatatcatagaaaccatacagaatgccggatttgaagcctatgtggtaggcggctgcgtgcgggattccatcctgggcagatgcccggaggactgggacattactacttcggcgagaccggagcaggtgaaggcgctgttccgccgtacgatagacaccgggatccagcacggtaccgtgacagtcatgttggacaaagagggcttcgaggtcaccacttaccgcgtggacggaaaatacgaagacagcagacatcccaaggaagtgacatttacgccgaatctggaggaagacttaaaacgccgggatttcacgatcaacgccatggcatataacgagacagaaggtctgatcgatatcttcggtggcttacaggacatcgaagcgaagctgatccgctgcgtgggtaatccggaggaacgtttcggagaggatgcgctgcgcattatgcgtgccatccgcttctctgcgcagttaggctatgagattcatgaagacaccgaagcggcgatccggaagctggcaccgactttgcagaagatcagtgcggagcgggttcaggtggaattgaccaagctgctgatctctcctcatcctgacaccttgcgggatgcttatgacatgggtgtcacgaaggtgatcctgccggaattcgatgccatgatgaagactcctcagaagcataagcaccataaatataatgtgggagagcataccttacatgccctcatagagatcgcacctgagaagaatctgcggtatgctatactgcttcatgatatcggcaagcctgagacacttaccgtggatgaagacggcaccacccatttccacggacatcctgcagtgggtgaggagatggcacgcaggatcctgaggagactcagatttgataatgatacagtggcagtggtgacccgtctggtaagatatcatgattatggcaatgatgttatacctgacctgcggatcgtgcgccgggcagtgaacaagatcggggaagatatcttcccgctattgttcccggtgagacaggcggatatcctggcacagagcgattatctgcgggcagagaagcttaagaacctggagctctggaagcagttatatgaagagatgttggagaaaaagcagtgcgtatccttgaaaacgctggctgtcaccggcagagatctcattactatgggaatgaagcccggcagggagttgggcgatatgctgcagaagctattggaactggtcttagagcacccggagcagaataccagagaacaactgctggaaaaggcgggcgaactggcagcaggcaaagagtgagcatacttttataagatctctcataagatagcgtaggaaccgtcaaaccggttaagtacatatcttaggaggggttgtaagtgaatgacagagcggtggcactgctggagcagtatgagatagaggtattgcgtacccgaaaaggacggggggcgattctgtgcgatacacagcagggctgcctgatcttcaaggaatatacaggacgagaggaacagctgcgtctgcaggaacaggtgcttaagcatctggaggcttgtgggaatatctctgcggagagactgctcgccaccagagagggtgcactgtcggtcacggacagagatggtgtcagatatattctgaagacctggtgggaaggcagagaatgtaacatccgtgacagggaagaatgcatggaagccatgcgcctgctggccggacttcacaaggatctggaatttattcccacatttcccgagatggaagggatacccacaccggtcatccgtagattccttccgagtcgagagtatgagaagcataacaaagaattgaagagggcccggagattcttaaaacagcggagccagaagacctggttcgagatccggctggctgccgtgatggatccttttttggaagaggccgggcagatctgtgaggaatggaaaaagatagaaaattcacatgacgtagaagcgggagaaaccttctgcttttgtcacggtgattatcaatatcacaatattttgcgccaggacagaggatttttcctggtgaattttgaaaaatgtcaggcagacggtcccataagggatctttatctgttgctgcgtaaactgttggagaaaagtgattgggactgtaaccggggggaagccctgctggcagcttatgaatccgtcagaccgctgaatcccttcgagagacaggatctgttctacagattgtcttatcccgaaaaattatggaagatcgtgaatttctattacaattcgggaaaagcatggattccggaaaaaaatcaggaaaaactggaccggctgctggaacaggagaccgcccgaaaaaaattcctgcggattctgagaccataagatcggatagacattaaggtaccggagaggagacaaaagcgtgaacaaaagatatctgatgaaagcagtagcttacatttggcttatgacaatgttgtcaataactggctgcgggcagaaagctgccacggaaggaaatacagagacgcagacacagacggaagcggagcgtgtggataccggattcgtggtgacgaatccggacagttatgattctgcggatactgctgtactggtggatattaacgaagttgacaaaactgttactttgttgaatctggatatctgcaggcgatatacgctatccatggacggaaccactcgtttcggggataaatacggcaaggcgatctcgctggatcagctgcaggagggtgatattgtggatgtgacttttctgaagacacagaaacacctgacatccatgcagctggcacagacggcatggcagtatgatagtgtggagcgctatgagttgaatgcggtgaggcacgaggtaagcatcggcggagaaacctataagctgtccaaagacacgcagtatttttcccaggggcacagtatagaagagatcgatctgaatccatccgatattctgacatttcatggaattgacagtacggtgctcagcgtggtcgtggaaaaggggcatggatatctccggttggtcaatgatgagaatttcgtgggtggatggctggagatcggacagacacagatcgtgagaatcacggaggacatgctggtgacggtgccggaaggcagttatcaggtggatatcagctgcagtggcggaggcggtacgaagtatgtagtgatcaaccgtaacgaagagacaaccctggatatcggagatctggaggttgcggaggcgaagtacggtatggtgctgttttccatgagcccggccgatgcggagctgtatattgacggaagtcaggtggatccttcccagccggtctcactggagtacggaatccaccagatcatagcaaaagcggacggctataaatctctgacacagtatcttcgggtaggacaggaatctgccggagtggatgtgcaattagataaagtggattccgacagtgaagaaagcacaggaagtacacaaagctcgtcgtctgcaggcagctcttccaccggtactgcttccggcagtacttctgcgacggcagacaccacaaccacctactatcgggtacacattgatgcaccggaaaacgtggaagtatatctggacggtaactatgtgggaatctcaccctgtagcttcaaaaagacatcgggaagtcatgtgatcacactgcggaagtccggatatgagaccaggagttatacggttcaggtggacgatgaacagaaggatgtatcgtactcttttgtggatctgacagttagctcccaaacttcaaaataatctttgaaaaggcacaggaaatgccgtaaatatgcggaaatgccttgacaaaagggataaaaacagatatatatatttatagacgtttcaaaagaactattttcgagcgtaaatttaatcacgaaaactcattataggaggagttcaatatgaacaaaacagaattagttgcagctatggctgatcaggctggtctttccaagaaggacgcagagaaggcattaaaggctttcacagatgttgttgctgaagagttaaagaaggatggtaaggttcagttagttggcttcggtactttcgaagtatccagcagagcagcaagagaaggtagaaatcctcagagcggcaagcccatgaagatcgctgcttctaaggctcctaagttcaaggctggtaaagcattaaaggatatgctgaacgcataatagaagctgatttttcagagactcgaaaggacaacctttcgggtctctttcgttatgagaaatagttttcagaaggagaggaaacccatgagactggataaatatttaaaggtgtcccgcctgatcaaacgccgtactgtggccaacgaagcctgcgacagcggcagagtattgatcaacgacaaaccggcaaaggcatctgccaatgtaaaagagggagatgtcatcacgatctctttcggtaacaaggaagtaaaggtagaagtgctggatgttcaggagacagtgaaaaaagaagaagcaaaagaactctttcgttatgtataaatatgtataaatttccaatgactcccataagatgaattgtagctttgaatagttatgataaattgcaatgtgacacagatgggaggaagtatggaagatttaaacacaacagggcgtatgcataaaataattatgaccaacagacgaacctgcacggtgaacggtgtcaatgatgtgctttcttttgatctgcgggagattctgctggagacggaacaggggatgctgatgatccgcggaaatgaactgcatgtgaatcggctgaccctggataaaggggaagtagacattgacggccggatcgacagcttcgtatattcggataccgcagcatccggggagaagcaggagtcatttttcgccaggctgttccgttaatgaatgaaaatgtttttctgatgcatgcgtttctcctgggagtagagattacttttctgtatgatatactgcggattctgcggagggtttttgtacatggcaacggcatggtgtcactggaggatattgccttctggatctattgtgcgggaaaagtttttttactgatgttccgggagagcaatgggaacctgagatggttcgccgtgctgggggcggtattgggaatgtatctgtatcacaggacgctaagtcccctcctggtaaaatatgtctccggatttctcaacatgctcttaaacccgattcgtaaggcattgcggatagccgtaagatgggtaaaaaagaagttgacgagacttcggaaaatgcttagaatatttataggaaggagatgcgcgtatggcaaggggaaaaagaagagtagcctaccgcaggagacaccagaaccggttcagcctgttcctggtgagcctggtcgtattgatgatcatggtagtcgttgcggtgcgaagcgtggaattacaacagaagatcgcaggatatgatacccagatcgcaagcctgagcgcgcagatcgatgcggagaccgccagagcggaagagatcgaggagtatcgcaagtatacgcagaccaaggcttatgtggaggaagtggcgaaggataagctgggactggtgtatgaaggtgagatcctttttaaagaggacaattaagcagggagactgattctcaacagtggacctgctttttttgtcgcaaaaaatgaaggtaacattcccccgaatttgacaaaaagaaagaaacagtggctctataatcgtgaagacagaaaggggaatagtcatggtgatagggaaacgggaacagaaaaatccggaacagaagttatgtgcacaggtatccatgctgtgccggcagaagctgttggggtatgcggagagttttgaggaattggggagaagttttcacgacgaaacgaggattgtgggagatgacagacagagtattctggagaaatgcctgctgcagcagagcaggcaggtcatgggggatcatctgcagacggtcgcacggatcatggaacaagtggccggagaagagatgtgctaccggccggtagaggaaaagcgaagaaaaaacctcgtccaggcattgcatagtgaggggattgcggcagcagagttatgttatattcgaaaaaaaggtgctgccgcaaacggtatcagcatgatactttccacggagagatccggctgtaaggcatcgcaggcagcagatatgcttaccgtacttttggggaagcatctgcagccgtcgccgggaagtccctatctcatagagagggaaccacactgttttcagtttacagaagaaccgaaatatgtggcccttaccggagtgagccgggcagtaaaagagggagagaaaatatccggggatcagtatgccatgctggaatcggaaaaaggaagactgttattgttgttatccgacggaaccggtgcgggagaagatgccagccggggcagcggcagagtattggatctcatggaaaaaatgctggaggcgggatttgacatcgaagaatccgtaaatatgctgaactccgcattgtatgcgcagaatgaggaggaagatcatccgacggtggatatctgtagcctggatctgtacagcggagagtgcgagatctgcaaagtcggaggtgcggccacttttctgaaagaaagcgtcggaacagagtgtatcgggggagaaagtctgccgctggggattttccagaaagcgcagacggaagtccgggtgcggcagctggtagcgggtgacctgctcatcatgatgacggacggtgtgctggatgcactggaggatgaatgtgaggagcggatgcgggatatgatagagacattggaagaacagaatccgcaggagattgcagagaagatactttcttatgccatatgcagctgtgggggcaggatccgggatgatatgacggtgtttgtgctgtgcttgtgggagaatgcgtgattgctgccttgattttttcgcataattaggatagagttaaatcatgaatacatggatggatacacgagaaaaagtatttgcatatataaaagagcatcaaatgctgcaacccggtgaccgtgtggtggccggggtttccggaggggcagactcggtttgcctcttatttttgttactggaatggaggagagaattcccgctggacattgcggtggtccatgtcaatcacgggatccggccggaagccggtgaggatgcccggtatgtggaaaaattgtgtggagaacatagaatcccatttttcctgacggaagccgatgtgcggcagcgggcaattctggaaaaatgttccgaagaggaagccggccgcagaacaagatatgaagcttttgacaaagctgcggaggaatggggagccacgaagatcgcggtagcgcataacagcaatgaccgcagcgagacgcagctgtttcatctgttccggggcagcggcatccggggactggcaagcatcctcccggtgagaggtcggatcatacggccgatcctgtgcctggagagatgggagatcgaggactttttaacacaacagggaattttctactgtaaggatgctaccaacgatgaggacgattataccaggaaccggatacggcatcatattttaccctatgcggagcaaaacattgcgcggggctgtgtggcgcacatgaaccaaacagcggagctgctggcggagacggaggaatatctggagctgcagacggcggaggcagtgaacagatgcatacggagcataaaggctccgggcagtgcgctgcagtcggatgtgagcagtcgggcacaagaggtgcatatcgcggtggaaccttttctgacgctacatcctgtgatccgtaaaagacttttgtatgaagaggtaaaaagactttctcccgggcagaaagacatcacctatcagcatattgcggagcttctgacattgtttacgcaggaaggaaaccggacaatctgccttcccttcggaatccgcggcaggcggcaatatgaacaggtcatcctgacaatacagacgacgcagacaacgaaagctgcggacactgctgttgcgacaccgctctggcagcagcgggatccggatatgattccgggacagaagaaaacagtggagtgcgtgctgggaactctggaatattccgtatgggaagcgtcccatggacttgaaaaaaaccaagaagttcccacaaatcagtatacgaaatggtttgattatgataaaataaaaaaatgtccgacgatacgtacaaggcagacaggagactatctgaccattgcagacggcagaggagaaatgatccgtaaatcattaaaaagctattttgtcgatcagaaaattccacgggaggagcgtgaccggctgccgatcctggcagaggaagatcatgtgctgtgggtcatgggatatcgcatcagcgaatattataaagttacggagaatacaaaacgtattttaaaggtacaattaataagaaaggagttcgcctaagagcgaagagacaaaagaaaatggcagaacatatcagagtactgttgacagaagaggaagtagataagagaattcaggagatcggagaacagatcagtaaggactatgcaggtaagcaggtacaccttgtatgtgtactgaagggcggcagcttcttcatgtgtgagctggcaaagcgtatcaccgttcccgtatccctggatttcatgtctgtatccagctatggcagcgacaccaagtccagcggtgtggtgaagatcgtaaaagacctggatgaatccttgaaggataaggatgttatcgtagtagaggatatcgtagacagtggaagaaccttaagttatctgttagagatgcttcgtgacagaggaccggcttctttacgtctgtgcactctgttggacaagccggagagaagagtcattgatgttcatgtagattataccggatttaatattcccgatgaatttgtagtgggctacggtctggattatgatcagagatatcgtaatctgccttacatcggtgtggtagaattcgattaagcaatacgaagatgtaggaggcccgtgaagttgaaacaaaacggcagaacaattaattcttattttatttttatcatacttctggtcatggtgatcgtaggactcaatctgttgagcaaccgggaagaggactataccagagcagaattcatcgcagatctggatgccggaaatgtatctgagatcgtaatacagccgaatggagaagcccctaccggctatctggagatccagatgaagaacggattgaatcataagctgtatgctacggatatcaccgagctggagacattagtccgcgagtacggatttgatcccgtagtgaatgacattgagagagagaactggttccttacttatatgctgccaatgctggtagtactggctgtaggtgtattcgttttcatgatgatgaatgcccagcaggccggtggcggtaacggtaaaatgatgaactttggcaagagccgggccaaaatgtccataggtgacaagagcgtcacctttgcacaggtagccggtctgaaggaggaaaaagaggaactggaggaaatcgtcgattttctgaaagaacccggaaaatacaccggcgtcggtgcgaggattcccaagggtgttctgttggagggacctcccggaaccggtaagactctgctggcgaaagccgtggcaggcgaagccggagtaccttttttcagcatctccggatctgatttcgtggaaatgttcgtcggtgtcggcgcatcccgtgtgcgcgatctgtttgaagaggcgaagcacaatgcgccctgtatcgtgttcatcgatgagatcgatgccgtggcaagacgccgtggtaccggtatgggcggcggacacgatgagagagagcagaccctgaaccagttactggtagagatggacggtttcggtgtcaacgaaggcattatcgtcatggcagctacgaaccgtgtggatattctcgatcccgcgatcctgcgtcccggacgatttgaccgtaaggtagcggtagggactccggatgtgggtggcagagaagaaatactgaaggtacatgcgaagaacaagccactgggagatgatgtgaatctacagcagctcgcacagactaccgcaggattcaccggagcggatctggagaatctgttgaacgaggcagcgatcatcgcagcgaaggagaaccgctcctttatcgcgaataaagatgttaagagggcgtttatcaaagtaggaatcggtgcggagaagaagagccgtattatttccgacaaggagaagaagatcacggcatatcacgaagcaggtcatgcgatcctgttccatgtgctgccggatgtgggacctgtctacagcgtatccattattcctaccggcgtaggggcagccggttacaccatgcctctgccggaaaaggatgagatgttcgccaccaagagccgcatgctccaggatatcatggtatctttgggcggacgtatcgcagaggagatcatcttcggagatattaccaccggagcatccagtgacattaagaaagccaccaagacagcccgccgtatggtaacccgttacggaatgtctgataatatcggagtcatctgctatgatgatgacgatgatgaagtcttcatcggtaaggatctggcacatgccaaggctcacagtgaggagatttccggtgagatcgataaggaagtcaagaggatcatagatgactgctataccaaggcaaaagacattattatgcagcatgagaatgtacttcacagttgtgctaagctgctgctagaaaaagaaaagatcaaccgagaagagtttgaagcactttttgtataggaaaaggttttcgagggtgtttcgtagatttggtagtattgtacaaaccgcttttgtgaaaaatatacaaaaacaaatattcatttttgtaatatttgtgaattttgagaatagtaaaaactagtagtgcatgctattataatactcgtaacccccccaatacattatatagttttttgctataccccataagaaagaaataccttctctaaaaaggacagtcctcccaagactgtcctttttaccgttcaaaaacaaggcaggctgttgtcagatgtacggaaaaagggtataattacatatgtgtgtgctgcacaggtaagaatagcaggagcataatatagatagtaagacattagtctcagaaaggatagatactatggatctggagcgattacgtcgaacagaatataaccagcagtatattgctgccatgagacccgtatttaacagaagagctctttttacagatacaagtgcggagtatgtgattccggaagagccggaaccttattccgaggtgacgatccgtttccgtaccgccaggaataacgtggacaggatattcctcgtaagcggtgggcagaagcatctcatggtacgagtggagggcgataatgattttgattattatgcttatgtgatgcgtctggatgaccagaaggtatcttactattttgaggtacagaccggcaggatcacgggtatttttgatatgagaggattggtgcaggaggtcaacgagtattatgactttatcatcattcccggcttccatactcccgactgggcaaaaggtgcggtaatgtaccagatctataccgatcgtttctgcaatggcgatccctccaatgatgtgctgaccaatgaatactgctatatcggggagccggtgcaccgtgtagaggactggggacggtatcctgcacagatggatgtccgtgagttctacggaggagacctgcagggcgtattggacaagatggactacctgcaggagctgggggttgaggtgatctattttaaccctctgttcgtatccccgtccaaccataaatacgatattcaggactatgataatattgatccccatctgggtaagatcgtcagtgatgagggagagctacttccggatggacagcgggagaaccgtttcgcttcccgctatatcgaccgcgtgaccaataaggcgaacttagaggcgagcaacgagatgtttgcccaggtagtggcagaggtgcaccgcagaggcatgagagtcatattggacggtgtgttcaaccactgcggatcctttaataaatggatggacagagaacgtatttacgagaatgcggaaggctatgacaagggtgcttatgtcagcgcagacagcccttaccggaattattttgattttcataatcaggcagcatggccctataacaattcctatgacggatggtggggacatgataccctgccgaagctgaattacgaaggttctcaggaactgatggattacgttcttcatgttgcaaaaaaatgggtatctccgccctataatgtggacggctggagactggatgtggcggcagacttaggtcatagccaggagttcaatcatcatttctggcaggaattccggaaagcggtaaaagaggccaatccggaggcgatcattctggcagagcattacggcaataccagagactggctgcagggcaacgaatgggatactgtcatgaactacgatgcgttcatggagcctgtgacctggttcctcaccggtatggagaagcacagcgatgactacagagaggacctgctcggtaatgcagagagcttctggggagccatgcggcatcatacctccagcttttccatgcccagctggcaggtggctatgaatgaactgtccaaccatgatcattcccgtttcctgacgagaacgaaccataaggtgggacgtaccaatacactgggaccgcaggctgcggaacagggcatcaataaggcagtgttcagggagggcgttgtgatccagatgacctggacgggcgcaccgacgatctactacggagatgaagcgggcgtctgcggattcacagatcccgacaaccggagaacctatccctggggacatgaggatcaggtgctgctgtcgtttcacaaggatattatccgcctgcgccgtgaaaacgaggaactgcgtaccggttccctgaaaatgctggagaatgattataacttcatctcctacgggcgttttaaccgcaagggacagtgtgcgatcctgatcaacaataacaatcatcccatcaccaaggagatccatgtatgggagatcggggttcctaagacaggtaagatgaaagtgatcctgcagtccagagatgacggatattgcatggaaggcgcggagtatgagatcaaggcagggaagatcctgatcgagatgccccagacttccgcgacaatcctgaagtatgtgcaggaataacgtgtagaaaaaaatataatttaccaaagacagagaggatttcagatgtttaccatcatcataaccctgctgttgccgctggtatccttagggatctggcggcaatatgttttgaaaaataatggaagcaccgggaagacggtgaccggaagtaagggagcgtatgttcttcgttatgcaacctgtctgatgatcatgctttttgtgccgtgggtattgctttccctgatcagcaatgacgacaatacaattttgcgaaaactcgtagaatcccgggaatatgccgtcaaagtgctgatcctggaaatctgcatcatgctggcatataccatttgtgaactgttcgtggaagaggcgaaagccggtaaacatgagaagattcacagtgttatgactaaaatcaccggcagcaaaggatggaacattgtatacagatacataggaccggtcgtggtactggcattcagtgtgctggtgatctgtctcaatttcagcatgatgtccgaccgggtgctgtggggagatgaagctttttctgcaaatactgcacataagagcgtcggtggtatcttgcaggtgctgtattattgggataatcatccgccgctgtattattactggctgaaactgtttggaaccctgttcggattcagcgttccggtattccatctggcttcattggtaccgtttgccattggtatcgtgctggcactgacagtgatacggaaacatttcggtatgctcccgaccacatttttcgtgatgatatctggtctgggacaggcgtgcctggaatataatctggaagttcgtatgtatgcacttgcctttttgtgtgtaatgggttgcttttactgttcttaccgtgtaatagcggatggcaccaggaagacttggaccggaatggtattgtgggcacttggcgcggcatattctcactattatgccctggtagccgtgggcattatgatgtttttcaccggagtggcagtgtggattaaataccgcggtaagacctggagaaaaggtgtattggcaatcgtggcatttttgatcggctatgctccctggctgtattttttctatgcgggattgaaaaatgtcagcagaggctggtggatgacggagatcctcgggctggataagagcctggagatcgtcatgggcggcagacggatgaatgtaattgtatttccgttgctgttagtactgctgatagtgacgctggtggcggattcgtccctgttttccatgggagaagagggtattcgtctgcagaagccgtcagtgaaaagatggtctgacaaaacttacgccatggtagtaggtgcctgcacgatcctgggaacgctggcatttgcgtatctgctgagtgttgtaatggcaccgatgctggcgcagagatatctgtatccgttaagtgcagtggcgatcatgatgctggtcatcggcagcagccgggtgctggaactggtggcggagctggagaaccggtcctggaagggcctggagctgttagcccgattgctgcttgtgctgttactgcttgtaatgtttggcatgggaatacagaattaccgggaatcttatggcagttatgaacagcagaaggtagagactgacaagaccttggatctgatcggcacgcccgaagaggatgtgcagatggtcaccaacggggtgaaacatctgggatggacagtgctgtattattattatcccgataatgagatcgtaaacggtgattacaaccaggcagaatccgacagattctggtactttacaccagatgccatgagcgatgactctttcgcggaactgcagcagaaagggtatcaggtgaccgatcacgggcagatgcagctggcgcagtatccgttttatttatattatattgcaaaatagcaaaaaacatattgcaatttgtgtgaacatatgctacaatttcacattgttagggcactttgcctgacatggatggattcccgagtggccaaaggggacagactgtaaatctgctgcaaattgcttcggtggttcgaatccacctccatccagttgcgttgatgagctcaatggaacagtgcttagcgcgtaagtccatgcagtcgagtataacgcaatgcgtccgctggtgtggcggaataggcagacgcaagggacttaaaatcccacacgtatattccacacaatatcgtgcaaacccctgattttactgggtttccagaaaatcaaaaaattttaatttgttcatccatcggaaatatccctccaaatatcagggaaaacccctccgattgatgtatatacacaccatgctggtgtggcggaataggcagacgcaagggacttaaaatccctcgggggcaactccgtgccggttcaagtccggccaccagcattctcatgaagagctccaaacccagtaaatacaagggtttggggcttttgctttttgccgaaaatgtatgcaagtgtatgcaacccagtaaacatcagggtttcagcatttttgggtatcgaaattacgttcatgaaactttaaatgcttcattcattgtacggacaacatttcccttgggttttacgcgtcttaagtagtgcaaggtcatctgtatagtggtatgacctagtaattcttttagttctgtcagggaaactcctaattcgtaaagaatggaagctccgcaaaatcgaatcttatgagaacttctgtaagtcacaccacatttattacagtattttttcagtcgtgtattgaatgtattttcgtttagctgtttttcgtttggggttacaaaaatgtattcgctatcgggattgagttcccgaacctgttttaagatttccagtgcttcatccgtcaacggttcgtaacgaaagccttcgtccgtgttacccttgatatgatcgacattttcgtgggttaaagtctcaaacgtaagatcatcgtttaaaacacgctgtcccaaaaactgtctctggaaatgaatgtaattatcaggagtaatatcagaccacttcaatgccaaaagttctcctatccgggcaatcaactggaaatcgaaccggattgccaaagcatagatatcatcaggcatggtagccagatattccaacaactttttccgatcttccatagtatatacatcatcatcgttatttacaggttggaatgagaactgattacaatttatatccttgacaggattgtgagccacaattcccatttcaatcgcatagtagtaaataccgttaatgacggattttatgttgttgaatttcttgcgcgtcatctcccggtcttttgtccaggatcggaacagttgggtaaaatctctggggatgagatttttgagcggaatttttgaaatatccgtatcctttaaatggctattccagttaaggatatcttcacgaatggtttttactgaaactgaggaatagtccctgcgccagatgacccattccggaaacagactttctaacgatgcgttttcatacccatattcaattttcaccagcttatcaatgagccggtcataatcagcagcgataatctgcttgcgttccatatataaataaggcctgccgtcatccctccatttaattaaatttttgtacttattttcaacttcttttcgtttcctcatctgatcaatcacatgagcaatctctgatggattaattgtatcatcaagcgctagatcgtacaattcgcgaaacgcagaaaatgaataagtattattgttaatcatgcactacctccactacatgcaaagtttttctatgccattaacatgaaatatttgagtgtagcggtaacttttctgcagaagaatagcgacacaatatatcacatttgtgatatattgtgtcgctaaaatatttttttaagactaaaattttattttattgacaaggtaaagagcgtattaaccgattcgccgagtgcatcggagagagcgatagccagttctaaagaaggaacaaatttatcattttcgatgcggcaaattgtctctcgacgaactccaaccagatgagccagtttgtcctgcgtcatacgttttgatcggcggtatatatatatgttacattgacatttatatctattgtaattaataggggaagttgtcggttctttcattattcgagtcctttcataaaaaatatatataatcatatcacatgagtttgcgaaaatgaattaatttgagctaaactagcagataaaattgttgttaagtcctgttagactcaaaatggggacgtttttaacaaaaatctgggataataattatagaggaggaaagcacaacaccactgggtgtacattacaagtaagaagttagaaaaataaataataataagtaagcgatagctaaaattaaagacaatcaattgatattttaaaattaaaagaagatttccagagtaatatggaatttaagggtatgataatcacgcatatttgattatcggatattgatagatctttgatacaaggatcaagtcaataaaattaacataaaattataggagccaaatcaaaaggcaaacaaaattaaatctaatctaagaatattccgcattgggaataataggtaaatgtctttacttagcgaatcagtttttattgcaagtgaactgaatggagagtcgcaaatgagagtactttgtatgctggctttctctttcggcttgttcgattcgcacatctttatacaaattaccagctattaatcctaatcggtaaaaaatcattaaattcagacgcacagtatcatgtgcagaaaatctcataaaaaattgtaacatccaaaaaacaaatagttgtgctacaactatatgtacagaatcgatttattgcccaaggaaatacagtatattattacactgtataaatcggcacatggctacgtcaaactttgcaacggaaaaaacaaacgcggcgcattgataccggcaaattatatggccagggaagacgtggaggatacaatcctacgcaatggtatttatgcgagtaacgcctatatgagtgtatcggttttttacaggaacaataatgcccggaaagacaatattgctgcagtaatgtgtatccccattgatattgatttcaaatttactgatgatgcagggaatcttatggacccattagaggtatgggacaggttgaagcagcaaataatacagagtggcatttttttccaatgccgacttacatagaatatgggaatcgcctgcgcttggtatatttgctgaatgaaggcggcgtaaagctccccaatccccaagagaaagagcgcagagaagcaacattaatatttttggatagagtgcaagcagaacttgtaaaatgtattaacgaattggattgcaaatacaatgcggaggtaaatagctatacaagttttgtgcgcattccaggcagtattaacagaaaatatattggttatattggccccgatgggaaatatcactggcagataaaatctaaagatcgtgtgtgcgctatggaaattgcgaatggaaaaagatgggacttccacgagctagccgagcaaatattaccaaaattaccagactggtacgcggattacaaaaaacgacagcaaaaaaagttgacacaacggtcaacacgcacatattccagttcgaatctgattcagttaatgaaaaagaggttgcatttattggaacagttacagcaggatggctatgatattgggcatagagagatgatgtgtcatctgtattttaactgtttgttgcaaatgaaacagttgtcgagggaggaatcatgggaactagtgagaaaatttaactcagactttcgtacgccacttaacgaaagaaagcttaaaattagtatttataaaggaaaagaatataattataaagatgtgacatttttgaaaaaattagatttagatccggagcaggcagctcgctacggttttcgtatgcgaaattggaactcttacacaaaacaagaatatcgcgaatatcgaagagaatacatgcgtcagtatcgcaaagatcaaaaaccgacggtgagtgataaacagaaagaaattctgagattatcacaaaaagcaaaagaattaagagaaagtgaatgtacggtgaggcagatcgcggatgaattgggtatatctgaatcaactgtaaaaaggtatttggcaaagtagggattgcatactgaaccggaggaagttttttggaccgtaaaacggtccaaaaaatcgtaattctatatgtatagggataagaaccaggggatacgacggtaggagtggactctggttcttatccctattccgtatcaatcaatatgcgtattgtagtcataatatattatatataaatttatatatgtagaaataataggatcgtgatgaatatcagagaacaataaaatcaatatgtaacatgcatataccggtaaaatataaatatttgctatgtaagataaataaataaccgttcggaatatgattttgcatgtgcgagcgtcgtgtgtagcgtaggaagtccgctaccaataagcataataggtaaattgagttgtgttactctgtgcaatgatgtaatcagtgcggataaatctttatgtgctatacggtccatatcatcaataaatatacagatcggtatgcctatgtcattcgcgatattacctaggtccacaaatacatctgtaagtatttgcgtagggttagcagcaattaaatataaatcctgatcttgctgcaaggaaggcgaatacagggctttatcgggagcaattaaaagtgtgaatgatttcaaagcatcatctaaagcgtttgtatcaataccaggagtcgcattaattacggattgaatattttcaatatatcttagacagcagtcatgaatctgttgcataaaatcattcttattggtattgtcaatatgcaggcatacaatatcgttatctgttgcaaaatcccatatctgacttaatagaatagacctgtttatatcatttgcagtggcagtgtatataattgattgcacaggtatctttaaggttaatgcccggataattttttgtgctgtatccatattatcagatatgttatttaattgggcgtccgacaagacaggattaatatctattgtgtaaggattgtgcagcttgctgtatggcataattctctctccgtggtctcgtgtttaagtgtagtgagatatattaaatatatcacatatcgatgtcagattgttagattaaaaagaattgaaaatcaaatattgtggaactcgttaggggaatatcaattggagaagagtgagtatatgcagacgttatatgtagatgatacggctaatgaaatcgaaaaggtaataaggcaggtagagcaaaaacaatggtatgatcctgtgatgaagatggttgttgatccagtaaataagtctgcataaaattatggtagggatcatgacatctatcagtgccctccaagaaagcgcataatacagcatgaatatgtaggaagggcagacaaaatctgcccttttgctatttgttctttttcgcaaattctctgtattcgtaacgtatcatggcataggaaatcagattgacgatcagatgaattacatctagatcatttaatctaaagagacggtcatttgtaaggcttcccaggtaaaatttgtttccggagatgatctgagggtagcggtcagctacaaaggaacgcaattcatcaatttttccactgccaagatttccaatcgctattttaccatgatggtaaaaatctattgtatttcctcggacaaccaggttatcgtctgctacaagctgtaaggcatggtgagattccttttcgtcatcatgcgcaacagcaatgcaggtcttgacgttttccggagaggttgatttacagtaggttgtcacaccgatagaataaaattctacattatcatttacttttacgaggaatgatctgtaaggaccaaaaaactttcctccggcggcattcccataggagagcatgcgtaccccataatcttcaaggagttcaaacagcccgtaattgccaacgggcatcttaattctggtatcaagtaagccttcccagagattaaacactggtacagcaatattcatgggagtaagtttactgatgtcatagccgtagtcatcaggatctctggaagcacgatcctctttgataaatgcagctagcttttcaaaaggaatcctgggcggaagttctccgggatcataaagctcatatttgtctgagagcatatcggtaaacacaggaagctttacgatatcttcgtagttaccggtactttggttataacggtaacagtattcttcaacaccgttggtaagcattgcaaaatcggcagagattagatcacaataggtaagcatttgttccctggcgttcagatccaaaggcacatcaggagttttgcattcgattacggcaatcggctgtataaaaccgtccttatcaggcttatggattacaatatctgcacgcttatttgtctttattccataatgagaaagatgctgttccacgacaatcacatcctttggaacggacaaaacatttgtcaggtaagagattgcctgttgtcgcacagtctcttccggagtaatgtagatcagcttctgtctgatcggatccaggtaacagttttttccattgcgtttgtatatctgtggtaatttgagtttattgttcattatagttccctttgctaaattgtatgtcttttaattatacagcgaaatcttcagactgtcatttgggcttgctcttgtttacattcactgtaataagggcaggttggacagaaaaaacggtaaccggtcctgtgatgaagttggttgttgatccagtaaataagtctgcataaaatcatggtagcctccctaaaaaattgattgaaaatagtgtaattttctttaatgtgcctagagaatagcatttcatgtgtcctgtatatgggacacaaaaaatgctattcttatttaaacaaataagaaaaacagtcatctaaacgctggaaaggagcaaaaaacatggaaaaaatttactttacagttgcaggaactaagcattacttcggtcaggagttcttcgagcccaatatggaagtgaagcttatcaaggaaccggataacgaactggataaggaggctatccgagtggaagtagacggactcggaaaggtaggatatgtagccaacagtccctatacggtacagggagagagcatgagtgcaggcagaatgtatgatcgtatgggggatacggcaaagggtgtagtaaaatatgtattaccccagggaatattgtgtgaactggtgcagtaaatatattcttttatggtgtgacgtaagataaggaggtatctatgaaccatattgttgtcgatctggaaatgaaccctattagcaagaagcatccggctcgtgcagtctgcaggtcggagattatagaaatcggagcagtacttattgatgaaaatttgaatgaaatagctgcattccgtacctacgtcagacctgaatataatatcagaatcaatcctgatgttgaaaaacttacgggaattagttttgctatggttgaaaatgcaccatgtttttcagaagcattccacatgtttaccgactggtgcctgggaaccggaaaagagtttgtaattcatgcctggcgcaacgctgattatgcacagataaagcatgaaatcgaattgaagggatatcagccaagtgaagaagaaaagcgtattactgagactccatgagagaatttccaaagaacgatagatgaatatttaggatttgcaagacagatatccttacagaaagcactggatcttgccggtattgattttaacggtcatgcacatgatgcacttgatgatgccaggaatacagctattcttttgacaatatatcaggacccggtaaaaataaaggagactttggaaaaaatcagagaggccatgcaacctacaccttttggtacttctttaggaagtgtgtttgatttttcaaaattagtgttggaatgagaataacagtgtctattcagaagagaggataggatttatgaataacgattatacaaaatacgatatgaatggttaccatgatagtcattgtgaaggccccaactgtaattgtgacagcagaagatatggacacggaaacgggtttaatggttccacggttgtgggagttatctgtattacggctgcaatactaatatcttttggttttccgcatttaggatttattattttctggggctaggtactgttgtcaaagtaaaagtgaacttcagatggacatagattgatttgacggaatttacatttgcgaaagattagctgaacgggaacaaaacttgcaaactggaatctcggatttctattcagctttttatagatgaagatatgattaaattctgttacagaatttgaaaagaatatatgttcgacaaaacgcaatgtataagggacttttttggtagtattaagtctgttttggaatgcaattaacaaaaaaatgacgatataaattgctaaaagatgaaaaaaggtaacataaatgtattttaatcaaaatactgtatacagaattaaattatctaattttagaagttgcggaaacctatggtacatttgaaaaatccagtatttatcagggttacagcgattccggggaatttgataaagacgttattgtgtgaaaggttaatgaaattatctgaacttgggtaatatttggcaaaaataaattctgtactaagtgtacagattttgagaagtaatataacagttgcgaaaaagccacttggaatctggtataagtttccaatccgttttcgccccgtccgtatcccgtcaatgtcccgtccacgtaccatctacgtatctaaccatacttgtccgcgcaatccgccgtccatgcctcatctacgtatctcactaccataagccaaagcgttcaccgctcatttccctacatttccctgtccgaagtcatccgcgtatatctccgaaaacggaaaacgaagaggaacgctgataatctgccgttttcgcatcttatcgcagtttcctccgtcaaaacgtaccgctcattcccgtattttttcccgatttttctgcatatccgcaggttatacacacaaacttcgataacggcatattactggatcctttagcgatagttgcccttccggataaaaaatagcggaaaagcactggaaaagctggtataagcctcccatttcccgtattattccgcctattcttccaacgcatacatcattcacatatcaaatgagcgtacccgttccgcctattctccaaacgtatacaccattcccatatcaaatatcacctgcgtttcctgtgcatttcccggcatttccgcataaaacgaacaatacgttatcctgtccgcagcgaaaaaagagggcaaaaaccccgaaagggatacaatattgtcccgttcattcgctgtccgtatacacaaaagagccaatatattgcccctcaaatccgctttccgcgcataaacggcgcaaagaaagggacaataatatgcccctcttattatgtctccgtatccgaaagggacaatatattatcccccttatgcactgtttatctgcgcgaaagggacaatattatgtccccctcatttttactgcgtttccccacgtattttacaagagggacaatatattgccccctttaatatatttcccgacatttacctgaaagggataatatattgtccccctcatgcacgattcgctcaaaaacggcgtaattagagggataatataatgtccctcttacgcacatattccgcgaaagggacaataatattgtcccctttatacgcttttctttcactgaaagggacataatattgtccctttcagcgtatcctgtttccgtcttttccccacacggccgcataaaaagagggacaatatattgtctctctcatacacagaccacgcaaaaaacggcgtaatgaaagggacaataatatgccccttttatatgcatttcttttcataagcgggataatatattgccccctttatgcgcagtttccgcccacgtttcccctcgcagattccccgaaaggaacaataaattgtccctcttgtcaaaacaaggcagaacaaaaaggacaacttattgtccccttcacaaaacgtttcccgacaaatgcgccgtatattgtcccgttcgtctgccgtttttgccccaaacgcatacaccgccccatatcagcaacatttatcatctcttttcctgcttttgcccgtaggtgataccgaatcgggaataagtgggacatgaattgtctcgctgctgctacttctgcaaacaataccgggagaggcaatgacgggatacggacggaggatatctagagaacaactagacagaacgtatgtacgaatcaaggacattaatttctgtgcagaaatttgcacaattatacacccatgctacaatatatatagaaatcaacaatatgcaactcacaaagcaagggagcaaaaaatggaaaaattatcggattgtgtaaaaaagtgtctccataacaacaatggaaatttatcatttagagattttattgcagctgttgacacagcaggtattccggtgcacgagatcaaaaaacacatgaatgtagcaacgggtaacaaatcaataattgatcatatttatccaacaggtacggattttttgcaatcgttggcctacatcgtcaacgataatgagcaaatggtaggtactgaggacggatatttccaaatgcgtttgaaaaatcctatatttggttttgatgtgttactgcgcattatgatcggaaatagcatggttgaggttttgcgtgatactgtaagcaaagcagatcccgcagattatgatgtttatcattggtaaagtacaaaataaattagcattggagagatcgattacttattataaatagtcggtctcttatggtatgtatcatctgcaagctgttttctacccatgtaaattgccctaattagctgtccagtttttaaaacgacagaaactgcgattatccaattatttcccctcatttcgcctcctgggctatctgcatatactttgataacggcatactaccagatatttggcaatccgtaaaatgcattaaaaaagtagaggaaaagtactgaaaaatggtataagcctctcactttccacaattttccgcctattctccaaaagtataaaacatttcaatcacctgcaagctcacgttcggttcatcttccatggtaactgctgcaaaagtcgctaactttccaatacacttttctatcatagtattaccatcaaacaaaacaaaggaggtgctctactatgggatacgcaatagttggtgttaataaaattaactcggtagcgggacttaatgcagcatcggcgcacaatcagcggcaggtgaacattcctaatgcggacaaaaatttagaacacttaaatgaagaagttatatcggctgaagggaaaaactacatggatctatttcaggaaaaaatagcttcgctggattattacaaaaatcataagccaagatcaaatgcagttttagcgtttgaagtaacaatgacattttctcgggaagataaagacaaaatagatatagaaaaatggaagaaggataatgtagaatggctgcgcggatattttaataaaaatccgttgacgtatggggataatgttgcgagtgtgacctatcacggtgacgaaagtacgcctcatatccacgcattagtgatccccattaacgacaaaggaaaactcaatgcttacgcttatatttacggtcctaaaagtttacgagaaatgcagacctcttatgctgagtttatgaaagagcgtcatggactgaaacgtggcacagaatattccgtggcaaagcatgagcaggttaaaagtttttatactgcattaacaaccgccatggaagaacggacggctccggaaattttgcctggtgaaactattgaacaatatcaaaaacgtgctgccgaagttatcagggaaatcaacaccgagaagtttgctcttaaaaagcagatggaaaaagaacggatcgaagccgtcaataaagaacggtccaagagtctttccgctaacgaaggacataaacgcaacatgaaaaaacttcataagctcgaaaaggaacatgatgagttggttcacgaatacggcgaaataccgcttattaaaaagaaattggaaaccgtagagagtttgcgggaagcatttgatacgtaccctgatgagcaggaacgtgaacgcgtaaggcaagatatgaatcggtatactctatatggacaaaaggaaagacgaaagaaaaaagcccataaaaaagaaacgaaacaggaatgggtacatgcttaagcaaaaatagtatgaatttataatacaagctagtgcagaagaaaaaattagagaaccttggctatacgcaataactgatcttttctggtggcgtcaagtttttctatggttgaaagaagttcggtctcataggcatttgttggagcgacatattcattgccaagaatataatccacagtaacattcatcgcgttgcagatggcaaccaaaagagttagagatactttgaccttattcgtctcaatattgctgatatggcttacgttgacatcggttacgttagcaagatattcctgagttagatggcgatctatacgcacttctctaatgcgtgagccaattagtgcaaaatccaaattattcatagaaatatacagacctcctttgtgcaaaagtataaaaataatatagttacagagtaataatctggtgctataatacttatagcgttagaacatttatggaattacatttataatgagcgcgaagaataacaaataaataaacgcacaatggagggcggaaatgagaacattatttagagcaaaaagaaaaattaaatggatcatggcaatgcttgtgatcggaatgttatccggcaaggcagaagccgctgaattgaatactacagaagttgaagaagcaggagatgaatccggatacgaattccccggtctttctatcagaatcggagagatgaaagatgggttgtttgtaagagattactatgaagaagcaggcattatttttaaagaattagctggggaagaaagaaaaacagcttttggtattagagatgaagttagaaaactgagttcattaacaccagaaatggaatccgctggctatattatagatactaacacaggcctagcattatctccagtagattatgtaaatatgtatggtggcgatgccggcgaaaatgcaaaaacacctgctcctgtcgatgaaaatacgcgctttggcttcgttacatttgcagctgccgtcgaagatgtcattcacgagccttgcttcgtaggtattaaagacgaaaatggtggttatcaggaaatcgatctttatgaagcaaatggatttacaactttacagcagcttcctgtaggaacctataccattacggaaggtggcatcaccgcagactttaccgggaaatatcctttgaaatacaaggaaaatacttttgaaatcacagaaaactgttccattatcgttccgttagctatcggtgatgtagatatccccggacagaagattgaagaaatgccggaacctacacagacactggaagcaacagggtcactggaagcaacgcagaatacatctgttgagcaaagcgatattcaagaaaacgagaataatgaaaaaggttcagctactaataacgcatttggtttaatgtgtggaatcgccattattataattggaggaatcgcagcgtacgttatttataacaagaaaaaatgatgcgattatacgagggaggatggtgactaatgaaaaaaatactgaaagtaatagttgctaacatagcagcttttttgcatattccacttctaattgtgtcaataccgtttaaagtgatagctattgctcattctattattattgacctgtctacgcagtttatggctgttctttgtgtggcatttatgttaacaggaattattggtacaattgcaagtatccctgaagtggggctgggatatgcaattgcatatggtttactctttcttattttagtaggagcgttattaggaatttacatgcttgcacaacaacttttagcaggaattctagaatttttcaggaaaatatatgaaggaatttatattgtcataatttgggtagctgataacttgtattattttgcggaaaatattgtggttgaacgtaaaaatacaggcgaatctacaatggcttgttttggatattatgcagcgtgtggagtggggaaagcgttggtatttattataaatttgataattgctacaaaatatataatgattatagcggatgtaggattaggaatttatatgtttgtgcagacatttttccaaggagattcttatggaataggagaggcattatttaatgtagtaattattcttgttatatgtgggattataggagtatgcttatggggatgcttttcgtatcttgacatatggaaagatgagcgtgatattacatatacaattttagatgttgatgatatagatttagaacagaagaaagcagaattagaatctgagaaaaacgaagatgctgaaaaggatagcaatttgcatgtcttttcgctggaaagtgctcgacagagttatctggaaatcatagagcaatttgctgcaaatgctgaaagcatgaatcagaaagacttaatagatttaagaaagttagggttatactatagtaagatgaaagagaatgtaaatgcagatagcttattggaaaatcaagatgatgcatttgaaaaaatgagtattcagttctataaggtacacaatagacttgaaaagaaattgcctcgaaaagatgacgcaaatgtagaacagggaggagaatccaaatgagaaaaagatttttagtaacaatcctcgcaggaatcatgattgtatccatgacagcttgtgggaataagactgcaaaagcaacggagacagcgattcctgaaacggtcgttgaaaccactgaggcaactgaagaaagtagttttgaagaaaccaaggaagataagctggataatactgcggaaactgtagattccatgcaagcaacaactgctgttacaacgacggaagctcctaagacgtcagaaaatccaaaggaaacatcggcacctgtaacgacagtaaatcctacagcaactccgaagacaacaacagcttcgaatagcactgggaaaacaggtagtgcaacaactgtttcaaacacaaaaacaggagcaactgcgaccccgaagcctagtgctataacaaagcctactgcaaccgcaacaacaacacctaagccgacaacaaaacctacggcaacaactccacagccaaccacaacacctaagcctgcgtgtgctcatacatcctgcagaagcgtaactgtcgtagaagctaactgccagcatgacggatacggagaattgtattgtaatctttgtggggaatatcttggaaaagattattatcctcagacgggacatggaagtataagcagacataccacaacggaacccacctgcacatctggtggttggtgggaagagacctgtgatctgtgcggagctgtaatcaacagtggagggatctctggtttaggccattctgataatggaagcggatggtgtagcaggtgtggagaagaattggttgatcattctaaaccgactcctccgcctctgccggattgggtaacaaatcccgattctggagcaaatacagaaaatactggcaattcagaaagcacaaatgcagatttggaagattctaatactgattcaggcgagaatggtggatcgacagcatctgatacaacaattgaatgattattagagataacgaactaactgaataaaagcaaaatgttaaaagagtcttatttataaaatgagactctcagactgtagacaaagctccttcctgtgagggagcttttcttgtgtcatgactgcaaaaattatgtacttacaagcatat

SEQ ID NO: 11283 - DNA, 4718 bp, Unknown
  gut microbiota DNA sequence
aataggcttccgtgatttctcgctggatccgcaggataaggtaatgaagctgaatggtaagcggttggtgatctgtggtgtgaaccggcatgagtggaatgcggcatccggcagatgtatttcaatggaagacatgaaatgggatattgcctgcttcaaacgaaacaatatcaatgcggtcagaacctgtcattatccggaccgcaaggaatggtacggactgtgtgatgaagccggaatctatgtgatggcggagacgaatctggaaagccacggctcctggcagaagatgggtgacacagagccctcctggaatgtaccgggttctgtgccggagtggaaggaagcggtagtggaccgcgccagaacaaattttgaatgttataagaatcatccgtcaatcctgttctggtccctgggaaatgaatcctatgctgaggatgatatcgcttcgatgcagcagttcttcaaggaaaacgatgacttgcgtctggtgcactatgagggtgttttccataacaaggcatatgaggatgtgatttccgacatggagagccggatgtatgcctatccgcaggagattatagattatctggaaaacgatccgaaaaagccgtatctgttgtgcgaatatatgcatgatatgggcaattccctgggtggaatgaattcctatatggacctgttggaccgttttgagatgtaccagggtggctttatctgggactatatcgaccaggcactgtgggtaaaggacgaagtgtcgggacgcagagtactgcgctacggaggagattttgatgacagacccagtgattatgaattctcagggaatggaatcttattcgcagaccgtagtgagaaaccggcaatgcaggaggtgagatattattatggcactcagaatcgtaatcggtgatgtgactataggtatacagggacaggatttttcctatattttctctgtgggatgcggaggcatggagtctttatataaggatggcaaagagtggctgtacaggactccccgaccggctttctggcgcgcggtcacggataatgacagagggtgtggattcgcattccgcagtgcggtatggtccgcggcggatcgttttgtacgctgtagccgggtagaggcccggatggatggagaggagattgccatcccgctagcaccggcgaataataaatacaccggaaaagagacctgtgacagattcgagatgatctatacgtatgagacgccgacagttccggccacggaggtgacagtgacttatacggtggaaacggatggcagaatccatgtgcaggcagagtatcgcggacaacagggtctgccggagcttccggtattcggaatgaggttcctgatgcccaccgcagcggagcggtatacctatgaaggactgtccggagagacctatccggaccgtatggcaggaggaatccccggtgtgtatgaagtacagggcctgccggtgacaccttatatggtgcctcaggactgtgggatgcatatgcagaccaaatggctggagatcgtcaggaagacttccctggataatacagaccgtggaggaagaagcagccgtttgaaaataactgcggaagagggaaaagacttcgcattttcttgtctcccctatacggcgcaggaactggaaaatgccatgcatcatgaagaactccctcctgcccgcaggacggtggtatccatctttggagcagtgagaggcgtgggaggtatcaacagctggggtgctgatgtggaagacatttatcatatcagcggagagcaggatatttcttacggattctggatcgagtgaaatacttccccgatcggtccctgaatcaggagatccgcatttttgtctctgggggtcgcacttttgttgatgaccaccagcttatcaccctgaaaataatcaattaacccggctgcgggatagacagccagagaagtgccgccgatgatcaggacatctgcttcgtggatgtatctgacggcggcatttatcgtcttttcatccagtccttcctcgtacaggaccacatccggtttaatggtgccaccgcatttctcacagtgcggtatgccggtgctgtttaagatagcattcagaccgtagaactgatgacatttttcacagtaattgcgaagtaccgagccgtgaagctccaggacagtcttacttccggcggcctgatgcagtccatcgatattctgtgttattacagcacgtacttttccggcacgttccagctctgccagctttttatgggcggcgttcggctgagcttttgggaagagcatcttattccggtaaaaacggaaaaattcttccggatgggaacggtaaaagctgtgactcaatatggtctccggaggatagtcgtattgctgatggtacagaccgtccacgctgcggaagtccggaatcccactttcggtggagacaccggcaccgccgaaaaatacaatgttatcgtaggtatcaatgatcttttgcaattcctgaatctgttccttcaaattttccataagttattcctccttcgtaaattgtaccaatcgccagatatttaaacagctgcagcagaatatagacaccgcaggaataaaagctgttgatgaatttatgcatatcgttggtaaaccatccggtaaacagaccgcagccaaaacgcagtaaaacagcactaagcaagatcccgcagcttaggatccacagttccagatcggttcggtctccgtggaagagtccgtggatcacgcggacagtcagcacaaggagagcaagcagagccagcaaaaatacgggctttccaaacagctgatagatggcattcattttgttcagaagagacaccataccggaactatagacttcattgaaatcatataaggtctcgtcggcaatggaatcataatctgccgcctggaactgtgacagtgtaggatacactgccaggcaggaggtaaatgcctccatccggcggatatccgacagacgcccggtacttttggtggagctgcttagggcacagtccgtataaccggcgatcttccatacattatgcagagtgtcggacaggatgcccggaatttccgaaggtaatattcctttggattgggaggaaaaatagagcgcaccattttgcttttccgttaagtcaccacgctctacagctgcaaggagttcagagagaacgttgccataaaaggcctgcgcattgacggcatccggggaatagccggagtcctgtaccgcatcccgtaacacccagctgaagtggtcgccgggaatctctccgttactcgtagaccagtcttccacataggaatctaataacggctgaagctgttgcagggttggactgacggcctccgctctggcaatcgtctccctggagatccagatgtcggagcctgcttccgtattgccctgcagatgatagaacagggacatcagttcggcaaaatttccctccgtgcggtcgttggtcaggaatacaccgtagtggacctgattgatggcggaaatcgttatattgccgccaaacagaagcaatatcggcagcagaagtatgaagcattggagcaaaagctgccgtcctgtccgctttttatgcagtgccagtatcacatagcctacattccatactgtcatgacagcgataaacggcagaatccagacggaatcctctcggatctgccagaaaaaggcaagagccatgccggtcagaactgcccagggaagctgctttttcaaggtaaactccttgcgcagggtaagaccgatcatgccggaaaatacaaccagcaccattccgggaacaatagccatacggtacagccgctgtgtcaccagctgcgtcagactgatgggagaaaataacagaagcagatacaggagcgtctgtccatagggattcttccatctgacggataatgcgcggacgaacagccaggcacccacagcctgcagtagagccagcagcacggaatatggcagacataattttttcgcaagaaccagaaacatcggatatccgatccctttggcgagagcataggcgtcgtagctgcccagccatacgccacttaacagatcgtaggcattctcgaacagcatccggtcgtcatagcgctggtcggcgaggatcatataagggatccgcaatccggcaagtatccggagggcagtaaaaaacaaaattatgataggaagacattttgtaaaatttgtttttggtgtcggtctgcacataagaatccttcttctctaaagtattatactaatcaattacatcacatttttccgcaaggtacaagtcagccgatgccggtaaaagaaaaatttttaaaaaattaagaaaaccctaaactatgtggtattgagccaggtgctgcagatatgctacaataagccatagggaaagattggaggatgtatgaagagggaccgcttgattccggtggaaaaaagtaaaaaagtgatctatctggatcccagaggcagaggcgtggatcagaagcactacggagcaatggcactgtatgttctggcggtgctgtgtgcgctgtattgtgtgggaatcgggttgtttgtcggctttggcagttattttttcctgatctggggcgcgatcgctgcgttttgtgctgcatggggctggatactgactcataaatccgtgcaggagag

SEQ ID NO: 11284 - DNA, 2538 bp, Unknown
  gut microbiota DNA sequence
cctgcggtagaagccgcggattatgacggggatggcgacaaggagtactatatttctaccatacaggggacaggaaccggtgtccatgtggaaggactgtattatgtagatgtacagaaaggaactccgaaggtttccgaatatacaaatgtggttgaagattttgacagacggatccttgcggcggatacgctggatgaacagttccatacacttcatgtggattttctggataaaaacggaaagatagatgctcagaagagtattgatctggatcagacccgtctgttgcagaaactggaaggatacacttataaaagcatcggtgtgggagcgcagatccggtatgattttcgtggaggacagccctttgcaaatgtaggggttggcataaatatgaacgagatggcggacctggtttatgagactggctttaatataacggcaccggtatccatgcaaaaagatggtaatttttctctgggagatttttcggtacaaaaaacatattctcgttatttggaagaggagaatatcgacaaagaagaaccggatatgacagaagtctataccggatattatgatctgacccataacggttacaaggaaaagattgtaacgaaggttcatttggaggaagaaaacgaaaatctcacagaagcattgcggaaggccggaaactggggaacggtagcggtctacgaatatctgggagacggacaatatggaatcattcctctgtggtcgcaggaattcgccattgcccatgcggggaacgtacagatattcctcacacaaaaggatggttacgattatctggtaacgacaagcctttggtcggggcagggtgtctgctattatgactataatgtactgtctcccgtgaactattcctttgacagatatcataatgagctgaaaggggcagatcactacgacccgcagtttttcacagggctggaaagctggctgaaggaggattccctcctgcttgtggcaacggatattgatatgccgcaggggcaggaggtcattctgacaaccgatgaagagatacactatgccagagaatatttaacggtaaaaaaagaacaacagcagcggatagaggaaatagagtaagaacaggatcagtatttccagagagatacaaaagtgataaaataggatcaataaggattttttcagtataaacttttcacgcgcaaattgtgcctgcacagtgtacggaagtacaggtttaaagcaccggaaggtttgcagattacggaaaggcaggaaggttaagagatgaacgaaatgatcagaaaaagaaatgaacagctggccaaaacagtgatcaagggattacagtcccgtaacatgtcaggttattacgcagaggataaggaagctgcactaaagcaggcactggagctgatcccggagggaagcaccatcgctatgggcggatgcatgagtgccggagagatcggactgatctccgctctggaagcaggcaattaccactatatcgaccgctctaagatggatgccagagcaggacttatggcagcttacgatgcggatatcttcctttccagcgccaatgccatcaccagcgacggtgtcatggtcaatatcgacggcaattccaaccgtgtctcctgcatagcccagggaccgaggaaagtaatcttcatcgtcggcatgaacaaggtctgcgcagacttagacagcgccatgaagcgtgcgagaaacgtggctgcacctatcaacgcccagagattcgacatcaagactccctgcaaggagaccggaaaatgcttcgactgcaaatccccggataccatctgctgccagttcctgatcacaagatattccagacataaggacagaatccatgtgatcctcgtaaatgacaccatcggttattagacaacaaaggggaaaagacaatgacattagtattgcaaaaaggaagacctgccgatatcaccggcagactggacaaagagatacgcacctatgacctgttggatagcttaggtgtggaatatgaccgtgtggatcacgcacccgcaatgaccatggaggattgcaaggaagtcgatgaaatcttacagtccatggtctgcaagaatctgttcctgtgcaaccgtcaggagacggcattttatctgctgatgatcccggataccaaggtgttccataccaaggatctgtcggcacagatcggctcggcgaggctttcttttgccaagccggaatacatggagaaattcctggatatcacccccggttctgtcagcgtgctgggactgatgaacgataaggaacatcaggtgaagctgctgatcgatgaggaggtgctggacagcgaatatttcggatgccacccctgcatcaatacctccagcctccggatgcggacggtggatctgatcgaaaaggtgcttcccgccatggaacatgattttgtaaaagtaaagctgtaaaaagcatctatgaacttactataagttgatccgtagatttcagtataaaatgctgaagtct

SEQ ID NO: 11285 - DNA, 14801 bp, Unknown
  gut microbiota DNA sequence
acaggaaggagctttgtctacagtctgaggcacatcagcttggctgatgtgcctttttatataaagttttttataaaaagtttacaaaattttacgataatgttcaaaaatatacaatttatcaaaagtgatgtagacaaacaataaaaagatgggtaatatgtatatgtaatcagccggatgaacgaaaagtatgtacaatatgctacatatttaaagcaagaaacataaaataaggaggaatgttgccgatgaaacagttcagctatatcattaaggatgagatcggtctgcatgcacgtcctgcgggactgctcgccaaggaagcgaaaaagtatcagagtacagtgacactttcctgtaaggggaaatcagctgcagcaagcaagctgatggcgatcatgggaatgggtgtgaagcacggagacaatgtggaagtcacgatagaaggagcggatgaagatactgccgcagcagagcttcagaagtttttccgtgagaacctctaggagaagacctgcacgacagagtttggaaggtagaaaatggaaaaatatattggaaaatccgtatataagggaacagcgatcggacctgtcagtgttttgaggaaaaaggacagtctcgttaagaggatccatatcgacaacacagaggaagaactgaaacggctggatgcggctaaggaacgtacgatgacgcagctggcgcagttatacgagaaggctctgcaggaggtcggagaagtcaatgcagccattttcgaggtgcatcagatgatgctcgaggatgacgattatcaggatgccattcacaacatgattcagaacgaagaagtgaatgcagagtatgcggtggcagtgaccggtgataattttgcagagatgttcgccaacatggatgatgaatatatgcaggcccgctctgcggatgtcagggatatctccaaccggctcgtccgcaatctgtccggggaggagcagattgactggagtaccatggagccatcgatcattgtggcagatgatctgacgcccagtgagacggtacagatggataagagtaagattctggcctttgtcacagtacatggctcgacgaactcccatactgcgatcctggcacgtatgatgaatattccggcactgataggggtaccattggaactggagaaaatccataacgggacccgggctattgtggacggcagggaagcggtattttacctggatccggaggaagagcagatccggcaggcagaagcggcacagcagacggaacagagactaagaagcctgctggcagaatacaagggacgggaatccgtgacaaagagcggacgcaaggtcaatgtatatgcaaatatcggcagcgtatcggatgtggcatatgtactggagaatgatgcggagggaattggtctgttccgcagtgaattcttatatctcggaagggattctcttccggatgagacagaacagttcaatgcttaccgtcaggtactgcagatgatggcagggaaaaaggtcatcatccgtacccttgatatcggtgcggacaaaaatgtagattacctcggactgggcaaggaagataatcctgccatgggataccgtgcgatccggatctgtctggagcagccggagatcttcaagacacagctgagagcacttctcagggcggcaaaatacggaacattggctattatgtatccgatgatcatttccgtggaggaagtgctggatattcagaaaatcgtggctgaggtggctaaggagctggaggaagaaaagcttccttacgcaattccggaacagggaattatgatcgagactcctgcagctgtcatgatgagtgaggagctggcggagcatgttgatttcttcagtatcggcacgaatgatctgacacagtatactctggctatcgacaggcagaacaacagactggacagattctataatccacatcatgaggcagtcctgcgtatgatacagatgactgttgacggagcacataagcatgggaaatgggtcggcatctgcggagagttgggagcggatacgacactgaccacacgatttgtgcagatgggaattgatgaactcagtgtggcaccgtccatggtgctgaatgtccgtagtaaaatatgcgaaatggagtgagagattcatgagaatatacaaagcaaaagattatgcagatatgagcagaaaggctgcaaatatcgtatcggcacaggttattatgaaaccgaattgtgttctcggactggctacgggatctactcccatcggcctgtataaacagctggtggaatggttccgcaagggagacctggacttttctgaggttatgacagtgaacctggacgaatataaggggctgagccgggaaaacgatcagagttattactattttatgcaccagaatctgtttgaccatgtgaatatcccggtggaaaatacacatctgccaaacggaatggaaccggattcggagaaagaatgccgtagatatacggaactgatccagtcactgggcggcgtggacctgcagcttttgggaattggacataacgggcacatcggcttcaacgaaccgggagagagttttgacaagcaggtacattgcgtgaacctgacagagtctacgatcgaagccaacaagagattcttcgcatcggcggaggatgtcccgaagcaggcatacaccatggggatcaagaccattatgcaggcgaagaaaatattgatcgtagccagcggcgaagacaaggcggagatcgtacagaaagctttcttcggacccatcacaccgcaggtgccggcatcggtattacagcttcataatgatgtgacactggtggcagacgaagcagcgctcagtaagctttctgaataagaagggggaagctgataggtcatgagaatcagaaatgcaaatatatatacagaagagcatcggtttgtcagaggggatgcagccgtggagaacggcaggttcgtaagctgcaccggggatccggcaggtgaggaagctgttgtggatgccaaaggcatgtatctgataccgggactggtggatattcatttccatggttgtaagggcgcagatatgtgtgacggtacgaaggaagcactggatgtcatcacatcatatgaagcatctgtcggtgtgacaagtgtctgcccggctaccatgacgatccctaaggatgaactgctggaggtcatgaaaaatgccggcagctatgagtattccggtggatcccacctggtgggcatcaatatggaaggaccttttatcagtccggcgaaaaagggtgctcaggctgcagaaaatatcatgcactgcgattatgaatatttcagtcagctgcagaaagcggcgaacgggctgatcaagctggtagatatcgcaccggaggagccgggagcgatggaatttatcgacagagccaaaggagaagtggtcatttcactggcgcatacagcttccggttatgatacagcaagggaagccattgaacgtggagcatctcatgcgacacatttgtataatgcaatgccgccgctgaaccacagggagcccggcgtgattggagcagtgagagattcagagaaatgtcatccggagctgatctgtgatggtgtacacattcatccgtcagtgatccgtgcaacgtttgcgatgtttggcgctgaccgcatgatcctgatcagtgacagtatgcgtgcaacgggactggaggatggtgaatatacgctgggaggacagccggttactgtcagaggcaatctggctaccctgcatgacggcacgatcgccggatctgcgacgaatctgatggattgtatgcggtttgtagtaaaaacagtcggtctcccgttagagacggcagtgatgtgtgccacggagaatccggcgaaggagatcggcattttcaatgaagtgggcagtatatccgttggtaagagggcagatttcgtactcctggatcaggaactgaacattgtagcggtatatatcgacggaaaggagttcacatgttagattttttgaaaggtaagcgaaaaggaaattgtatcggatctccctgtaaggggaaggcagttgctcttacggaggtgccggatcctacattttccgagaagatacttggagacggatttgcagtgatcccctctgaggggaaaatatatgctcccgcagacggagaggtgaccgtggtatttgatacgctccatgcgatcaccatgacaacggatcagggagcggagcttctgatccacatcggactggacaccgtgacactcaagggagcccccttcacggcacatgttgctgccggagaccatgtcaaaaagggcgatcttctgctggatgcggatctggagaagattcaggaagccggactgcatatcatcactccggtactggtctgcaatactgatgaatataacaagatcagtattctgaaagagggagaggtatctcccggcgaggacgtgctccagatctcttaagagcggtacgtccgtatcaactaatgaaactgaccggaactgttccggtttagtataatgtaaaggaggagaaatgtatgaagtttcttcaaaaactgggtaaagcgttaatgcttcccgtagcggttctgccgatctgcggtatcctcatgggtattggttactggttgtgcccggcaacaatgcagggtggtgcgatcgagggtgtaagaaatctgatcggtctgttcctcgtaaaagctggtggtgctctgatcgacaacatggcgatcctgtttgcaatcggtgtaggtgtcggtatgtcagagaaaaatgacggtaccggagccattgcagctctggcttcctggctgatgctcacaacacttctgtctaccggatttgttacgaccattatgccctctatcgctgaggatgctaccaagacactggcattcgataagattgcgaatccctttatcggtattattgccggtatcatcggttccatgtgctacaacaagttcaaggataccaagcttcccgactggctgtccttcttcagtggtaagcgctgcgtagctatcgtagcaggtgtggtatctattctggcatctgttgtactgctgttcgtatggcctttactgttcggcggtctggtagctctcggtgaagctatcgaaagtctggatgtagtcggtgccggcatttatgctttcctgaaccgtctgctgatccctaccggattacatcacgcactgaacaacgtattctggttcgataccatcggactgggagatctgcagcacttctggaaaggtgagacaagcgctgatgtatcctggagccttggaatgtatatgtccggcttcttcccttgtatgatgttcggtgtccccggtgcggctctggcaatggtaaaatgtgcaaagcccgccaagaaaaaggcagcgatcggtctggtagcttccgcagcaatctgttccttcatctgcggcgttaccgagccctttgagtttgcattcatgttcttagctcccggactgtatgtgatctacgcagcactgtacggcatcttcaccatgatcactgttgctcttggcttccgtgcaggcttcagcttctccgcaggtgcgatggatctgctgttctcatcctccctgcctgcagcagctagaatctggctgatcatccctctgggtatcgcagcatttgttgtattctacttcgtattcctcttcgctatcaagaaatgggatctgaagacccccggtagagaagatgatgatgtagaagcagagaagaagatcgagctggcaaatgatgatttcgcagcaatcgcagcaaccattctggaaggctgcggcggcaaggacaacattgcaagcattgacaactgcatcacaagactgagactggaagtaaaagacattaccgcagtgaatgataaggtgatcaaatctgcaggcgtagccggtgtcatgaaacccggtaagacctccgttcaggtaatcatcggacctaaggttcagttcgtagcggatgcattttccaggctttgcgaataataaagcactgataaaactgaatatatgaccggaagaaagacctgcttgggaagaccatgcgggtctttcttatacgcaggcccgatgcctgcgggatgtattgtaatgtaatggagagaaaagtcatgaaaaaatcaacaggaaagaggggaaacgggggattttcattagtagagctgatcattgtaatagctatcatggcagtgctggtgggagtattggcaccgcagtatctggcttatatacataaggcaaaggtcgctgcagatcaggcgaatctgaagaactattttacggagatccagctggattatattactacaggaaagtataacccggcggtctatagcatggcttcggatagaccggattcgctgaagcagcgtgaaattcattttctgaacggatcgacagccaaaatgcaggccggatatttctcggtgacagaggacacacgagggaaggggggatacaatatctattattattgtgatgagtgcctaagtgataatgctagtgtgaaaaataagcatctggatacctgtgcgacaacatttctgtgatggcggttgagaggaatatgttatcttcccagacataacccgatattatcagaaatgtaacaaatgtacccatgcttcccggcgtaggcggctgcctgtctgcggatggtgggatccattgcgtattccagggtgtaagcggtacagccgtgtgacatagccagatctagatactcagtatagtattcacgcgtgctttgatcatttttagtatagatatcctttgaaaaatcatacgcagtaaaaacgttctcctggtttaccccatcgatgagaacgtttttttctgttgtaagatatttttttacaaaacagtccccaccgttgatcatgatctttctgccggtatggtccatgtagtccagaatcgtaaggattccgtcatagatggattcctgcggataattatagtatacatccgtgttatcgacaaaaaagccgtccacacctttctgtaccagggagtctactctggaagctgtacatgcctgccactccggagccgagacatcgatccatttttcctccggccagttctcataggcacccagagtatatttctcaaagtctgtatcataggaccggaagctctcgatcgatccgatattgatataggagaagatttcacggataccattttctcttaaacgggcaatgtcattttgggaaaaatattccgcatctatgacaagcagatcaatgtcagaaagtttatctgtgatctcagaatcttcgccgatcaggacaacgtatttttctgctccatcggaagaatcatcggagcaggcactgagcagggctgtagataatatcagaacgagaacacatatttttcttaagaatagcttctttttcctcaattaacggtacctccttttgccgcgatcagccttaatatccgaatccaaagtcgggggcttttgaccccgacatcataattatactatagatgacatagtatttcatctattttgaagtggctggagggaatgaagcatagatagaaaatgttgtgaaaatatcggtaaaaatggcaaaaagggcgaaaaatattgcaatttgtggtataatttttatgtaaatgtaagatgatgccgggatcaaaaaattccggatttgatacgttcagcggttaagataaccgggaaagtagggagttatatgaagattcaggatttttgtgacatgaacaaatttgaacagatcatgaagaactgggcaggcagcacgggactggcaaccgtggctgtgggtgcagacggaaaatacatcagtgactgttataattttacagagttctgtattgatctgacgagaggaagcgcagaggggaaaaagcgctgcgagcagtgtgacagagaaggccatggtgtatatccctgccatgcgggactggtggatttcggtattccgatcacgctggaggatggaaccgtgctgggcagtattatcggaggacaggtgctgccggagaatccggatgaggagaagttccgtcagacagcgagagagctgggaattgatgaggataaatatattaaggctctgaaaaaggtaaatgtgaagactaaggagcagatcgacgcttctgcaaatctgctgggtgatgtgatcaacatgttcgtgagagccagctacgccaactggaaaaacgagaatctggtaggtgaattaaagggtggcatctcgaaagctgcggaacagatcgaggaagcaacggacaagaccaaggaaatcgatggttacagcaagagacagcagattctggcactgaatgcttcgattgaggcagcaagagccggagatcagggcaagggcttcgccgtggtggcaacggaagtacagaagttagcgagagatatggcgacctcaagtgcggacattaagaagctgttgggagagctgcatgtaacgatcaaccatttgaatcaatagtaatttagaataaagtttacaggaaaaccgttaatctgatccgcaaaggcacagaaaggcggtttttttgcactttttgcctgtttccttttgatgtgtataaaaaagtcggagaagctgtccgatattctcaatagaggaaccaggtaaacaaacggatttggcatttattttcaaggaggaaataattatggcgggaatcggagcaaccggcagcataggtgcgtatgctgcgcagagtgattacagcaagagtacgaagacgaagaagccggaggtattcggaacatcagataagacagccggcacaacaagtgcgggaaagccttccgaaacggcacagaccaggggaaagactgcggattacggcagaaccatcggtcagccggagctgtcggagaaggctgcgaaatactacgaacagctgaaaaagaagtacggcaattatgattttattctggtcagccgtgaccagaaggaaaatgcaaaggcaaatgccgcgcagtacgccaacagctttaagactgtggtactgatcgatgaagacaagattgagcggatggcgacagatgagaaattccggaagcagtatgagggaatcttaagcggtgcggctgcacagatacagcagttaaagaccagcctgcagagttcgggggcgcaggtcaagggttacggaatgcaggtaaatgatggcggaacattgtcattttttgcagtgctgaagaaatcaagcgcggatcagaaggcaagaatcgagaaaaaaggcgagcagaagagagcagaaaaaaaagctgcggagaagaaggctgctaagaaagaaaaggaagaacggctaaaagacaagaagtcggataaggtagcagacagcaaggaggaagccggcacagaggatacggtaacgatcagcgccggttccatagaagaactgttgtctaagatagaaacctacaatttcaacacacggagtgacagtgtacagaccgcaggtgaacggcagatcggccagaactttgacttcagagggtaaggtgaggatgtatgatttctatggggaggcccggaggtgcttacggaagcggcaataccggtttgccgcaggcattttccggaggaaagaagacgcagaacaatcagaagagtatctttggagcaaaaaataaaagttctgtcaccgatatccggcggatgttggcgagagatgaccggaacggacagacacaggtggcgaacagttggggacaggattctattgtgacgagtactttaagttacagtgaatcgctgcggaatcagagacagcagacaaaaaatacgacattagcactgaaaaaactgaagtaccagtttaaaagtatttcttcgaagatactgcggagcaagacttcccaggcggcgaagcaggcagccggacaggcgagaagagagatcatgcgcctgaagcgtcagaagcagaacagtgacagcgacagtgaagagatcgatgcagcaattgctcatgcacaggctatggaacgtgtggcgaagaagaaagcaaaacatctcgaagaagaggaaatggtgaaggccgcgggtggaatctgccagggagaccggatcagcgaagaagagacgaaggatgtgcaggacgcagaggcggaaaacgcgcagaatgaggaagaaatgtctgcggaaggttctgcggatgaagtgtccggggacttctctgcgtatgagtatgcaggcaatgaggcgtatgcaggggatagctatgatacatctgaccatattgctcttggcatggatacattctatgcgcaggcaggagactttatgtcggaaatgagcgatttcacctcggagctgatgcaggaaatgtccgatagcttacgtgatctgatggaagagatggggctggatggaatatcagatactgcggtctctgtgaacagggagatggatcccgcagacctcaagatgatgaagatcaaacaccgtaacaaagagatgaaagacatcgtcaaggctgatgcggagtacctgaaagcagtcttcgaccacctggagaaaatgaaagacaatgcagtcattcccaccgggacttcattttccgcagatgctgtcggcgtaggcgtaccggcggctcccatgccggtgatcaatattacattataggatagacatataagaagaaatttgacatcccggacactgtgtttgtgagacagacatagtgtccgggatgattttatatagaaacatttttgattttcgtgaaaaactctgcaaaaacatttttggatttcgtgaaaaagaatacaaaaatatttttgattttcgtgaaaaatagtatacatacatttttgattttcgtgatataatgagtgcaagggagtcaacacgcttgcgtgattgacgaacgacgaatttgttcacgatagctgcgaagcagcgtagagcatcgaagatgcgaatcgtgaaataatgagcgtaggcaacgttaaaagttattaagaggatataaaaacatggtatttaaaagaaaaatgtatgataaattaaaacaatggaaagaactttccggaggttcttctgctgttttgctggaaggtgccagacgaatagggaaaagtacgatcgtagaagaatttgctaaaaacgaatatgatgattatatgatattggattttgcaaaagaaggaaaaaatgtcaaaaacaatttcctggagaacatgaatgacctggagacttttttcagaaacctttttttactaaaaggaagaagcctgaaggggaatcattgtgtaattatatttgatgaagtacagttgtttccgcaggcgcgtcaggcaatcaaatatcttgtggcggatggcagatatgaatatatagaaaccggatccttgatatccatacgcaagaatgttaccgatatattgattccatcggaggaataccgaatcaaaatgtatcccatggattttgaagagtatttatgggcaatgggtgataatgttacttttgaagcgatgcagagtgcttttcaacacaggaaaccgctgggagatgccattcacagaaaaatcatgcagaaattccgcacttatatggtagtgggaggaatgccacaggctgtaaatgcttttgtggaagggaaaacttttgcacagattgattttataaagagaaatatattaagcctgtatgaggaagatctggcaaaatatgatacagagaatcgagaaaaagcctcggtaatctttaagacgattccggagcagttggagaataaaaattcacactttcggttttcgttgatagacaaaaatgcgagataccaaaattatgtcgatgcggtgagctttattgcagaagccatgattggaaatgaatgtatcaatgtgacaaagcctgaagtagcgttggaattgtttgcggaccggagcaattttaagctttatatgggggatacaggacttctcgtgacacagatcatgagaaatagagaagatacagaggaagacctgtacaaagcactcatatttgataatctgggaatcaatcagggaatgattatggaaaacattgtggcacagatgctaaaggcagccggccatgatttgtattttcatgaatatcaatatctcccggagggggcaataaaagaacaaaaatatgaaattgattttcttgcagtgaaaaagaaaaaaatttgtccgatagaggtaaaatcttcgggatatacatcacataaatcctttgattatctggggaaaaaatatcagatgaaaatgcaggacaaatatattgtgtatacgaaggatcttaaataccaggatgaaatcatgtatattcctctttacatgacaatgtttatttgaaaatgattatatgagggctgagcaaatgaagactatggtgttactgtatgatacaagctgtatttacgagattgtgattctgaattattttctaaatgcgacgggaaaagaaatgatttttgtatctccggagggaaatcctgtcatggcaacggaaggataccggattgaggcagaggatcggttggatcacgtaaatccgggagatgtggaactgttgattattccgggaggagatattacgcagatcgatactccggaggtatgggaatatttgaaaaatgttcacgattctaatggtcggatcgctgctatctgtgcaggtgttgatgtgttggagcatgccggactgttagaagatgcagagtcgatacattcctgtgaaaaagatgtagtgacttcccaccgaatcaccacttcaagagcaaacggatatgtggattttgcaattgaagtggcgaagcagatggaactttttgaggatgaagcagatctgcaggaaacgattgctttttggcgggaatttcagcgagtggaatgattatttccgcccgtacaggattcccatgccggagatcatccagggagcagaaaaagccccggtagtaactccggcacgtttgcagatattccggaggttcgccccggcgtagcctttttccagaaattcttccctgccgcagcggattaagttttcttccgtgattttcttacgatctgtctccataacgattgttatattagcatagactaactcatgggtcaagaaggaatcttcaggtaaaatattttttattttcgcaaaaatctctgcaaaaacattttggtttattgtgattataagatataataaaaatagtagcaggaaaactaagatagtgatatatagcggggaaatgaatatggacaaagacccatttaaagaatatctgagagaatccgaaccgaataaagcaacaaaagggtatgtgtggagcacggcggttggacttcaggcagtagatggtctgaaaccctcgcaatatctgattgacactgcaattcaaaatattgaaggtaagatcacgctaaaagaggcacagagtcttatagaaagctattacaatgagagacctgtccgtgtatcagataatgaacgcacggaagaagcagataaagtttccagccgtattgcggagctcctttccgaaacggcgttttccttttcaccgaatgagtatatagctattcatcgtaagctttttcgtggaatatataagcatgccggaaaaataagagattataatattacgaagaaagaatgggtgcttgatggcgcaacggtcatatatgggagtgcttcagaactgcgtgctacgttggaatatgatttttcgcaggaaaaagcttttagttataaaggactttcgatagaagagagcattcatcatctggctttgtttgtatcaaggctttggcaaattcacatttttggtgagggaaacacaagaaccacagcggtttttttcataaaatatttgagaacacttggtttttttgcaacaaatgatatttttgcggaaaatgcatggtatttcagaaatgcacttgtcagagccaattatacgaatttacaaaaaggaattcatgagacaacggaatatttggaactcttcctcagaaatatgcttttaaatgaacacaacgagctgcacaatcgaaatatgcatatcagtggacttttaaaggatacaaaagtggacattggaactttaaaagtggacattggaactcaaaaaatggacattgaaacatcaaaagtggacattgaaacaagattggctgaaaaaacgctgaatttttcaacaaaaacaattatgcatatccgtgtattatatgaaaaattcggagattgtcagttttttggcagaggagaggttatggaattgcttgggctgaaaagttcaggcgcttctaaaataatatccaatatggtacaggctgatgtaatcgaaccggtatccgggcatggaaaaggaaaatacaaattcaaagagttatagagtatattggatttaaaggcatcggaacatccggtgccttttttaaaaatacaggaacctttttaccgtccggcgactcatatagtatgaagccggcgaagagaaggaggtgttactttgtcagttatgacaaaagaggaatttgtgcgggaagtgcggggctataccctgcatatgtaccgactggcatattctattctgaataatagtacggatgcggaggacgctgtcagtgaagcggtgctgcatgcctatgaaaaattaaggacactgcgggatccggacagctttaaaaactggatcttacagatcacggcaaatgaag

SEQ ID NO: 11286 - DNA, 22593 bp, Unknown
  gut microbiota DNA sequence
cattacatttatcatatcatgatgaccgcaccgcttcaatatttaattttatttaaaaaataatttccggtgtgatcgttcatagcttataggttcttatttcccggcagatttcctgcgacagcatcactaccgccagaagattcggcaccgccatcagaccattacagatatccgagaaatcccataccgcttccagcgaacagatcgccccaaaaaaagcaagcattccatagcacatacggtaccaccctgtccgacgactatttcccgccaggtattcaaaagctttctctccctgatattcccatgcaataattgtagcaaacgcaaacaatgcgatagagatcgtaagcatccattcccccgccctgccaaatgtggtggaaaatacagcgatcataagcgctgttccgttcaaaaactccccctgcgcatccctctgtcccagcataccgctggatgctatggcaagccccgtcagagaacagatcacaatggtatctataaaaactcccgtcatgctgatatagccttgccgtaccgcatccggtgtatctgcacaagccgcgctgataccggctgctccgagtcccgcttcgttggaaaatacaccacgggagacaccatagcgcatggcctgcctgccggaacataagaatccaatgctccctcctgccatagcttccgggcagaaagcaccgcataaaatctgcagaattcctgccggtagattatgtaaatgcgtaaagatcaccatgcctgttccgaacagataaaatactgccatacagggcaccagatattccgtgacccttgctattttatcgattcctccaaggatcaccagaattgtaaagataccaatcaccagtcctgtcactgtccggtcgactccaaaagtcactgccagtgcctccgcaatagaattcccctgcgtcatattccccatgccaaaggaggcaagtactgcgaatattgcaaacagtatcgcaaggatccgccccatgcgtctatacggaaatgcattttgaagaacatacatggggccacccaccggtttccctttgtgatctcttacacgatatctgacacacagcgtactttccaccagtttggtcgacagcccgatgatcccggacaaaagcatccagaacagtgctcccggtcctcctaacaccatggcagtagccacgcctacgatatttcccgtacctattgttgctgccagttccgtagtcagggctgaaaaagaagaaaccccttccccgtctgtacctttccggctcttagaatggaacaccagaccaagtgccgccaacagatttctcaagggaagaaagcgcagactgatcatcagatagcagccacagcccaataataaaaaaataagccagggtccccatatgatccggtctgcctgctgtaaaaaacctattacctctgcgagcataagaagtctgtctccctgacttatttttctaaactatattctttatttttctattttatacattgatatcactgtccggctgcttttccggattcctgtatttccggaatgtatttactggatatccggcagaaaacccgggatcttttctgcgatctcacgaatcccgaacaaatatccgacacctttctccagttgtccttcggaagcattgagcagtgttgcgatcagatgcagtttatgctctccgtattccaggtcactcgtatactcaccgtcttcgttttccgtggctgtctgctccttcacttctgcttcagcttctatttctgcctttatttcagcctctttatcccacatgatctgtgcattggtatcataaggcacctctccttccatttccatataggtttcggaataataatcatgcagataggactgcatataatcggtgatagcataataaggggcatccgcaccgatatcatcccatgtaaccggttctgtctcatcttccagcacaaccttcatgacatagagtgttccggtctcagaatccacgacacactctatactgactcccgtaacctcctcttccttcatgcgcatacagatgtcataggccatgatcgcgactccatccgacagcttttcatcatacaaaatatatcgtttgatggaaatgttatctgtatctatatttttaaaaaaataatcctccgggatcactcccatatcctgaaaagtgtaattccattccgtatttaaaatatattcatcgatcagaccatatatttcaccatctgttgcagcttcataatcttgttcagagatatagtactgttttcccgcagcgataccgtctgccagattttgaagtctgcgcatggtgtctgtctcatactcttccttccagacggtataatccgttcctgtatttgatatgctgactgacccggtcagcctgctcttatcctgcaattgtagcaacccttccggtcctgcgaatgcaaatacgatcagcacgagcagtccacccatacatagtaggaaattgcgtcggttcttattctcctgttttttcatattccgccttttgctcccctgttgcttttattttttaccacctgcatttccccgggaaaatataagcgcattaccgtgccttctccaagcttgctgtcaatcttcagttccccctgatgcagggtgatgatcttctgacagagagccattccgatgccggctccgccctccttgcgggatctggacttatccaccatataaaaagcctccgtgatcctcgcgatctcttcctgcgggatccccctgccgttgtctacaaccttgatctcatagccctgtgtgagcttacttcctttcatcaggataaatccgccttcttccacagcctttacagcattatccagcagattatataacagtgacaaaagcagatctctgtcacctaaaatcacccctctttccagattgatctttccccggatccctttgcgttcaaaggggatccgcatcgtatcccggatattttcctccagttctttcgtctgaatcttcttgaattccaattcctgtctgtccattcccaccagctccagcaatttgtgagacagactttccagacgttttccctggctgaaaatataataggtggcttcgccccgctcctgctctgtcagttcataggagttcagcatatccgcatatccaatgatggaagttaaaggtgtcttgagttcatgagcaaatgccgccgtaaaatcctccttctgttttgcttccagctctttttcctccatctggcgtaccagtctgtccgtcatccggttaaagctccgggacagttctccgatctcatctgcaccctgataggctgccctcttctccagatttccctcggcaatcctccccgccgtgcggtttaactgctctatgggccgggtcagatatctggacagtaaaaaagctgccagaccaccgatcaccagcagacctgccagagcaataccatattgccgcatcatattgctccgctcttcataaatgccgctcaggtccttcaggatcccaagatataccatatctgccgaatccgtcgcctgatctgtgataatgctgagcagataataacgcgttcctaccttgcggacaccgtagacctgatctgcaccgggatccatggtgcggatcatttcttccgcaagactcctgatctcatcctgtggcagtttcaggctgccctccagagtgatcgtgccatccgtttcaaggatcatacattccgtaccgttctgatccgtcatccgttctgttgcggaatttccctcctgtatccccgcgaattctgctccgtatttttccatgttctgatacaccatatcataaatggtctgaaagagcaggttctcacgttttccctgctccgtctcccgttctaacatacggttaaaatagaaaaacagcataaagcttccaaacagcatgaaggctgccgtaagaagtgctgtgatggaaaaaaataatttatacgtgaacttcattcaaacgataccccactttatataccgctataataatattttcccaatgtaactttttcttcagccgctgcacatgcagatccacggtccggctctgtcccatatattcgccaccccatacagtctcatatatagtttccctgtacaacgccctgtttttattcctggcaaataataacagcagatcaaattccttcggtgtcagatagatttcctccccgtccagagtcactctgtgggatgctgtgtctatggtggcattgcacgcccggatgaccgtctccgtcttatgatatctgcgcagcaccgcctccactctggcaagcagctctacgatctcaaacggcttgggcagataatcatccgcccccattcggagtcctttcaccttatgttctgtagatcccagcgccgtcaggaagatcaccggcagctcacaggctttcgcataatccatcagctcatagccgttgatccccggaagcatgatgtctaacagtgccaggtcaaatttttcctgttccataagatctgccgcacttttcccatccggcgcccaggtacacagataccctgcccttgtcagattcatccggatcagattagcgatcggctcttcatcttccgcaattaatatcctgaacatttcttctgcccctcattctataaattcttatattactttaactcctgattgtatccattttgtatcatccaaagctatgcactcttttcttcttagttcataccatataataaatatttttacggaaaggacagctgattgctatgaaagattattctttcgaggaaccgtttgaaaaatatcctcttgccatggcttatgttccctggcagcattttacccaaatgtatgaaaatctggaaaaaggctaccgggcgggtactattttccccgagcttgacaaaccctttacaggaaggagatgcgtcaaatgagcagcgaagaaaaaaagctgtatgatatcggcatcgctgatttcgtcctgacagatatgatgctgtatctggacactcacccttcggatcaaaaagccatggaatacttcaaccactatgcacggatcaaaacacagatggagcgggaatttgccagagaatattacccactgcgcaaggatctcgccgaaagtaacagggactggcgctggggcagtgcccctctcccctgggaaggaggctgtaactgatgtggaactatgaaaaaagattgcaatttccggtaaatatcaaagagcccaacgcgaagctggcgcaggtcatcatctcccagtacggcggaccggacggtgaaatgggtgccagcatgcgctacctgtcacaacggtattccatgccttataaggaggtagccggactactgactgatatcgggacggaagagtttgtgcatagatgctgtacgttacaatacatttattttgcataaccacttttgcacttcttttttacatactataatataaataaaaaaagaaaggacgaaaaagtatgattttcgtaaaaccaactccaactaatggctctccagatgatactaacaatggtactgtcaataacaacaataatgccgataacgatgataatgacgatgcttttctttcgcattccatcgaaaatgtaatccgaaagaaaagcacctattctgcagatgcggaagaacggaaaaaaaaggcggctaaaattgaacaacaaaaagaacagaaatatcaaaaagacctacaagttcaacaggatctgctaactcagatggaaaattttcgtgaatcctccgatgaatatgaggagcggggttgatttcttcagacgaatgtttatccttttctcgtaaatttttctctatcagcaccggtctctctttgaggtaacctttttcccgggcgccggtttgcttttttcgttatctttttatctggttgtacttttgccgctggctgtacagccggatcatctgctttcctgtcttgtacagtatcattcttttcatcatttctcacagcctgcatggtgggtctcgcctgctgtgtaggtttctccggttcttctgccccagtttcttctgcagcgtattccggttgctgtatttactctcttattctttcagtgtggtgaatgacttgttgtgttttgaccttttcaggtgtttctgcatttattccaagcctttgctgcctgattgtcggcctcctgttatctcctctttcgttctccctgttttcctgcagattatcatgtctggttgtttcaagcggcatttgcacttccaacggttgctggttctgcatcccagcattgacggattgctcgtttccatctggggttttaacgtttatagtaatttcttttttctcctcgtccttcctgtctcctaaaaccggacgttccacagcaccgttgtcccgtacattatcatgcaggctgtctccaacagcatctactaccatggcaagctggttaaggttccttaccagatcctccgatatcatgcgtatagattcactgtctcttttttcttcctgtgtctgtgtatagggctgtgacgatgctctcctttgtccagtatcgctgtttttagaatccatgtcaaccgattctctgatagatcccgctgcactcctttttttcaccttgctttgtgtaacttttggcggtgtctcttcctgcgctttcgcttcttgatttttcaaaaagggattcacagtccaagacaccggaacattcttatcctcgacccaggatgccacaccttctcccgcactagccgccttaccgccgatccactgtgccttaccagcagtccactttgctgcgcttttgatttcttttgctgccttcggcgcatccgcatatacattgcctgaaagccgcatccggttacgcagatatctgggattggatactccccgctgcaccgttgacattgccattaacagcttattccggttcaggaagagagcgattgctattgcgatctgaatcgttagtgcaattagccatccaaaccctacggatctcgaccattcaaatacaagttcgtcaaattttattaaaattccgatgatcattgacaaaaccaatatacttatctgggtctccagaatctttcgaagccatccgcctatcagtccgtcatatcctggaaaaagtgatacaataagaattaaaggcgccataaacagatatacaatggaaaggagctgaaaaaccagctgtatcaacactataatgatgtatataccacatttcataatgcaggggatgaggtacagaaatgcaaatccaagtcgttctgtagccctatccacggaaaagctgccgcttccatcagcagctaccgtttcttttctctctgttgcatctggtttgtacgataagataccaagcacctgatcatcacttgccgtataaccgaactccatggtcagccagggctgatgcaccatattgttccagaggataccggcagcctctccggaaaaagcattaatattatctgaatagccattcgctgaattcactcctaccagtatttccagactaatttcctttgttatgttgttacccatcgacagcatagtatccgacattgtgacaaccaagattgataacattacaatcgctattacctttacgatctgccccaacgctcctgcaagatcctggcgtaccattctcccgatcagcacgcagaaggcggcggcacatcccatcaaaaagaggggctggaaaatactgtcattcagtgcctgttgtattacagatacctgggatccaaacagatccaccagattgaggttgaaactgacataaaatacaacaatcataagatacgccaaaattctttccacgaaaaagaagaatctcgccaaagcattcagtccttccatcgtcttaccggccagatactctcctattccatccgacagctctacctccgcaatatccagggaataattatcccggtatgcggatcccagatattttgcattgccagacagattattaaattcctgtacctctccgattgcactggaggacgccgctactggctgcaccgggagtagcagacccgtcaggaaagctattatacaaattacatatttgatcttatatttcataattgctaatcctcccgaaaagcaaaattaggtcttcgaaaataccggaaattacaacctttcattgccggtgaaaaatgtcctcccgtaaccggattataatcgttactgccactcagccgtgatataccgacacgcccattgggtaaatcctctgtgccgtaggctcttcctgcacaatggataaaatattttgccccgttgtactccccgatataaatgcctacatggttgattttaccctttcccagctttgccggatcctgtaaaaaagccaggtcaccgatctgcagatcctccatggatatcggagcagtagcataccattgcaatgccgtacccgacatggctactccatccggcactccaccaccgctgacaccggtgccaaagcactgtatgtatacccagtctacaaaaccgctgcagtcaagcgggcctttcggcgatccctgagagggagacttgcctcctataagataaggatggccaagcagggatgccgctacctgtgtcagttcctgtctggttacatccccgactacaagctctggcagttcgatttcatcaaacccgtaaacatagccatatacctgtgccagatactgactgttatgcatgctgagaactgtatcgctgtttttatccgtcaggccaatacgcttttttaaaatttcttcatatgcttcatttacagacaatgccggaagatagtctgtatcctcgtcctgatcttcttctcttttttcctgcagggcatttaatacgtcctgtatggtttttccagcaaaccaggattccgttatatccagatattcacaaattccgtctgttcctgcataaattttctgatccacatcccgccatcgtgtcacctgatatttctgtccgttttccgtaatttcttcttcataggcctcctgttctgtcactgtgaggatgcagaactgcagcgacgtgatcagcggttctctctcctctatccgctgacccagctgctccgcaagcagcacatccgccataagagctatatcccagggcacacccgtttcagaacagatggcctgataagctgccgctgtctcatcatctgccgggatgtacaggctggactcagcccctccatccatgcataccacaaagagtaaaagcaacagtaaaataccggaaaacatcgttccaaacagcaacgttattttgaaaaggaacgcttttttcatatagactcctttttcaaaagttcttccatgtcaaactcaaaattcagttcatcctccattgtttccgtttgattttcttccacttttttctccgactgcctgctttcttctgtctccgtctgatctatctgttctgcttcctgccccctcgccttcggagtggtagaaaagagatctatgatatcctggaatacagcatcaaaacgcagtattcctatatgcctgtcaagatcctggaaaagacattccccatttttcagattcttcaaaacttccttgttctcctgtgtagcttccagatccatgtattcacacatccgttccgcttccccgtctgtcgttgtctggaaacagaatttataggatatggtattcttgattccttcactgggaatatccgtaacggaatgtccattaaagatacaccctgtataaagagatctgcccatacgggataagtaatcaaacagtttgactccctctgcagtctttcccagcatccaggattcatcgaacaggactacactgaacacatcccttttttccagggcaaatttcttggcaaagtgggatgccacagccatcaatacaagagactgcagttcttcgcttgtataattatccttcggtgtgctggggcttggcattttcagattttcaatctgtaaaatattcagccggttcttcaaagtgatcgcatcttctgaaccatccccgaataacagtctggacattcctgtctctgcctgcagtcccagacgccttgcaagatatctggccctttccgacagttcatcttccctgggaaattccttcaaaattgcaatcagttttttcatagatggaacatcttcatcgcgcatgatacgctgtgcttccagtatagcggtatattcttcggacgccggcgctatacgcagcagttccgatatcacattgatcgccagctcatcagcttcatcccggttatccagatacatattatagggatccagtttgccctgattcgttctgtccggggatagcgttaccagagaaatctgcccctgcagaagcgggaactgctctacccagtggcttctctctcctttcgggtcaaagatcagaccatagccaccatacagaaccgtcagaaacaacagcaggtttgcattaaatgatttaccaactcccagattaccataaaaagtcgcggatgcagatttgtttagcaggcatgccctgcccagatccagaaatacctgttttccttctgcgccggttgtccctatgtaagggcctacatggtctcccagctcatgtgtagctcctatgattccgctgcccagcgtgactggcgttaatggcatggtataatcccctgtcagtactcccattccgggaatacactgcatgaaaagcttcagttgatctgccagcggacgctctatgccaaaagcaaaatcttcataaatgccacggactgttaccgcctttttctccatttcttccagattgtctgctgaaatgccaatcgtgactaccgtttccagcaacggatatctctggctttttaattcagcttccaggatatctgcatattcttttccatctgccagatcatccgggatgtctccacccgcccccgcaatatgctccatctgactgtctatctccatctttttggattcaactttacgaatcgcttcccgatagtccttggttttgatgtgaatacagacctccgcctgcacattcatctgctgcagcatatacagccactcatttcccgggtgctccagtacttccggaatatgggtaaacacaagaaaagtctgataagaaactctgttcttatcatgtactaccttcaaatatcttttttcctgatggatgctcccggagaaaagacttacgatatccttactgtaaggatgcagtatcttttccccattttgtgtctcgtcctggtctgccaccggattccagatatgtttatccctgtccgcatagaataaatgatttccggatattccccggaaactcccccgccggatcagccactgtaactccagaccatctaccggcacgagctgtagttttttattctgcgaataaaaccatttatcagccatgtctgcacaatgtgtcagccgggtttccagtatgtccctggtgtctaatgccatgaaggtattaatggcatttaccggatccttaatgaaatactgaaaaccctgcttcaaatccgataaaagttcatattccccgctgtccgacaatttcaccacaatgtaggaggaatagtcatttgcatctccctgttttctggtactcttggtcagatatttttctgtttcattcaggtgaaaaagtgccccctcataaagcggatcttttttatccaggtgatgcctcagagactcgaactgcccctgtatatcctgttcgatgggcagcataagtatctgtgcttctgacaggattccgctgaggaaacgtgccgttttgtgcagtatcttaatttttgcatcatcgtccagaaagtcataatcaaaaccactcagcttatataccgcccatgcactcttatcctggttaaaaattatattttttgtaaaaaacgaaatgggacactgatacatccttttcctccattattccagccttctgccgcaattccagttgattcttactgtcactccatggtctctgcaggttcggaaccgctcgatgcattcctttctggtaaacaggaaccgcagatagccgcaaaaatatttcaccggattttttccatccagttttactttcatgagatattttaccgtaacatacggcagcatgccgtagcggagcactaccggtatgttgttcaggattggaaatatccggcccattaccagcattgctcctactacagctaaaaactccaatacctcatacggtgctatcggaaacggcagtactatattctggaacgcatatatctttttttccacaaaccatactttacgataagagtacaccgtcacactctgtttcttttcttctgccatgcaaagctcctttattgcaatacagtacccataatcttttccccgatatccgataaggtggtaggatttttaataaagtagcagacaactgctccaacaataatagtcgtgactacaccgatcgtgttctttttcgccgccatcacaactgctccgacgataaatgccaccaacgctacccagaagatctgatccaacatccagtttgctccattctggccgtaattgccgctggaagcaaatgccaccatactgttgctgatcaataatgcaagtgtggaaattcccatcatgatactttttccctgcattgttcttttctgttccttttcatttttcctcatattatgttcctcctatttttatttatcttaacgaatgatattcatccgcaggacactgattaaaaatttacatcgttgttctggcagacatagactggatatagtactttccatcactgccccttacaacattgagccggaccttctgccaccgctttgctccatttacgacatcagatattttatattctgcgatgcatacgatcatactctcctcctgatagcagcgaacggattgcatacgatcaaatgtataacgaccatccagccctataaatttgcttcggtccgcatcctgactcagataatagtcaatgactgtttcatcctgctcgtaataggccttcaggaaactggtaactgccattcctgctcctgcagcagtctgttcgtctgcagcctgtccactgtattcctgaatctgataatcttccataaacgtattatcatttacaaacatggggagcccgtccaccaccatctcgccatcccgtgacaataccggaactttcattctggtttctgcgctctcctgtgtagcttcctgttccctgtaatactcatactgcacttccgccagcacatatacgtcaaaatgttccttgtctagctgatccatgcggtatgcctgcacgtacaccgccttctgcgcacccttatatatttccgtatcgctcacatttgatgtagttgtgatatactgtttcagacgttccttataatccttttcttcccctgcagtgtatgtaagatattcatatacaaagttctgggcaaagctcagtacctcattattcagcttcttttccgtcacaagttcctttctaaagtcgctgattacctgttgggcttccgtcagtgtgtctggtcggaatgtcacgattacgccccggacaaagaagaaaataagcatgatccataatattgctctgcccacacacaacaacgtgttttttcgcaaagttccgcctgttctttttcctctttttgtttccttatgttctccggtgtctgtttctcgtttcccgttttttttgtaaaattcaaaagtcctcctatttttgttcttctccatgccttgtctccttcgtcattaaaaatctccaaaattcagattcaggtcctcttcatccatccgtctcatctcttcttcgatttcccgactgttcatgcctacaaatggatcttcataagaattcttttcttcaccactcgttttgactgccgtcacctttttctcttttcttccggatcgtaccacttctgcctttttgttttcatttttccgcaccggtatcttatgttctggtactttatataccggcgcttccgtcaacatttctccctgatccacgcagacctcatgaagcattgtctcatcatcaaagtagaaactctgaaattctatagtttcatttccaaccttgtaaagaaatctacccttaatatcaggaagatttaccgcatctgtatttcccaggacaatctcactggcggttttatccgcaaaacgccctgatattcggaccggtatattatttttaatctgaccggttaatacattagcatccggacgctgcactcccataaataagttgatccctgttgccctggacaatcttgccaaagtagataatttcccttcaatctgttcatatatctgtttttcttcttttgccacgccttttttgtccaacatttctgccagttcatcggtgaacacccctatacgacaaagattttgcctggtttttttattgtattcatcgagattcttaacctccaagtccctgaatacatgcagtctatattcattttccttcaccagcaaatccagaacctgaagtgcacgttctctttccgtaataacctctccatattgttcatactgttttccgaactctacacctcccttgaagtctatcatatagactcgagcgccctgctcaatcatctgccaaagcaggcagcgtagtatcactgactttccggatccggtctcacccgcaaccagtacatgtggtacacggttcaggttaaaagatattgtatccaatgcactgattcctagtgtaagaacaccatttttgtcattcaaatattcctctgaccatttcaccatcgtaggtatcttataatccgatggtaacgtagttaattttactgtccgcttatttctcccgttttcaatttttatgatactgcagtccagagcagtctccagacgttcccgggaggagcgccattccgacagcggaatcgtagactggaaaaaaagcagtatctttttaccctctttgctgctaccggcatatttcggaaatttaccattctttcccttgaatccgatatcttcaaagcatttgtcataatttttttgtcccgtctgcccgatcagaaacagatagatcaccggcgctgccaacagcatcagataaattccctgctgcagccattccgggatagtttccgggatcattctgcagaccatagctttttctgtgatacagatcacactgaacaccagagtgatcccgattccaatcagataccacttgttttgtaatgctttccgcaggccatgccagacacccattataaagcccttaagcatttgtatcagaaggagcaaaatactttccagcaagctgttaagttctttatccattgtttttctcctgtgcaatccatccgctttaatccatccgcagtttccggttatacagatatctttttgtcgtagaaaatcttacatgccgcatgctgcgctgcacctctctgtctgcctgtgccgcaggcatcaccgcttttaactcccgtctgctgagtatcgcataaatgcggcgcagatcatgacattccattcccaggcgtcctgcttcttttcgcatcgtggcttcactataaaacagcttctctccctgtgtagcctgtaccctagaaacatagtcctgtaaacgatcatacaaatagggatcctgcctgcacgtaatttcacccccgtgcccacctttaccattccggactgtgaccgttatacgtccctccgtaaatgccaaatccgaaggcctgagatctgcaagttcagatacccgtagccccgagattacagcgagacgataggcatatttcaattttggattctcaatctgattgatcttacgcatagtagtcttcaaatgaatcacttttcccggcttcttcgtataatttctctttttcaggctttcttctttgaagtattcttttgcaggcatctgtagctgcggatagcactctccgaacagccgcagcgcattctttgcagcgctgaactcattttgggtccggaatctctgcggaagttctttctgaaggtattccagcgacagttcttccacccggttgatctctactccctggagtaatttcaccatgcaggaataatattttcttgcagtgttggccgtaagctgatcgtataaaaattccttatacggctctaaaatgtcatacttcatcctttttaccgtcagttccgccctgcgttttctgtttcttttccatttccgcccgttctctcttcgcctgttcccatgcccaatccgaattttcctgtatcagccggtttaaattttcgtctaaatttaatcctttcatttatgcatcctcccttggataaaagttgtactcaaatccatatcttttcacatttctttgataccagttatgaataacttccaactgtgcctttctgtttgctttctcataggcttttttagaagtatatttttttcgtgccatttccagtgcgatttctctcatcgcgtcctgcattcttggtgcacttctcaggtatgccttcatcagtccgtgagggttggcatttttctttgcctttatgctgtatgtaccttctttcgctgaagctctcagttccttcattccaagactgagaaaagagatatccgcatccgaaaaggtaccgccgtactccgagggatgattatgtgttactattttcccccgggcatactgctgtgttttgtcatctacagcacagctgtgttcgtctccctggaaagctctcgttacgtatccgtaatcatccagtacctgtacctgctctcttgtctcctgcagtttttttctttccagataatccagtgtcttctctgcattggtaaatcggctgccgcgatccatcggtgtcatacctgccacattcaactcttgtatttcggcatcttgagatccatatggtgaaaccgctgctatgatttctacaccgaaactacttcctctgcctcccatcttccatttccagcctttctgatttttataataaaaaagccttacgaactctatggttatcatagagccgtaaggcttatggcaaatactgacgatttgaacgcagacctctcattccaaagtgttctacccgacttaaactatatttgctctctatgattatgccatattttcttaactttttcaagcagtctgacatctgaaatacttaatggatcatgctgattttcagagttttccgaatgcaaatacccttgatgaacatgccactgcttatttttcttgtcaaactcaattaccctgtttctccggttgttctcatccatctgaacaattctgagaatctcttcaccaccaatttgtacatacgttctcccattggtcattgtttccattaacgcttcataattttttcctgcattagtgacaaattttatattttcatactccagtaatattttgtactgggttccatatgcattgcctttttcgcttattccgctgctggcaccacgcccaccgaaaaactgtaaatttattaccattgcgatatttctgcctcatgaaacctttcactaaatgctttgattctgacaatgtcccctctacattcttccggcactgctccgcagaagataacgtgtgtcggttgtaatctgtccatcatttcaaaataacctgccaaaaaaagatctctacgcttcctgctgttttgagttcctatcgaagaaacagcaacgactccttgtgtaggttccccgtcaaagcaccagtgaaaagaatctctgtcactccagcagatagttggtattacatgaagtcctttttgctgaagataagcgccaatccaatgcttcctatagtgattataaatctgcaatgctttcgggaaatcggtatataggctgaaatccggtgtcatgatgctgtcataactggaaagcattggtacataataatcgatatttccccaaagccgggtaaactgataatcctctaaaaaaaagtgaattcctttccctctccggtcttttacagaagacgcataattgaagccgatccagtcacaatatttgtattccaccggttctaatatcgggatgtcatattctcctgttaccgaaaaactgcctttattgatattttcataattcctcttctgcttctccttccagctcacctggtgtactctcctcttctgacatcctatcctgccaatgtaataataagtaactatccttgctcctgttatccaacataatgcttctgtccatatctgcagtccgtatccggactacagatagaatgcagtcgttccatattgcacatgccaaacacgcatatgcaatattccactctgcattatgctatataactacgttatatagcctattatcgtgacgtacatatttttttactattttcctaatatttcagccattacatatggacattttcccacgattaaaaatccccttatgagcactatatatgtacattacttttttcagcattttatggttttttcatttcataattaagattccgaatgcattcatatctctgtatattgatgacgaccagcggtcgatattgattattaatacaaattcttttcgtcagccttttttcttccgcatcgatccacgccaaatctttccagtattttaatttattcgtagctgtttcatatttatttttgttcagcagatctatcagtgcctctttttctactaacagactgccttttcgtaccataggcaaagtatccttcgattccctgtttctggtcacaacctccagcaaatactcacataccgcaaggtattcttttatcagcaaatttaacatttctgttgtctccttatcttagtggcaatagaatgatagaatccgtatgcactgtcaagactttctgtcattttttctttttttattaaaaaaatgggaaaaattaaaaaaatataaaataaatttcgttcaggatctgtgttcatactttttttctttctcccatttttcacggtaattcccgcgatcatatttttttaatttcctaatatcatttttcctgtttttagatgcttaaattatcaattattttttttgataaaaaatatgctctcgcttttccacttgagaacaagcacttattgccttccacgcgtataaaacccagctgtttacaataatcaataaactcctgtatttctagttcagataaccgttttacgtaatcttcaaacacatttttctccacacggtaatatacctgggctgattgcgtcgcatatttcgtttccataaatgcatcatcactttttagagcttctaatatcacgctgaaatcccgcaggaagatattcagatttcctccaatgctttcacttccttcttgttcctgaattcttttcagtccctcttctagcaattgtaactgattttgcttgtgacgaattcccacttttgtttcctgaattttaatcaataattgttttttcttttcccttactctttcgtattctaatacaccctgttccatctaacttactcccttctaaattttatttgaaaaaccataaagtagcatagccactgctatatatggaatcaaaggcaccggtcttttcagtcttccatttttcaaaatattcatttttctgatctgatcgatcagttctattattactgtcagcagcatgaacaataaataatctatcagtttcttaccacatccgttcccagccagatatacagcgcataaaatatatgccaggcaatcggatccaccatacagccgccggaatataaggagttgtataccgacaaaaacaattaaattaattatgctatctgccccaggattatcataaatgagccataatataccactagctaatccaggagcatatattatatccggaatcagctggatatagtgatcaatccatgcagctaataccaaagaacttaacatatacgcctgcagtaattgcattacctgtttattcggatctcccataacgattcctaacagcgataaatacataaaagctattaaatgctgccatttacaatatttactctgcagagtatcacacagtccgggatccggatccagcagctgcagttgccagcctatccgatagctgccatatgcctgcaggatccacaatatcacagacattatcattacctcaaacgagtacggaactcatccagtacagtaccggatactccgattacgctgattgtcggatgatcctccagcttcttgtctcccttatacgcacgtaccgttatctccagattctgattctccggcgtataaagcggcaccataaactgtaaatgctccgtgatcatatatcccggacagtctgtatagtcatatactttgttcagagtcggatccagtgcagtcatgctctccgggaaaataacttccacccggtcggcatagccccaggtcgtaaacgtaagtattccgctttctccacatttgaatataggatcgtgcggggaaagaatacgttctacgctgcttgccaacgcaaattccgtcgttccatagcttagactattttcgtttccaacattgtccacagcataccccagcagcgtgaaatctccgctaaaaataggctcgtcattagtaattgtaatattaatgtatccattctcatccggtgtgtaggttttcatcacagcattatcagaattgctgattacgatataaaaatcctttactccgctcagttcatcttctgcgctcgcccgaattgtaattgatccatcccgccggtcaatcagatctctgtcttccattatttccaatccgcggatcaccggcgcttctccgtccgctattaaagtgatcttattcttttcatccagttcatgcgccgagtacactttatccgattctttgtctgcttccgcaaccggaataacctgtatcgtctgtccagacagatctctgctgattgtaaatttctgtactcccataaggtctctgtttttgttagatctcactgtgtaagagtatgaatattgctgcagcgccgttgtgccatacgtcgaataagccaatccatttgcatctgtcctgatggatgtatctgctatctcagtggatgctgtgcggattatatttcgggctacgctgctatcatctgatacagtctcgtagatagtctcgttaagttggtatccccggcttgccgtaccatccatataagcctcattttttagggtaaatggagtactgccatcggcacgcacgtaccaactcttatccgttgccggatatacattatctgcagatgcatcaatgaccagctgcttcgtataaagcttccatagtacatctttggcgtcaatgaggatatgcgttgtctcactgatatttccagccacatcgaccgctgcaatatgcaaatactgattgtattctgccgttaccacatttacatgaggaacctgtacataatttgcattgccggtaacaaccgtatccccattttggtctacgagatagtaatagcccatcacgccactaaccagcgtgtttttcgtaacattagatccgcatagcattgatgtgcttcccgttaggtaagattccactttatggtaataatccgtaccattatcgcttggcacctgccatgtgacgcgaatcgattttccatccaatggctcttttgtaacctgatccgatatcttgtccggggctgcaaagtcggtcgccgtaaccccggcaagatccaggctttcctgatagccaatggcctttgagtgaagttccgctacaccagatccgctgcgcactccactatatgtttcatacatcatggcataagctgaacttacgtaattgctaccgccgtatgccggttttgatgacagtatctggccattgtacataccacatcgataccctacgatggtagatgtcgtttttccacaggttaaatcataataactatcatctatttccttttcccagtttggattaaaattaccacatgctccatacgggtttccgggaaaatgagcatttggaccttcttgacaattactgcagcacagattatctgtccatgttactacccttttattttcaacgtatttggtataacatccaccatacctgtctctggatcccacgtgcgtatgataaacattacaacttgccacatgataatggtctattctttctccagctgtaccaccctgatagccaccgccacctccggccatacctgattgtccattatttccgttaataacactcgctgcacttcctccggcatttccgttgccatgtgaaaatgctccgccacctccaccagcaatcataagagtgcctttttggttggacacgacagaagtcatgcccccaccattgccaaaagaagaagcgctaccgccaccattgtagccattttgaccaccaactacgtatgttaagacctcaccttttcgcaaccaaaatgttccggtaacactacctccatagcctccggtataagaaccatag
